United States Patent Application Publication US 2014/0057251 A1 - sequence listing, part 125

SEQ ID NO: 227620 - DNA, 2691 bp, Cannabis indica
acaaagatcgtgtgatcattactgaatgcgtaggatcgtgggatttgaggctgtatacaccgatagtggaatcgtgtgatgccacatccacgcaagttcgatccctaagttatagggattgagctggtgactcacgaagtgcttggttgaattcgctaagtgttgctcattctgcacgcctggtttgcatgtccatcatggacatgctagtgaggcatcctgctcggcacgttcatccgactaggtgctctaagttgatgccaagtgtcaccattctgatgatgccatgtcagagtgccaattttgggataatactttgtaaacagcaacggacaaatagtaaggtccgatgttattggggcattgaagatgagaatgtatttgatgtgagttggcattgtgttgggatagatttttcttttgctggtaaatgctacggtgatttttttaacctttaaggcatcagtttatgttgtctgtgtgggctctttgggtataaggaaattgttgtacaagatcgacaagatccatcctctcattttgtcgatttctcacgatgtgaactcgagactcaatttgaaaaattttgaattactccataaaaaaagaaatctcttgagaaaagaaacgaaacttataattactcttgcgattgcaatttaaaaattaaatctcgttattgcaattctttcaaaatctcccgagtgcaattcttccaaaagctctcgatgccataagccatcgcataaaaacagttaaggcaagtcgacattggaggtttaaaattttcaagctctctctaagttatgatgcatgtaatactatttctatgttcttgatcttctcagacataattttgagttattcggaggaattaagaatattgattatgttttcttttgtaggtctcaattgctcatacttgtaattgtatatatgctttaattcagcagaggcatcatgatgatgaattcaagaaatccgctactaatacactgtaagaagatgatttagaaaggtccctctatgaatagccatgaacgaatgtatggtaggaaaaaataatggcaattcctcgtcaataactactcttgtgggtggaatttgattcttcttaacttggtttctcgaagtaagtgcaacacatcttttgattctagaagatagttgtatttatggtttcccaaaaggctctgtttcgagttctccaaacaagtgatcacgactttcttcatgagccctatagatcaagcactctttcactattataacatcaaagagatataatcgatctctggtatgcagcctccacacaactaaccacactataaactcttttttggaaggctatacatgtttcatattctatcatgccacttctcctcatgctaagtaaaaagtaatttgaagctcacatattttatattgtaggacatatgaatcaaatctatttccctataatgattcttgagattttatttttatttgtagacagtgatttgtagaagagattgctccacacgcatttgagaagctaatgaaatatatgtcagtaactagtaactaaatatgattaattgtagctggtcatggttattaagctagactgaggttgactttatgttggtagttatactattcatatattttttggtgttgttgatttcaatgttgttttttgggtcggcacaacacttaattttatattctcttaattaattaaacacttactttttgaatatatttttcagtatcaatagaataaaattcctcaactttcacataaacttgtcctctcttatttaaattagctaatagcatatcaacatgttgaagaaacattatatttgataataatagtatattaattgttatgtttataattaattatagtatgcttcaacttttaaagctaatagttatcaaagaaattgaaacacattctattttttatttatgaggttagtaatctccttattgtgccataacattgttatgaattttaatggctttgaaaaccaattattcatatgagactctctaaatggttaagtgattgcacaatcctcaatgttctttcctttcaatgaatcaaagaataaatgttcccaaaccattctatcatttatctcaataactttatttatttaaataactttatgcggtaaatttttttcaaatttgcatatattatagtatatatatatataaggatatgattttgttccgttattgtactttcacagattgtaatccgtgatgtacggcagccgtcagatgagggagttatttaatctgacggttgagattgatctaggggtaattagggttaaaaagtagaaacgtaccctgacactcatttaatgtatcctgagacccatctaatgtaccacagaatacattccatgaaagtacatcatgggacaaatcatatccctacatatatattgagattaatgtaatgttatttataaataataatataatttaacatttgtgttttacttattaaacactcacctactgtttactttataagtctaattgttcataaggttatatcactttacatattttttatacatttaaaattacactacaatatcatgttcaaaaaataattaaatagaacaatctaacatttcaatattaaatttttttacagttttataattacactaaaatcgcatt

SEQ ID NO: 227621 - DNA, 2720 bp, Cannabis indica
aattaaaaatctgaatcaatatgtatatgattgaaaataattacttccacaaaagcaaccctttatttacatccattgacaatggtttaattataaattatcaaactcaccgaaacatgaccatggccacctaatgaagattgcagtagacgggttaagcttagaatctcggtatggaacatgacgatgccttcccttcactcaatttccctatgaccttcacattgcaactatacaattagattatgaccttacaattcacaaggatcttcatatacaagaatactcatgctgaataaaaatatgtgtgtatatatataaagaacaattactgacagggattactcaatccttaactaagatagtttagaatattatataagggaatgaaagattgaacactggacagctaggtggttctttataagagatacggcacactctgcagattaaaatctagacagaagtaagaaggatattgatattcatagtagtttagtggagacatattgaattgcaaaacacctactgttccaagagttaaaagacttttgtttatataggctccttcctttcttcgtagtccagtggtttcagtttttgagctttcggatccagctaaatcaatcaaattctataaagacaatacataagaaaacaaaaattagattagaatattattaagtggacaatgattcatctgtgtagtaagaaattgatttgcaccgtacaagttgagaaaatatcactccgtcatactcgtcaccatgatcactactctcaatcatctgcaaatgcataagcaagttagagagtgggaaaaaactgtctgaaataagaactgttaaaactgtgaaaattaggaatggttttagttgatgaaaatttaacaaataataatccatatagctaaagattgtaaaagacaagaaattattttaaataatcttactcagatatgagaactatgaaaattaaattttggctaaaaacttgcaagttaattcatgcaaggacataaaatttgagacagcaatagacgaaaattgataaacaattaccagggtgaaaatggtgtgacttcgactactcaacaaattgaaattgtttgatccaacatgacggtgctctgcataaccagcagccacaaacgaacaacattataacttagatgatatagatctgacaatctaacctttatgaaaagagcatctcttgcctcgtggggagtaataaaaaatacataatgatgaagagagagttcaaataccttctccagcagcaataaaagaaagtgcatgcccaggtgacagaacaacctcttccttgataccttcaacataggtacccttcacatgaccacataaagaaatgtcagaaatccatccatgatcataaaagtaaaggtactcataaacttttctttttaagaaaagtgcatcatgaagaaagcggtaatgtaataaatgtttataaacaaaagataacagtagataatgtttctattaaatagcagaaaagtgaaaaacctgtgcatcttctctaacacgtaaattttgtccagtgggatcaagcaagtcattgatcacctgatacagaagcacaaatagcttaacaaatcaattaggtgacacaaattagagtaactatttttagtgtaaaatcagacatcaataacagaatatttgtacaaataagtagtattgatgggaagaaagaataacataaagaaaatgaaaactgtaatcttgaaatgtgatggtagaaaccaatttcaataatgcaactgtaaaaaacaaatccaaacatatgaaagtgcaatatgaaaaaggaaaaaaaataaaagaatacagcttcccaatcaaattcttgctttataaaattaacaatccataagagaagaactgacctcattataaatttcaagatatgatacccgaagtaaaaactctcttcctggagtctgtaataatagccagctatcaattagtcattaaagcaaccaacttaaaccagtatatcattgaaatcaaccaaaatccagactaatcaagaataacactgacaagtacctttcatacaaataacattcatgtatcaaacaaaaaaaaaacaataactacagctttttaacctcaaacacacccacacacatgcacaaacaacacttaaatttcatcaatcagtgaagcaattatcctaaagagttgacctacaactccataattagattatagagtttgcatgaatatcaggatgtcaaatcatgaaactatagagactaatagcataaccatatttctaagaagacagtcaggctccaccagacctttaatagcattgaaaagttaatataaacagaaatgaaaaagtgtttatttattcgttttgcactacgtacaaaaaaaaaggtagaaatatatatgtatctactgcaacagcaatagtacttacatcttgaataatactgaacacatcctttatggccaatggtataacacctggagcattttgatctccctgttcaaaattgtcagaagaaatgagcagagtaatggagaatactataacacatagcaatttcataagtttatttttggatcagaagcaaataatattacaggtaataagaaacaacattttcgccagatgatggaataagatattgtcttttccgattacatgaaggaccctcactcgaagcataagagctgaaataa

SEQ ID NO: 227622 - DNA, 3235 bp, Cannabis indica
aaaaaatagatactattccatcttattaagcaattatttcttaaatgctttcgcagaaagagatgtatatgatagacaaattagaagaaaaaaatagctattacaaaatttgaactatcaaataattaaaaatttatgcaacaccctctaaagttgcaacttgtttctttgtgactagtaaagttggttcaaagacaatatcaatggctaatctacaaacaaagatcgatcaataattcagagttcactaaaatggaactggaacaccttgtttcttgttcacaatagccatggctaaatagcgagtacccattccaatcggtgcctcttcatccggtccttcccaaaagggagcttccccttcccccaccagacgccaatatccagtccttagagattccgcttgctcatctgtgcagtttggcaacaaagcatccactcgaaaatttatcccaagggaaccgaggaactgagactgagtaatcgggccataaacagccacatctcctgcaagagattacgagataacatggttatatcttcattcttttgtttttcgttgttccattcaaatgtggaatgaagaaaacgcacctgatacttcctcagcagaatgccgaattgaagcaaaatcaacatatgcactgagatctgctgagcctggatcatcgagaatgtttacaaatttatgtttccgaattgcctgtgataaaatgtattacagcatcagcaagcattaataggaaagaagaatgtaaaggcttttcaaacaggatttggcaccaaacatcacacgatagcagaaaacttcgcaaagctctccacatcagaccgtgtaatcttttgtttccaaagtatattattaccccataaaatttcgcaggtttaaatgatcaatagatacaagcacagaacatcacagatacataaatgttaatataaatttaaatgcatgcaaatttgcttagttggttactaagaaaacacaatactaacaaaggcaaggtacggacctgcagactatcggaaactatcccattcatgccataatcaattataagagccccacctccatcagaactgattctatcggcaatagtttgagtcagctccattgctttggggcaaacctcaatttgatcaagctttgttacttcttcagttgaggcccatttgcaacgttttgccagatacagagttgcgggtgtaggctgtggagatagaacaaaacgaaacctagccgatatttaagcgtatcaaataactctgctaataaaagttatctgcatacagtctaattctgtcaaaagtataaaaccttacgttgaatcttctgcaacatcaaccattttttcactccagcctcgagaagccctctgtagaggagaggtaaaaatcagacaagaacaagatagcagcaaatttgaccaagatacaggcatggaaaatgaagaaacatattaatgatttagaaaaaataataaggaaagatacgtatattatttatcaaaaaaaaaaacaccttaaaagatcctttatttcatgtaaatgcagaaaaatgcatttcctgattcaaaatatattgaatatagattgaaatgtatttgaccaaaagatgtgaaaaagatcatacctgaaattgatgaactggtaaagcatcgtaaaattcgtgagcaattatgattgttggcactggcaaaaggattcgagagaacaaagtaaggaaataattgtagttatcagaagaaaagaaaaaacacatttaaaaaaatattaaaaggtcaacagatacaagtttgttgtttaaataaattgaaaatgaaagtaaaatgttgttttttgttttcaatttaaaaatattaaaagctcaatagacatactttattttactatctgtttttggttaaggtttataagtatgtattcaaatgtatatatgtagagacacagtatgtacatcttttgttttacaatttatttgaaaaaaattaaataaatcactagaaatttgtcttctctttaataaataagaaaacaaaagttaatgcagactaaacaaatttttagtgatttatttaatttcaagatggaagttatttatttaatgcaagcaaatccttaataagctgatatttatgagatttgtcacagcataaaatttattaaacttcacaacttggtttccacaagaagcatttgttatgcaaaacttggtcaacactaaaatccaactcttacaatttgcatcatcaagtaagctaacaaaaaagtaaaatattcaaattcaaagaactgcccgcacaagtcccatctagcctgtgattctttagcaacagtaataaagagctttattaggcagactagctaatattaattatccatgcacaaaagttttgcaagcacatagaaagaccagaccagagaacgcattttattctattcaatcaaaaaatacacattacaatacacaacattaacaaaaagataacttcttacctcctgaaggaacttgctccaatgcagcatgccatgataccggtgtttgagccaatgtactaactgtccttttatcaacctggtctgtaatatcttcatcaacacatttcaagttctcgtgttgaagtttctgcaatgttggactacactccaccaagtgtacatgcagtgactcaatgaaatttttaaactttgacacaccctgcattaaaaatattctattaaagatacacttccatttctctgttgtctacctcaaaacatgaaatttgaaatgagaatcggcgattcatacacgaagaagatcaaccataagagttcctcttcccgggcctagctcaactagattaactttcttgggttgccccatttgctcccacaagcacattgcccaaacgccaaccatctacaacaacagttcaatatacaaactagttcattataaccaaccttcaatactcaagtgaaactaacaagaatgaatctcaaacaagaaaattacctctccaaacatctggctcacttcaggagaggtgatgaaatcaccttctgctccaaacacatctcggttaatatagaatccagctttaggatttgtcaatacttcctccatatactcagcaaccgagattggaccaccccggaactaacaaacaataaacataaaaattggcttagcatgcgagaggtacaggatcgataccctgcgtctccattgattttttatgttttatttttt

SEQ ID NO: 227623 - DNA, 3010 bp, Cannabis indica
aactgaaagtaactaacttcaactaacagtggaggtaaaaaactggtttagatttgagtggattatttaccacatatgttttatatggtcatgtttctgttttgatagttatatgataaactaagaaacatataatccaccacaacgtgaaccatcgtttatattagtcacttccagtaaatctatacgttaatttacaatgttaatatcattatcaatcatcaatcaacatgcaatttaatttttccaaaaataacattcactgcaattcaattcatgaccagtcctatggggcctaagcaaaatcatattttgggactctatatatatagtttaactatgaaaataatagttttagtgctgagtgtaatggtaaagcttttaaaaattcttaaaagctccaagattcaatccctgagcattcggggccgaggagcacgcctaggccgcctaccctcagggccggccctgatttcaagttttcagaaaacaacatttcactgcaattcaactcaattaccttttttatgtaaattgtaatatcacattgcttttaagaagcattcgagatgttgaatttggtttattttcattctaattgtgtcaatttcaacatttcttattgattatattatcttaatttgtctatatgcactgatttggtgatacacagacgtagagcgtggagacaaaattgtagactatatcccaggcatttctacaactcctcttgcagatttatccgaccggcttttccacagtaacaatgaaaaaatggctgaattaataatagaggctgtttctaaggtaaccaaagtacaataccttctatcaacttcagtgtatgagcttgaatcacaagtctttgatgtcttgaaactcaaattctccttccctttgtactctataggacctatcagtattagtcctcagattcaacttgaaaatacctttaatgacaccactaatattagtactgttgtagagtatatacagtggttagattctcaacctgaagcatctgttttgtacatctcgtttggtagttttctttcagtttcagatacccaattggatgaaattgtggctgggatacgaactggtggtgcaagacacatgtgggtggcacgtgagaatgtgtcaaagatcaaagatggttgtggtgatgtggggtttgtggtgccatggtgtgaccaattaagggtgttgtgtcatccttctattggtggattttggactcactgtggctggaattctactttggaagccatttttgctggggttccaatgttgacttttcctataactgcagaccaacattctaatagcaaacaaattgttgaggaatggaaaattggttgtaaggttaatgataagaagaagataatatgtgcagggactgatcatgttagtttagtcagtagagatgagatttcggtacttgtacagagattcatggatccagatagcattggcatgaaagtgatgaaaaacagagtcaaagaacttcaaaaatcatgtcaactagcagtctccaaagggggttcatcctacaaaaatcttgatgcttttattgaggatatttcaccaagcaattaagagacatgggcttgtaattattacgagataaaagctatgagttatgactgatgaatttgttgtcttcagtttttttttttttttttttttttttgagtaaaagaggctgataagaaaaaacaaccgaaaaaacagccagcctaggaggactgaaaaaaaacagtccctaatcttcatctcgcaacctgagggcttgctttgcaagggagtgcgcttgagcattgtgttggcgtggggtatgcagcaaagaagcttcagggaatctggagaggaaggttctgatctggtgaacaagagacgacagaggagaattgtcttgccaatttccatttacctttgtaacaaggttgaggcagtcagagaaaatataatcgggcttcaaatttaaggctagacaccactgtaatccttcagcaagggcttgagcttcggcaaaaataggggatggagtccctgacttagtgaaacttgcagattgagaaatgtgggagacaccattcatgaagactaagccaaaaccagtgattgaagcagtttgattgagggcagcatcaacaaaaagagcagtggttgactgagccaaaatctgatctggagctgcagaacaagagcttctagaggtattggaaacaatgggggaaagttgcgccgcttgataatcctgcaaaaaactggaaacataatcttggacattggtacataagttttgcctttgaaagatatgagcatttctggtattccatatttgccagatgattccaatgaataagggaagttgatccttaggaactgaatcaaggctaagaatgtaaaagtctctgatatcaagcctactgttgtcagcaaaaaattgtttaaactgagactgatgccagatggtcttcactctggggcagtgtataagagcatgggaaaccgtctcaattccacccccacaacgagagcaacaagcactgggaatagcatgcttatggaaaaggttgagagcacaagggagaaggtggttaaaagctttccaggtgaagtgcttaattttgggagggattttcagagtccaaagaaatttccaccaatccttaaaggggttaggatttgaagaggaaggggcagaattattgacaatggattgggcaagatggtaggcagatttgacagtgagaattcccgtggggtgatgaccccaaatgagagagtcagaatgaccaagatctataggaatgtttaggacagctttggcttgataagaggggagaaagtgatacagttgatcagcattccaggatctatcttggttaacaaaaagagagacattggccagggaagagtcaatagggtgaagaagagtaggatgggaaatttgaggaatccagttgggagcagctataggaatattactacctgtacagatttt

SEQ ID NO: 227624 - DNA, 3948 bp, Cannabis indica
ttgattctaaccaacaaagaactcaccaagttggtgtgctgagctacagacaatggcactaaggaaatctgtggaaactagtttactcgaggaggacatggaagtgatgaagttggagttgccttcggtgaaggaatcaattcaagaagtgggcaaacatctgcaacagcggtttcatgaacaatttcagagtttcttggagagacgaacgatcaagaaaggttcaagaaacaggagaaaacgtgggaaaaggttcgagaaaaggggcagctgaaaagaattctaatgttggagcaacctaggaataaggagaaggttctcggactgcacctgaacacaatgaacgaagagatattaatttgcaccagtgacaagaatactcagtgagaaagcttaaaatgtcaacttttgatggggagatggcaaagatgtatttttcattttaccactatgatgaaagcaaggagatcgagagagcatttctttttctggatgccttgcttcattaccaatgagagaataagaaaagaacaattttgagttgggaagaaatgaagcggatggtgttgaaacacttccgagacacacaaaaggggtccctttatgatcaatttctgtcaatcaacaagaaggatcaatgggcaagtataagaaaaacttcatgagattattagctccactccacaacatagaacccaaagttcagcttaggtacacttctgaatggattagcaccttcaatcaaagttgagttaagagtacaatgaccaaggaatgtggataagcaatggaaatcgcctaagacatagaagaattgttgctgacaacctttcaatattgccaaataacatccaacttcaatcagaccatgatgcactttacaagcaccacacaaggatacacaccaaataaactcacctatactaaacgaataggcgaggtcaaaagattgactgaaaaccatatccaactcaactgggagaatggcttgtgcttacaatgtgatgacaaatggttcctggggcaccattgtaaacaaaaagaaatgaatttgttgatagttttcgacaagattgaggatttgagttcgatacaaagctccaaggatttggcagctaaaacaaccaagttaaccttcatagaaatcaaagaaacaatagaagtatcattccattcaatgaaaggcttacctacaaacaagaccatgaaactcttggaccaaatcagctcttgtgaggtggtgatgttgatcgatcccagtgccacccataactttatttctaaggaaatagtttcaaaattggcattacagtcagttggaaattgtttctatgaagagtgaagggatgtgcaaaaatttgaacctccatttccaagggatagaaatttgggattacttcttaaccctaaaatttggaagtgcgagtatcactatgggactccaatggctaccttaggcatgacacatatggattggaagctacaaaccatggctttttaggtcggaaatcaaacaaccacagtacgaggtgatccttcactcagatttggagcttagagtagcgcttgaagtcgtactacaacatcgacctaagctaaattcgagtacaggaggtcttgattaagtggcactcttccagtttttgaagctacttgggaagatgtctccaccatcgaacaacaaattttgagcttccaccttgacgacaagttgaaggttttaggaggcagtattaataagccaccaggttaagtgacaggacccagtcagagaatgaatcaaaccaaagaataaaagattttcttgcagtgaaaatcaaaccaatagattgaacaaaaacatgacttgactttattcaacaagggtgattacatatataatacttagaacaactcattcctgattctcagaattaacacccatactctttaggaagcacactacaaggtgtgaagagttgttcaaactaactagtttattcataacaatagcttaaaaatgtagaaactaatatagtcattattcattaatacaaatactttgggttatgttcaggcacacgtgtagacctcctaaatggtccatcattaagttagactttaggcttagttgtactgtctttacttttaattaatagcttatgtgtattagtggttgagttgatgatgtggcaattattttaggataccttaaacttagagtatataaggggaggggttctctttaattggtaagagttgacactcattgtggagagccccaatcctctcaaaatattggaataggaaagaataagcctctcaaaagcttgtgaattgtaattttgaacatcaattcaataaggtttctgtgaggaatttcggctaacctattgtgtagaattaattctaacaagaaagaacttatcaaactaaactgtcctagcctaaccttccattccattattttgggatcacaaaactataacaattattaggtaggcatccatgaaagactcgcccctcataccttagtccaaactacatggccaaccaattgagctatcatcaataaatagattcaatttttgaacttattataattttcaaagtggttcactccatcttatttcctacaagaattacattgacaacattctcaaagactttccctttcactacacctaagcgacatgttaacgtttcaattattaattagacaccatatgctcttttctgtttagtcaccattggctgaatcctacttttaggcatgcagccataagttcattagagtaaccaatcaatgaattgatttagatcttggttggcaatgattatttacgtaaatgtaaccaaacaagcccttagtattcttctattagatgataagaaactcatgttcaatgggaaatcacattcaagttagccaagaagcataacaacatgaaacgcttagaattaagttttctaataaagatctttacccaaaaaaaaaatacttctaataaaggcgggcttatattaaaaggttaagaatttcttaccagaagcatcgtctcacagagcagaaattcaacaaagcagaataaataaacatttcaagagtagcagcctatgaatatacaaatagatacatatagagagtagttgacaagtaaagaccagaatacaaacacaaagacttgcttattatcaacgacaataccatttaagaaaaaaaaaaaagagttttaagcatctgtaaatatcattcgtttatgattaccagactcgaattagggctgatagaaattaccaatcggtttgtttcgcatcagcggtgggaatcttaacgtaacccatcttcttagggctaagcccatcatcgtccacaacggcgctggttgtgtcatcggcgtcgtcctggtagcgagtggagaagagcgaccaggctaagtacatggtggcggcagtgagtgcgccgcagccaacgccgaagaggagagcgacgacaacactgaggatatccttggtgcgatcgcggagggaggtgagatcgtagggagaggtggaggcggacaagggaaaaaggggcatcttccgtaagggttggacttggcgtgaggcttcttcttggtattgtcgtcgctgttcttgttcttgttcttggtgctcttcttctatgatccaagcctcaccattgacacgacggaattgggtgacctcggcgaaaatggtgacgaatcccgatgaggagtggaattggggttggcggagggagaatgagtaagaggaaacgaatagggttttgcagggccttgcggaggtggagacgatagagatccaaatcagtagaatggtcaagagaagacgttgactcttggaagccatggcagacatttcctatctctctctctggtgaatttggggattataaagacctaatccaagctagtcttgttcttttctacctgctttctctcaccc

SEQ ID NO: 227625 - DNA, 1874 bp, Cannabis indica
aaaagatgattttcttgtagtgcctgtcagcagcaaccttcagcttgtcgatgcttttaccaaacctctcccctccaccatccttacttcacacttgtccaagatggccattcatgatatctatggtccatcttgagggggagtaacaagaatactcctactgctctactactgctacttacttctactgtgtcggttactttgattttatattctgttttgtaaatctgtttggtttgattggttattgcagtccctacttttatgggatacaatccctaactttgtgggattggttttcctttcttggcttcctatttaaagcctgctttccatttgtaatcatataataatcaataaaatctttttctctcttcatccgcaataattagttagattggatgttagatgtattagattttcggacaccccatgcaacatccgattcgatcgaattggacattcaaaagtaacgtccaattcgatcctatcacaattggccatctaatgtttggcggtcggttttaattggatcaattggttgtcattggattggattaatttatgcacacccttaaatacaagcttttgtaagtaagcttttgtacaaacttgtttaagcctagttctttataagcatagaatcagcgagtcgattctttcagtgcaacttccactagtatatatacaaataaatatacgtgcatattaaatgacggacccagaatttaaaaagagagagcataacaaatttttttaaggcagagcaaaaataaacttattaaaaaataatgttgatatagtgaaatttgaactctaacctctatcaatttaatttagtcactacactaaaattaatgttatttctataaatattatattttattataaataaatattataaataactaaaataatgcatatacaatttttttttttcggatttgagctcaaatatacggatcgaagtataatgtaacacgagatttatttcattagtttctgtcaaaatatatcttacagtactatgtatgtattatatatatattaaccctagaaagcgaacaatattgatcatgaaattaaatttcttccctagtgtcgacacaaaatccgtgcgcaatatatataatgcatgaaatcatgcatatgtgtttgtttgtgtaagcccttctttcattcttcatcgatttcgtagatcccttttgattttcttttcttttctttttttcttcttcttttttttggcactttgtattagtcatctcatttttttagcaatgcacgatggtctagatttttcttcttttggctaattattcatgatacaatactccaattaacctattatagttggtcattataattgttcctacaattattgaaaatgtttgggacttgagaacatgttgggtctaaatttgccaataaaggcaagtagaatgactttagtgaggaacattatagaagggtttaggtcgggtcgggcaactatttttttaacacacttgattgattgaaatagccatatacataacgactaaaatctcttattataatatgttaaataattggtccctcgccatcaagaagctttccgccatttcttttgtcatataacatattggaagtttgatccaatcggtggaaatatttcattttttaaaacatgatgaattcataattaattttttatatctatatgtaatatagaagattggatatataacaactcgttttgtttttttgtgtcatgtatagatttattttaattttttcttgttttatttaattattaataagaatgcatcttgataatttaaagaattttgcatttttggattttactttttttttttaaaagtaaaaataat

SEQ ID NO: 227626 - DNA, 1558 bp, Cannabis indica
actctgccacattaatctctttgccaaaaattagtaaactattctttacattccaaattatagagagtaagcaacccatgtataccagaaacaaatttctactactactatgaatagaggaaaggaggtttttagcaaaaagactcaaagagaaatctcgtatcttctcaccaataagagaaaaaattcttgaaaaccaaagagccttagccacactacaatgtttgaacagatgcaaacctgattcctctcctaaagcacacaaataacactctttttctactacgaacggtactcaactcttaatagggatagcttcattcaaaattctctacaccagcactacaatccttggattagtatcagcatgctataagcacttccataaatccctttttagaccaaacctgtttccttgatccacacagtaagcactcttcatagaaaactcaccattcaattttatttttttcaaataggctaatccaaatggggataaggaagtctaggaatctccataattcttttgccaagttcttctccaaaaatttggaacacaatctcactattctaagcattacctatggacaaatctgtaacaattttaattgtatatcttctactttggagacaatccattgattgctcaaactcatggaactccatccatggtatccaaggttgcttccacacatcgaaagaacctccctcgactgacaaagcaactgaacccttagagattaaacctctaacatcctacaaacttttcaacaagtaagatttgttactctttgctttcactacctaaaagctttcaaataaataatacttcttgagaagacaatacacccgaggtttgtctaccttttaagccacagactaggctagtttagaaagcaaaaccctattcatgtcattaaaacttctcatgcccaagcctccaaactattttggttggcaaattaggtcccaagccttgtagaccataaacctatccttttgcgcactaccaatctaccaaaatttcttcatagctgcatccaaatctccagattcatactggcaacatgttggtagacatacaatagactgacaaagaggaggcaattgactatatcaacgtttgatgaccagcaaaagagagcaacttcttcttccacccttcaagctgcctcatcatgctagctttcaaattattataatcgtccttcttccttctcttaaaaacaaaagaattccctaagtgtttctcatctccctgatgtttagaaaaaaattatattttatccaaaatatatttacataggttgtcatcaataaatatatatatataccattcccctattgacagagaaataaaagaatattaatacatctaagaactttcatttatatatcacgtcttgtaattaattaataatgactttgttaatttaccttcaaccgatgtcgtcacactaaaggtatcccgatcaggcagcactcattaatatatggtgcatatgcataaacaaaataactcaagggcatgagattttgatttttatatattaatgta

SEQ ID NO: 227627 - DNA, 5253 bp, Cannabis indica
aattataattaaataattctaaaaaaggaatgtctactatttaattaattattttaagaaaatagttaattataattaattaaatctaaaaaaggaaagtctacctattagtaacctgctattacaggttaaaaaaaaaatgtaaccatatggttacaataaaaatgtaaccattgaatagtcacccatatatatatatatatatatatattaagattatcgagaaagttgtgaaaggttatcttatagaaaaatcacacttaattaaaataaaaaaagatgaatcttattcaccatatataatgtggccaggagaacaaaaacaaaaacttataaatatatttttaataaattaatgaaatttttttaaattaatctcagatttaatgtaaaaatatatattacctgaatttcagtttgcaaacagccatgaagagcaacaacagtgtatccaaattggcgaagaactcctcctaatttaacatagtgttgccatggatatctgtaacagtgtcttgagtgccttggctcccaacttgcatgtaaagcctgttcaaaatccaaatacatatataattaatacaaattataatatccaaatcaaaagtttctacttatcttttcttcattttattatctatatggccattccattttttcaattatataattttattgacataaagtgacatgtctagaaggtattaaatactactgatatccaataaaaatgttctaaccaaaaacatattaaagtcctatttgaaaaacacaactaagtattaaataagtattactctaattaaatatatgattaccattgtctcatcaatagatttggagtctaaaacagccttgaaacctttgtaaatgagatcttcttctgctgatttgtcatcatcatcatcagtttcttcaactaatacagcatcgttgaaatactcattcacacaaactgcaaataataattaatgaataatattaattataattttaattttaattattaatgtagtaatagtagtacgtagcagtagtagtaccttcaatagatttggctatgcattcaagtttgaaaacagtgttattgtgaagatcttcaccagaccaattaggaaaaacaagtagactcatgagtaaacaaataccacacccaattgcaattgtgtaaaatcgttcatgagcaattttcaacacattatcaactctgtaactcgacacagttatcagattaaatgtcaacatgaatatcacaactccataatcaaagttcttctttatgtatggaaaaaatctcaagtatgttgataatcctcctgccaaaataataaaaaaaaatatatacattatatttttcttaaaataaataatattataatttgtacgtgatttatgtgtgcacatattaattaacttaccaataaggaaaaccgcggttccaataaaaacagctcgaaaaactcgacctgtttcggtggctatgtattccacaaagaatgctaatgatccagcaatcaaagttcccaatcctctgtttaatcctttacacaaagttgctcctaaacgacaacataaaaatatatgttattatttttttaatatatagtactttttattacgaaaaatatgaagaaaaaaaaatagaaaattataccggcagtgaattctagaacaacaacaacggtcatgacggcccaaatggcgttcgagccgatcccgtcgaacaaaggttccatcaaatatagcaacgaaacaagtgttagtgacaaaccaactttcaatgcatgaattactcttctcggatcttctttcccaactttccacatagtcttccacactatcttcggaaaccttttcagtttctcaacaaaatacctcattttcgcgccttttacagcactttttccaccacaatcttcactattcttagccatattttccacttccatgcctgcatgaacttttggtaccattttctaataataattatagagttattatacctaggtaacaagtattttgggtaggagtaataataatcaatgaaattgattgtataaaaacaatggtatatctatgttgaggcaaaaagaaatgggttatgggagttagcttaatttaatttataaattaagaaataaataataaaaaccccaagttttgtgtaatgggttggagaggcttttttataatgttgagaatcatcaacaggtgtcttgctgtactcacatgcctatgtataaaaaagtatatagagatcatgatagtaattgttgtgggttgctttcacaacagagctagaagtcaaaacaaagtagaaaacaacagcttgattgatgatatatatatttatataataacaaatatatttgtttataaattagttgagggctcttaataatttactagaaaacaattaacatcatcttttttattcttataatgtaactactatttaaggaaaaaaaagatgggtgatgataatattaaaatttaagttttttttgtttgtttatatatacttattattgatgtgtgttttgtttctttgtaaagtaaatatcactttcattttcaattcatatatatgtctaaaatattttgagaattagtaaagggcatgcacttggccaagatatcatatatagtttgagttttacatattttagtttaataaaaaatttaacctcatactctaatattttattattgtgatctcaagtttgatgtaaaaaatagaatcacacatttattgcatatatatagctacattcatacttccctatatattaatagagcattgttattttgatatatcgtgttgcaattgactagcgatattctttaaaagttattaaattaaattatgtgggacccgataattagttaaaccaatagcggtattgacacataagagagtgctaggcaccatgggtgccctttaacatttctcattgatacaatacttttaagaaatactaaagaatttttataatatctcgtattgctactattacaatttaatacaaactctcagatttataaaaagaattagaaatttttaatatgatttacatttattgcacgaaaatcaacctcaaatctaaaagtttatttattaaacaacatttattattgtcaaggggagctctttaattttgataggttaaatttcactatatccaacatccattccatgcaatattgatgaatttaagaatagttaaagcattttgcattacaaaagtaaaaaattatttgcatgtttaaactctctttcaccaaatcatgcatgcacaaattcacctaattattatgtcaaaattttagtatttttctttcattgcgcagtagccttaattatatactcctactaaaatatatatagggtcttctcttgtttttttttggcttctctcgaccggagcattgttagtgtctcctttggcctaggtggtgctccggttgagagacccctcctcctcttaagtcgtttgggtttgattcatttatggcatcttctctttcttgtcaatgatattcttcgttgagtcctattaatatattcgtaatttcgtttaatcatttatgcctttagtttctacgtactcgaagcagccactacaagggttgggatggcaaggttatttttccatttagtctgtcatagggatggtattatttatttactctattactgtaatcgacttgattattagttgtttaattagttatctttttgtgagatttgtgctattttttaaattctgtcatttaccaatcaaaatgattttgtcaacaatacaatttttacaaaactaaagtttttttttgtgaattcatatgatcaattaatgtcaatttatacaaagaaaaaattgacatatatggcgtctcgtgaattttgaaaatatagtagagtagcttatatataaagaaacaaaagaaaacaacatggttggacacatgattttgtagttggatcaacaacgcagttgaccaaattaaaaacttgtaatattaatatatatatgaaccatttttatttataagtcacacacaatcacggagtactattcatttatatataagtaaatttagtatcaaataaccttttatttgatgatataaataagagagagatttgttgttaaactaactaaccatttagaacacctctttttgttacctttttttgtaagttgtataactttagccgcaaatgcattttggtgttgctatcaaaaacagctgggggtggggccacttggatgtgtcccgtgcattctcaacttctctacacttccgcctctacttttgccacgtgtcacctccattattgtgtctttttgactgtccaacccaaacaaccaaatgccacgtgtcacctttcattcattgttctcttttcttcactacctacaaggctacaacacattacttacaattattgagccttttcacggtttttctttgtttgatatctctaatcccttcttattaagcctctttcttattaatctcaaagttcttctcaaatacgagaaaatgattcaatttcaaagttaataatcgtaattctcgaacaaataatcaaaaaaaaattgtgatttttttgactaatacatttagccataaatatttttaatcacaataatactttaaggtctatccagatccgatccaatcatatattagatgttagattttaccatccgatccaattaatttcagtcatccaatcgatccaacattcattggatgttggattagatcggttctatccattggatgtatttcatatatatttattggtttaatttgggtttatccaatattttagacctagtattttttaggtcggatcgaattcatccaatattttaggtccagtgtgtattggattggactggatccatccaatctcaaaaaaaaaaaagagtaaaattttaatattatgtttcatatatacatataaatttggcgtattacaatataaaatctaattactcatccaaactaaatgaaaatatgaattagttcgaatgaatgttggatgtataagatttttagacacctcatccaccatcccatctgatccgatccaattggatatttaaaaataatatcaaattcgatccgatcacaattggatgtccaatgtttagcggtcggttataattggatcagtcagttctcattggatttgatcgatttatgcatatatacccctaacttttagtcacaacaaaa

SEQ ID NO: 227628 - DNA, 2339 bp, Cannabis indica
agagagagagagtggtagaagagggtgttttgaattttaactgtaactttgagtttaagggtttttagagaatatttagtatatgtgtttaaaggtggtatattaagtgattttgttaagttttaaaatatgctttagcaaattttcttaaagagattagatagatgttacaataatacttttatattatatatatgaatatatgtatttataaaagaaacgtacaagaagaaaattacaccacagataatatattatatgtaagaatatgaaaaagagataaaaagaactctcactcaccaccttaagtgtagattagtgaggatcatcatgacttgaataaggcataaactagcataagttattttattacgtatttcgtatattgcttggttcacatatttatttcatgatcatatgtttgatatataaattctattaaatccttatcatattgttatttataattatagagttgtctacacagtgaaaactaattatgactatggtataaactattttagtcccgtaaatttacactaacagaataatcaacgatgtagtttacttatacttgtataagtagaatatctttttcaaggtattaataaagtaatcttgtatcagatgtattggttatacatgagactgaaatgatattgacagtggaaaaaattatatcatatacttaccatattatcttttctaagtcaatgtcacttggctgatcttcgataagtgatctcaattttgagatggttaggttttagcctaattatgctatttgtgttctttgacttgttcgttacccgcttacccgtaggactagcccatacttatatcttaggagcatagttgtgtaattaagtggcagagctaattataaatatagaatctatatcttctatagactcttaaaagcgaaacgatagttactttagagtttgactaaatgagtttaaatagtggagtgctcattttagtaattatataagtttacttgattatcatttacaagtacccaagtgttttaagaataaaataaattgaagcactacaagaaaattactctatctcagaggttaagaatcctcgtaatagacctatcttagcagttatcaaccagagagacaggatcatgaccaattagggcagttagaaaacgccgagagagggtaagcaatctcgatagttttaccatgaaccaccgaaataggtgtggcatctcctcatgggtttgggcaatcttcacaccgggaaacaccgagataggtagcaatcttggcagttacaagatgaactgccaagataggtatcaatctcaacactttgaaactgccaagataggtcgactatgggcaaaaaataattataatattttctttgaaattttcccttcgtccatttattgtattgattatatgcatgcactactactataaaattttaaaagaaaaacaacagcaggaaaattttatatttcaaacagtatataataaataaataaacatacaatgcattgttcaattcagtacaaaagaaataggagaacaaataggctatgaaaaatatatgtaaagaagctcaaagacggtatgtaaagaaaaattaagttcatatatataaaaatacagtagtcaaatcaattacaactggttcggtcctcgcttggattttttcatataatttattttgagagttgtaatttaaactgatagctctattatttgttaatttctctacttacattattaattatatcaacaaaaatttaatagaaacatttacataattttcaactgagttatcatttacattattagaaatttctccatgatcatataagaacttatgaaaggccttaagggaaatttcattactgtgaatccattgtctgaaaaatacgttcgagatgcccaacctgcattataaatatataaaaagcaaatgtaactagaataagaagaagggaagaatcattatagataaatcacaactctctattttattataatctaacaatatctgactatcaacttcagacctgccattgattagacatttattttgatcctaaatattgtagtaaggaacaacaagtcaatactgcccaatattccaatcacacaatgtgccttagaaatataaagttcaaagaagagcatgtttagtattgttttctgttttttgttttaaaaaattgtttttagaaatgagaacaaaaaatagtttttgaaatttttaaaacacaagtcacgtttggttagtgatttttaaaaataatattgaccaaaactgaattggtttttaaaacagaaaacaacattttgttgttttca

SEQ ID NO: 227629 - DNA, 1278 bp, Cannabis indica
tcaccagccccaagcccaactgatgcggcccaattctccggccttctttgcatctttcttgctttggctttgggcttggtcttctaagctcatatcataccatttttcaattatattattattattattttgcttagatatttatctatctatgcatgtattattgttcaatatttgggttgatttgtttttcaatggagagtggaaaagaaatggggtgtaattagtttcaatttttgttaataatatgggattgttattgtaattagattattattcttttgttgtggatatgattcattatcatatcttgtgtaatattatttttaataaaaaatttaaatatacttcttgtgttattacaaattttttatttttgtgattttatttctatgtggggtttcatatgtgcttattcaatgtattacttattaattatatggacaaggaaaacatgcaagtggtcttattattaatttcttttattatgtatagaatatgatatgatgttcatcatatatttgatgattcattattatatagaacatcatattaagatggacgattcttattatataaaacatgatatgatgttcataagatcaaagatttctattatatatgcataaaacatcatatgattttcataagattgacaatttctttacacaaatcatactaattttgtaaatatcaaaacacatgttgtgattggaaaagcaaggtgccctagacacgttaatagtgccaaatatatgttggagtctccattttttttttaagaaaagcatcacatttcattaaaagaaaatcaacattatgggacaacttaaaaatcgaggacaagtatctgtccaaatacacttcccaacactactcgtaacagaagtagttaatgtgtgggcaacatcattcacagatcgcaaaataacattgtaagaactatcaccaacaactgctatcaaaaaaattacaaccaaaataatagattgaaaaacaatattagaatgaggattattcacccaactagtcaagttcaatagtcgaaatggaaaacccaagttgcaatgataaaagtagccccaacctgatagcaagtaactttgccacacccgcctaaaagtctctcaccacctgtaacgtccccgcttcaagcttccattaggtcctcacacccacggaatgaatgactgttatacacgagtacgccactctgactgcttcctggattgatgactgaccctacagaccaacacgagtgtttccaacgtgctttgt

SEQ ID NO: 227630 - DNA, 3534 bp, Cannabis indica
caaattgatcccaatttgtgtgtaattatctagacatcaaaagtgtggaatcactaataggtcgtaatagatctttccataaagcaacttgtggccccatttgaatcacaagttccattgataatgtaaacgcatcgagaagttattttatccttttttaaataaatccacaagacacgtaaattaaagtattaataatttaacagttcaaaaaaattaatttaaaatatataatatttatccattttcagcaccatagcaagtaacattattaagtttgtagtttgtcagaatcctatagaccaaactaaccctaaccctaacacatcttatctgatcctacatatcctaagtttgtcataacaataccaatcatcagcttcatccaggaggaacattaacatagtaaataaattttacaaaatacaatcataaatcaatacaatattcacctctttgcaaattggatagaatttcctccaacacctgtgaaacagtcaattaccacgccattaccacaacgaaaggcatgatgtctagctataggttctggagtcactgaaaaccatccttccacatccatttttataccatcatcatatttggagaacaataaatatctctgccaccaatatttaccaatatcatcagacaactccaccagctcctgaagtttaagttctacagaataaaattgtagcacattaggactgccttaacacataaataaaaaaaaatggaaaagctgaacttcaaatagaggatatagtatttgccagatcacctaatacactataaaaccagaaaaaatggggtaaaaaactaatgacttataatccttgctagctagtttgcatttgacctgtgtgaagagggattctcaactaaattgaaagaatgaagtacatgaaccaaatgcacttctctcctaactcaattattttttatttaaatcataccatatgtatgtgttgatcagtcaagcaaaactcttcaatcattttagcagcatgaaaataccaatatgtgttgatcagtcaagaaaggactttgaaagttcaaattaaagataacactacatcttccagcctacatagtccctgattcttctattactgtcattgtactcactactcagtagtataagtcaaacttaaattcaactttctagtaacatattccttaaaagaaaatgataataccacctgcttgaattattagttagatgcccaatctactgttagtttaagtgaatcagctgttaagttctgtactaggctaacagataagttccatactaggcaacagttaatcttgaagctcatttcctactatcttttatttgtaattatttcaagaaatgataattacatatgtaacatcagaatgaacgatgagaaagaaaataaataagaaacctttaatttcactagatttttttttctggtttcgtgttcttctcgatttctttttccgctttgccatagaagtgccaagctgggtacccacttgaataactggaactacatcacctgaatgtgtacaactaacagataatttgattcaatatatatagaaaatgctgaaaaagaactattaacaagaaaatctattatagtagtcagataagacaactcaaaacacaataacaagagcatacagcattctgcatgcagctgaagttccaagacttcatcaatttggtattttaaggagtttccccaagagatcgtaattgacgctaatgtgaaaagtaataaataataaaattcagcaaactgattaataaatttctccagaaataaggggggaagcaattatagagataccttataatatgctcctggttatctgagaaaaaccattccttacttccatcttttaaagttcgacgggtgtcatcaagttcatctgaatctttgatattgctaaaagtaatagatcccttcgtagcaggcacagaactgcaaactgtaactacaccgccttcaaagagctcatcatgtagtacaaaatcatccataatttgattagcagaatcaattttgttttgcaacatataaaaatctgccacatttatttcaggattagcatccatcccagttaactcagctactgattcatttgacttatcagtgatgtcacagattgccagatgtcccattccctttggtggatcccatgttgaagtgtgtgttttaatattatagaagtagtttctcaaatagtaagaatcccaatataccatccaatctccaaaatcaccatagcattcattgttgacagtttcatttgtagcagaatcaaggacctctggctgatcagtgacgacacctttgcaaataatttcacctgctgcttcatcgaaatcctgagatgaagatgacgtttgcaaaaggtcacactccgctaatctttcacctacttctttgtgactctggtcagaaatagcatctgccaagaagcttattgaggaaagtccagtctcagaactaattgaatttacttctgtgttgccttcgctcacaacagtgctaagtacagagtatatatctttgttatcagtacaagagatatcaaacaactcagcatgactttcttctctcacagtaccagaaaagagcccagacaattctgttggattttctacatcatgaagggttggttcacaaaaatttgtagctactgcaacaataaagtagctaactcagtttgtccaactattgacataaaaaataaggaattttttgaattaccatagaatatagtaggagatatgatcttacactcatccagattgtcttcacaagtgctgcctgtatgtttctgccgtgaaccctttcttttgccattagtcattccgctcttctgaaaagtgtagcaattaacgccagaaacattagaagcagctcaggggaaacaaagcccaaaagataaaattttcgatggtggcaccaaggaaaacagtatctcttttcttctccatcttgccctatgcaatctaaaaatgaaactcaaccgatactaaattaccccaattaaggttcaattcagacttagattagccattgatgaattttaatacttgcccaaaagtgcatactatacgacattcccaaacctacctccctgtttgtgttgaatgagagtggaagtcccagcgcattcatctgtcgagcaagttcctcatcttctcgcaaaagactatactctgaactactcaaaagggaacgcaacatcagtaaatcacaaataaggaattaaccaaagagaattaagcactagcctggagaagtagaaaaaacgtttgaatcatcaccatcctcggcaatattagcttcctcagctcctttctgtaaattaacagataaatatttcaaagaagacgacattaagaagaagaagaagaaaatctgcacgctaaataaactcacagtgcgtccctgcaaacataatccttccgcctccgctggcccatcatccctgccgaaaatggattgaattaagaaacaataaataataataaagaaaaaa

SEQ ID NO: 227631 - DNA, 3476 bp, Cannabis indica
ctacttcagtaggggctaagaacggtatgaaatttggatcttatccttcatacttcctaaaaggctttgcgttatagaagccataataggtctttttaaaatttcaattttctttttatcattgacacaattggtgcttaattgaggcgctataagaacgtaaacatctacagatccaatgttcaaatcgtggtcccccccaatccctccccccacccccactcctacctagtagcttacttttataattacaatactgccactgaagaataaaaaatgaaaattcaaaactgatttttcaataaatattactgatagttatcaatttgcatctgaaaatgctactttgcaggagcacaatgccttgtgccaaataaattacgtgaacaatttttgtgccaaatttagcacagtattccaatcatacatatagcagatgatcttaaaaaggaggaaagaaaactaatacctgatctttcaatatgtatgtttcaggattcctggtacttccggggacccatgcatcagttttctgcagaattaataaattatatacacatatgaataagccaaccaacaaagagaatgtataaccttttttcttaccttcaaatttgtattctctgaaccagtcacagctttctgccttggcatcatgtgaagacaatgggataagaccatgaatgattttgggaaaatactcaactcccctcttttagtttttcctaaaaaatttaaaattacttcaattagcgaagtgcagttataaggagtcattcaacccaaacagaccagtatttacagtctagtaagatacacaaaataaggctactacaaatgatgcaggcgaagtcaaaaaaaaaacaaggaaaggcatatgactttgaaaactgttgcaaatcaattagttttgggtgttttttctatggatcagtgaagatggcttctcttaccacctgacaacatacttcatatttagattaatctcccaaagaactgcatatgattcataagtttagaaacaataagcatgacttattatgagatttttcacatgatattgctctttcagactgattcctcatgtctcttaattatcgtacttttgcctacttaattatttaccagatgattcttgtttctacaatgaacaagccttcaattcaatccaaatcaaattatgacgatattatatttattcaagaaaaaaaatatcaaacagttagcaggcagcagtagagactcagacctggaaaaccagagacaccaacaatatcaccacgcttaacacttgaatggaacctagaaaattcagcttcatccatgtctgacttgctgcattaaaagattaaaaggaaaaataaacaaaggaaaacaatgataccatagtaattgtatttttatctcacaatatcaacaatttcaagttcacaaaattaacataagcattgaatatttaaaatttttaaaattaagtaaaacttgtccgcaaacagatttaaatttaagagctacttgctgcaatttatagtaaataataaatattaatatccacagcacaaaactctgaggagtaaaatgcataataacaatcaagtaattataggaacttaaaattccaaagatctagtatcaacaaaggaaaaaaaaatgacaggaaaatcatgttatttgagcatacagatttaaatatgaaaaaagaaaataaaacaatacctggcatcagccatcacttggaccttagcacccccaccatgtaaatcataaaagaaaagttttgaggaagacgaccgtttgctcataattcggccttgcataattgaaaggaaaaataaaatcaacctaacagaaacaagaaagaacacccaacactttccttgttaaaaaacccttaagactttcataccagctaaagataccgtaacatcctcttgatgctccccattgcttaagcttccataattctctatgtattcaacaatagacatagatacgaagaatttatgaggataaggattatgaccttctgtcttttgagatgcaagatacttgatcctgttttcaaagtattgctgaagcagaaaacgtgtcaaatgagaaagaagttttaatatttcattatgcacctcttataagaagatgactgtatttataccgttggatccatgtcttcatcatcagctgttgcagatttcttagcctgtgtgctaggtgctgcagcagcctaacagatgtaaacaaattttacaatgtcaaaagatttaaccataaaagtgcaagatatagagctatcataaaaataaaacatttcagttgtggtgaaaattttcagaaaacaagaaactgatgtacgaatcatgcacttcaattcaatcccaccatgtaatgttacatcttcagattcataaatcaaagggaagacatacttaaagcttctaactcccttaagaaattgaataatcacagttcatacattatccacagttctccaaattcaccatacccgatatcatttctatgtcgactagctatatgataaccaaaaagagagtacctgcttagctttttcttcttcctttcgccgtctttcctcttccttctgcttaatctttaactccttcttgcgtgcactgtaagcaaaaccaaacaaaataaatgtaagaacaccacataaagaaaagaagaaaatgtgtatatatattaaggaacaaaaaccctgactagtataattagcatttgtggttctgaaaatgcgaaaatgtactagtaagtagcttagacataatccactataatagaaaatacattacatattatagcttaattttcattttctttcaaatttcccctccaatgtttgacacccacacagagagaaacatcccccaataaaaataaaattataataattaaaaaaaaaaaaagagagagagaacgaaaatgtgcttggggaaacttacttcttgctcatagtatcagatgaagcatccattgataaatcggagacagatttggcagcttgatcaactgggtccgccattgaaagtgagattgagagtggagcgacggcgttgattctgtgttaagggtttgggttgatagaactgaaactggaactatgggagcaagctttagcgtaaaatgtacccactcccagctagggtttcccgtacacagacttgtctctctcctcttttattttattttattttatttaacaaagaagatatttgcggtgaggtcctttaattttttttttaagcctaattaggatttttactccctgaactttgacatgaaccaaatcatgtcccctgaatttttaaggtcgttaattatgcctctgaattattgagtattgttgaatttaaagactttgtctaatttcattcaatttcactatttaagtgattatttatgtactaaaccatactccccacactttgatatctaccaaatcatgcccttcgaacttt

SEQ ID NO: 227632 - DNA, 2988 bp, Cannabis indica
ttttcacttgggaatttatttaacactaacagtaagtatttataggagttctcgaattacaagttaggtattattatcgccaaaaattaaatttaaatatttatctgcaatcagaagttaaacttaaatatttatgccgcaaattactgatttattaaactctatcaataaagagttcattgtcaaactaaataaatacacagcaaaaggaaacctagagtttgcaaaaactttcattcgaaacaaaacatccctaagattttgttgagagaaattttactctctcggtagaataaccctaaaacatttccattgaaaaccataactaactagtacaaccttacagtcgtagagaagcaagttggaaattaatgcagtaaacttacaaggttaaattataaaaaggtgcacgactacaaagacaatagtttaacgaaaaacctgcaatttccaactcctttttccaaatgagaaaaatctaggcaacaaaactgcacaatttggtcctgagttcatagttggatatacagagaaaaacttatgatggttctttgagcagattatatggagatagggtcagacacataataaaggttcaacctgaacctatttttatcacattacgtttatacttgatcacataatatagtctaaaaacaaagagacccttgtgtcaactccttttgccaactgacctctcttcttttattaatgtcttcagccagcaatcttgtcgatcatcttttatattcgtttctgtctgaatatgtgcaacaagaataaaataaagaaataaaatagaattacctattccaacataaaagtttacgtctcctgcttttgttcaccctctgatatctctgtttcttgcaagttcatctgacctgtaacagcataacccataaaacaaaattacatccacgctattgcaagcttctatttaaaaacagactctgtagatgacaaactgggaaactaaataacaaatctttcatcaactagatcgaaccaaaattcaaatttctcataaattaatcaacaacttatgaaataaatatcccaatatctaatgtttatatttatgtctatgtgcttgtacttcgctaataatgcaagctgaagattttggttttctaaaatgatggttatgtaagtctatgagaaactactaaaattattcttatgttgtgatcttcatcaggtattcttaaatttactctgaccaatcaatcagttatgaacatgaaaattatctcattctaatctcatttgaaatgaagaggggaactcagaattctgtgaatttgatccttattttaaattaaaccaaacatcttcataaaattgttaataatactagtcccgggtttaaaatcaatttcatggctgccaatgttgggaatttattagcctgctatgatctctttgaagatcatggttcatcttaagtagaagtaggtacaatacaatattaatgatgctcagctgtacctaacaaggttatcagagaaggagattttttcgacccatttgatctcatgtctgtacctgcaattcacaccagaattatgagttcaatgtaataataggcgagatcctgtcagattggaaccatttatggtgattttacttctctaatgatgcaggcttaaggttttgatctcatgtctgtactgatacgctaatatagaaagcaatgcaaccaacggacttgttaattttcaattaaaagaacgtacctgaattttcaagggatttcaggacatctgattttttgaaagtatatccaatgaaattggtatctttggatgtcaacatctgcaacatcatacaagaccacaaattaaccagaagttatccttatatgccaacatctacaaaatcgagaaagaactttatgctcatttttggttccaattcaaaccatccaagcgttaacctcgggatagcgtaatataaacagaataaacatattcccaggcaagattctggcacagaaaccccataactaaagagaccacaataaaattacctttcgccatggtcccactgttggaattgaggatggctgaccctctacctacaaaatccatagagacaaaacaacttcaacactgtggttgtgatacttgagagagattagtttgagtgaaacaaaaattgagtttgggttggatgaaaaacaaggaagcacttgctgctttttgcatagcccaatcacccgaaaaatgtatgaaaaatgtttgagttactcacttcaggaaacttctcgaaattctgcgtgtccaagtcaccaaccactgtaggtttaaatgcagcttccatttcgtatagcttgtcccactgaatgcatctgaaccatggatgggcctgggaaaacatcaaccaaactataccaattagaaaatgtgaaaaataacctaggactggatgatatgaaaatctcataattgttctttccgaataacagatctgtttcaccaaatgcagttacctttagttcttccactcctcggctgcccagccttgtttcaacattgcataataagtgacatatcaaatctttagcctcattggatatttttggttcatcagggaatttcaggcatgttctccaattgatgatctaaagaagaaaaatagattaaaaaaaaaaaaagatattgaaggatgattgtgatatagctaaaatcatatgactatataataccttgcggcatgtgatccttggatcatcggagcaaaaggggggatagccaataagcatttcgtacataattgccccaagtgaccaccaatcacattcgattccataccccttctttagcagcacttcaggagccatatagtcgagagtgccaacagtcgaataagcctgcagtgtatcacaatagtccaaacatgttttttttttgcattacaacaaaatatttttatttatcaaactatcaaaattataaaaattataaaaagtaaaacaaaaaatat

SEQ ID NO: 227633 - DNA, 7644 bp, Cannabis indica
tttttttaagttcatgatcaggacatccctgaatctagtaatggtttacactaaatatataaccattccatcattctaaagctttcctatcactaggttgtttccctagaatgacttaggcagctgctagtaactaatcatagatcttttattttcatcaatatgcaatctatattcctgaggaggtaagtttgaatactattcaaagttcaacttaatgatctttgaactgcataaccaaatatttctccacccctattagttcacaagtctttaaccacttaccttaatggtttttcaccattactaaaaattcatgaaatttctcaaacattttaaatttctttgcataaggtaaatatctagagtgatcgttttaagaatttaacgataactcacatccactcttgaatgtacatccatatgttagaatacagatgatcctaccttcaaatgaatatttgcttatttctctttgaagacactaatcttgtcaaaaccactatgaacaagatgcaaatgtcatagatctattattgtggttattgtcttttgatgattcttaggtttagttacaataaagagctcttagaatagttcaagtggattttgctcacagaatataaaactcataatccatacattaacatatagttcagattccattgatataaaatggatattaacaacttgtgaaatttatatcgtagtgttcaatgtattctaaaaattgaaattaaattttctatttaaaatctaaaatttaaagtcaaggacataaatctataccaaatattcaatgagaaatcattctagcttggacctccatttaaaatactaattcaactctaggtttaagttgcctttagtaagcatatgtaactagaagatttttttaagatcgatgatttatatcattacgagatagaatatctagaatatggccatctacacgacttatttttatagatgaaaatagacatcatataagcagatgagtcacaaaccttcttgtccaatgatatactatcttaagcaatttcttaatgaaaaagctaagaggaaaaactaaaggataatttcgattaaaataagaatccaaaaatgattcagtaggcgagagtcaaggttatttcataaacctcttcattatttcagcattgtaaacactagtctaagttgtcattgttgggatgagtcaactagattttgtatttacaaaatacttgtctcacgagatctaacactattatgttatctaacggatgaaaatctattgggattgtcccattaaaaacatcaaaccaagttagaccaacaatgaagttcaaaattgatactacagaattaataacagaaaacaatacaagttcaaaataaattcatacacaattcaaaaatttgtaaacatttagcaagtaatgaagacatgagcaaatacaaaacaaacatatcttaaatatttccaaagttatcaactaaataatatacagtgtttcagtagatgagagtcgaagatatcattagttgaatagagtagtcagcttatctaaaatggacatcattttagcaactttttattcgatcaaaataagaatccaacattgtctcggtaggtaagagtcaatgttgcttccactattgtttcatatttgtaaatttaattctaagtagtcatggagggatgagtctactagaaaaaaaaagaatagaaaatatttatctttcgagatcttatggtgttagtgttcaatggatcaccatctattagggggacaaagtctagcgtctagagatcccattgaaaataaaaaatcatgtaagaccaacaataaagatcgaatatcttaaactaaagctcattatttaaaaaggcattgtattttcattttgatatctattttaatctatttatttcaaaattaattaatttatttaattaaattactaatttagataaatttaaatacaaattttaatttaatatttataaaattatattcatagaaaattgagtggcaataaacttaaaaaattggggaataagaaaggaaacatcagacttgttagtaagcatatagtcccaagtaaactgaaaaaatcatccataatggtaaaaaaaatatttatatccctcaatactttcaatatgaaaagagccccaagtatcaatattgattaaattgaaagtggcagcaaccatattatgttgagaattaaaaagaagacatttttgtttagcaaagtaacaaatagaacaatgtttactataagactttgtagaaaattgtaatgtcttatttattgaattagaaatgaacattgaaggatgtccatggcaaaagtgccaaggattatcggtagtacaattattatttgtagaaactaatgcatcagaagtaaacaaaatggatttcttgctcaaagaagaagagcttcccaactttcttagccatcccaatcattaaattctgagagggtgtctaaataacacaacaagaataaaaaaaatcagcaagttaggattattcttcaaaaaatcagtcactgaaaataaattgaatttaaattcagggaagaaaaggccatttttcaggctaatatctttgttaagatgaacaatactagagacaatgactttaatttgctgaccattaagcaaagtaactaaagtagcagcaatattataatcaagagcagtaaaacatctaatattattgcatatatggtgtatagcaccactatcaacaatctaaaaagttgagaaaaaaatagagttaccaaacacattagaggcactcgaaagaacatctctagaagttgatggttgctggagttgctggctcagaagaagaatgagttgttgactgagttgcagttgtgaggttgtgtcctatccagtaataagagtggtcgaagcttgattacacttggctaaatcgggttgtttgcgcttgtcaccatatccaagagggaaatcgtggagaaagtaatatttctcaaccaaatgacttagtttgaggcagtgagagcaagtaggatgaggtttctattagtggtggacggaggacggttcgatgaggcagcagcatagccatagcatttgcaagaacaagagaacgttgatgctcttgctgcaccgccatggagaaaccttggagagtggtggaagggggtcaaacattaagatttgatcacgagtaccaacatagggttcattaaggccaataagaaattgcaagatctgatcacgagcatagtgatcctggatctgttgcatagcaccacaagtacagccataagaacacggcgtgaatggttgaaactcattgagttcatcccaaagggactgcagctgagtaaaataagtggtgatagaattagcaccttgtttgatgcgagttagagaagtcttgagatgaaagatctgagggccattactctgattgaatcgatcgtgaagatatttccatatagcaagagtcgagtctttgaacataatgcttgctgcaatttctcttgaaattgattgcaatatccatgccataaccatacaattacattgatcccaagcagatctatacggatgattaatagggggacgagaaagagaaactttaatgaagggagttttattcttggcagccagattgattgtggcagcatgcttccatgactgaaaattatcttggggcagtcaattggaagggaacaatgaggaagtttgggttgtctctagttccaagatgatatgaattgcgttcatcaatagaaggttgatcaagattcacaccaggaggatcaaacataccaaagccaggtggaaagatgtcgttagaaccacatgatgaggagctgaaaaactagaaaaaatagaggacactagtgcgaagctcataaaaaaatagaggaaaacgaaggtaaggagaacgatccattaggattcaatgagggcagtggaatgaatagcgaagatgacacatcgatggtcaagatttcaacaggaagagaaccaatcgtagatgtaggagagatcatcgaagcttttgaagaaggaccttcagaggtcggcaaaggtgctggagaagatgcctgagccacaattgattcaacatggacctagttcgaagcttcaatggaggaaaagggtggtcgacagcattggcagtgacggcaggcgagagacaaagggtacctcgtgtttgaaccatggtgattagggttttgaggtaaagttgttagaatgagagaagaatatcatttgataccatattaggaaaaaagatcaagaaagtggtgaaattctcatataattgtaaaaggaaataaatggtagtatttatacaagagttgtacaacccaattatagagagactagcccaaaggaaaaagctcaataacataaaactaatcaattctaatagtttctctatacagaaaaaatatatagtcaatttttttcatgatcatgtattatagttatttattatattgtaaattttcaaaattttttgagtaacttacagtacctaaataagttttacatatttgttgcaagcacgattatattttcttatacacatgcatagtaagtaattgtttaaatttaattttcagctctgtaaactattctgaattttttaaaaatttacaagtaatcctaaatatttacaacatactcgattattataagaaattagactaaaatgttttttcggttaccgaaacagataaaaaatctaccagaacgaacatttaggggcctactacataaatttcattgaggttttcatttctgaaaaaaaaaaatctaaaacttcaaccaaacactttttaatttttgaaactaccaacactggttggtttttgcattttctaaaacaattttaaaaatatttcaataattttttttttctgattcaaccgatgaaaccttgtttttatttgagtaatttgtggcataaatacctaaatttaactcctaactgcaaaataaatacctaagtttaatttttggaacttactgttgcaacctcttagtcaacctccatcggaccaaaacacatgtcggaagttattttttttttatttttttccactgcggtgtttgttatgcttacaacatcattcctgtaaaattttgaaaaatttcgaatagttttcagtgctgaaatacgtttgaagttttttgaacacgcgtggtaaattggaatatcaagaactctgttttcggtatcgtaaattattcggaatttttcaaaaatttacaaggatgatatcataactataatgaataacgctaagaaaaaaaataatttacggcatgtgatatcagacgtggaggttgactgagagggttgtaataggaggttgtaattagcactcctcgcgacaataatacctaagttatacttttaaaactctgtaggtacctgattatttaatattaagtaaattttcacgtggatatctctgattggtccatgttatgaatttttatttttttaaaaaaattaattaaatataccaataaaaaatgacatgtggatgacgacttgacatttaactgtcagatacctacagaattctagaaatataacttacgtattattactgccgaaaattaaatttaggtatttatttacgactgagagttaaatttaagagtctttttaattttacacttctaaaacttagtttttttttttttttttctattttaacggaattctacatagaaactcctattgcaactagtgctgcaacctaaattgcaaacaaaaaatcgtatagatattcctattgcaactagcgttgcattcactatagaaatacaaaccgtaaatttagaaaaaaagttaaaaaaatagtatatgtggtaattcctcttaaatttatgtatttatgccacaaattattcattttatttacttatttatttttagtttttagttaaataaataaaaactaattaattattaattaatagttaccgaccaggccaaaaaaaataaaataaaaaacaatcgaaaagatcgttagaatagtgtaatagaaggacttaataacaattctgtgaaaagtgaaaaccatcaatgttttgtgaaaacgctacgtacggagatggttagtgtggaattataataatgacttggattcaatttttttattttataatccaattcaaaattaataaaggttagacctctcatctttattcaagaatcaagttagaagccatgcagtttcccagaaattaaccatatgttataatgttccatggtccaaccattcttgaccaaaatataatttttaaaaactttacactccaattggataaataatatatacatatgagtatattggtcaagtcaaaaatgaagatatatagcacgccaaactaagcagacccacccaccaaccatgcaaagttagaagacacgcacatttgcactagtagggaaagcagctgatgatatattatatatagtataaataagagagattaattccccatattcgaaatcatcacttctacttaatcactactctctaccattcagcataattcagtaccacaatatatagcccatattggatattatacttcttaagcttatttctaatttcatctaaacatttcaatattattattgccatgtctcctcaactcaacactactgaatttttggttgtaaaggaggaagttgagcttgtgaagccatccaaagccacaccttcggaagttctctctttgtccactcttgacaatgaggccaaccttgaatgcttctccaaagccatctacgtatacaaggcccaacatgatcacactaatggcgtcgatccaactgagatgatcaagcaagctgtctctgatgctctcgtctattactaccctctagccgggagactcaaacggctagaccacgatggaaggcttcaactcacttgcgacgctactggtgttccctatttggtcgccacggccaactgttgtctttcctcgcttaattacttggatgatattgatttcgagatgggcaagaactttgtcttcccttctcctacaagcgattgccctttcgtcctacaagtcactcgattctcttgtggaggttttaccattgggtttggaatatctcacatggtctccgatggttttggggctgctcagatcttcaaggccttggctgagctttccaaaggcaaagagctctcagtgaagccggtatgggaaagagagagacttgtgggaacacccaacaaagagtctctcaagcttagcatgtgtcatcctgctacgtcaccatacatgccctcttctgacattgtagatgagatcttttacttaaagagtgataccatgaagagactcaaagatgagataattagtggtggttctcccagtaatgttactacgtttgaaatacttgcagccttcgtttggaaagccagactgagagccttagagctcaatcatgacggaaaaacatgtttgtatttcgctacaggtttgagaaagctcatagaccctcctttgcctgaagggtattacgggaatgcatttttgacctctgcagtggaactcactggcagagaactagaagataaatctttatctgaaattgtaaatatgataaa

SEQ ID NO: 227634 - DNA, 4350 bp, Cannabis indica
  modified_base (30)..(30): a, c, t, g, unknown or other
gtgcccaaaaaatgattgagtgtgaactcnggtgcaagcatcaggggaaccagtaacagaaaaatgcagagaaggaataattagacactagtgacccttaacttaatttttacaaagagaaaagaaaaaagaaaagaaacggaaaaccacacaaggctcccaaccctgaaaaaaaaaaaaaacaatataacaaagattagtaatttaaagagattgatggctcatgggttatgtttttgtttttctacttaccaattttgtaaagtaagtaaagtctataaagtcttagctaagctaagctatacaaaaatgaatacaatagattacaacactcactccaaatattttctatcattcttgaaagaaaactttctcagcaatcaaacagagcatgccttgtttgtttgttctctctcttctttcataatttcttagctgtttgttttattgttatttaacaccgttgctttaggggaccgttgctagattttcaaggccaatatactacaagacaaacaagtttctctgttatgcagtattataattatactctatttaaaatgactaaattgccctcgttttctattactgttttgtttcgaaatatgggggcattggaagtcaacgtatttttcaaaatatgatatttttgtgatttcatgaaaacgatggaagacaagcaaagtcttagtctaactagactacatgtttcttttgtttcacatactttaatttaagtaataaatactaaaaataatgctatgttttcctaaaattctaatattctaatatattcccttttttggtgaaagtgtcataaaaaaatattcaaatttcaaatatgagagtcgaaggttatttttcgtactggtattgatattattttaggtacgtaaattgattataatgagtattttgcaaattttaaaaaatttaaatagttaatgatgtcgaaattagaattcaaaacacgttcaaatatttatgcatgcaacataatttttgagctgtaattaatattagccttgtaattattgttatttatttctaaatttacaagagatttgctatgattataataaacgtcataaaaaaaaatctaaattaatttcattactgacgacagtatcttaacacaaaaattccctaaattttacatacatattgttgattttgatatacattgaaaaggaaagctttgaaaaatctaaggaagaatattaataaatgacagatatttatatatgtatatttttgaagcagatattataaatagtttttaaaaaaatatatattatggccaaacaaaaggaatagataaattactttttaagagaaaaatatgaatagataaaaaaagtgaaatttctataaaaataaaataaaaagtgaactcccacctcataatgtggggtagggatgagattccattattcttaattattttaaaaatcatctaaaaataaaaataataatattaatttactgtaatgcttctactacacaccaactttaccctttttttgtgattatttatatattttcgaatttcttctcttttagggtgtagtgctgttgtggtttataaaaacattaaattaagaaacgcaccaaaatcaagccaaaatttagtattccaacacgtaataaatccgaccattaaaattatcaaagctgtcacacaaaaacaaaaacaagttaggctatccaactaattaacccactttattacaagaatattttccaaagattttataacctttttctctcatattcatcaatggttgatatatttttcttccccacatatcttttctcttcttttatagcaaaaaacaatatagccttacccactaatctgtttctaccaagtttggtcaaaggtccatttcccatctctaaaaactaaaaatgccaactcttatttcttaattaccttttcttaaagtaaagattattattattaagtattagtggtctttaacactttctataaatactacctttcaattagttagcaatatatattttttaaaaattattttttaaaattatataaaatttgatatttaattacactaatgataatataatactgaaaaaaatattaaagagtctcttctggcaattctcttttttaagatgatagatggatggagcccaaatgttacacacaaaatctagagttaaaggcaatcattttgatttaccctccaaaatccaaagttatatcaaccatgcaaccatgttgatgtttctttcttttaatttatttatgccttacttcttgggtctataaaaagagaagaaaatagtaatggtaagtagaccaactactatacattaaagtggttttgaaatctttttgacttggccacatgatttgatttgtttgggggtcttgagagagagagaggagagagagtaaaatcactaatgaaaatgatataaacatacgcatacatataggcacgctcttgagtcttaattgagaagcttatttatttattttgtattactattataaaataatgctttattgaaagtcataaaattacctattgtaattttattttgagaaattttaaataatttgagggtaagaaattgtttgaactttgatatggatttggtaaactattagaacattttataaatttgccaaaaaaaagtctaaactataacaaaatccattataaagtattcatattagtgttagtaatatacgtcgggcttctttacatgacacgaaactgacatgaactcaaaaagtacgagcacgactagacatgaaaaaatacaagtttgagcatgacatggtacgatgctacaaattgacacgacactcacagcacgaaaaatatgtccttcaacacgacacgtaagcacgaatatacaagcccgaaaagtacaacacacgacaaacctaaaaagcacaacatgacatattaaaaaattttataatatagtaataataattataagatataaatttattaattataaataagttaaaataataataaaacttaaatataatattaaatattataattttataattaaaattatcaaaacatgacaaatattatataataatttatttatagggcgtgatataaaaatttgagtttttataagtaaatattcaaattttaatgatattaatattttttttatatgatatcatgtaaaatattgtttgaaagttatataaatataattaaaattttaaatatacatataatttagtaattgttaaaaaaaatatatgaaaaaagtaaagcacaaatttaagcccagatataaaaataagttggcctgtttaagaaatatggttcaacacaagcaaaacacgacacgaaaatatcaggcctacaagttgtgctaggcatatcctttgaaaatattggcacaacatagcacgacttatttttaaaaagcacgaataaatatagacctagccagcactatacgcacaaacttagagcattaattcatattacaaattatgtagcccaatatatattcctaatgaactatccatgtatgactatcccactttgacaacattccataactacaacatatatatatagaaatttgactttttatgcttacaaatatttaatatttttcccctaaacacataatatgtaatatttgtgggatatgacacattttataatatccctaaaataccctcatttacattatcccatattccctctcttcttctctctatcttcatacccatcggaccccaatcggggtccccatcggacccgtcggacccaaaaaaaaaatttacccagcacatgcatcgaaccccaatcggggtccccatcgaacccgttggacccaaaagtttttccagcccatgcatcggaccccaatcggggtcccatcggacctgtcagacccaaaaataagatttttgcagcacatgcatcgaacctcatcggggtccccatcagaccccatcgggccatcatcttccccaaattgcgattttcccaaatcacagatctgaacataaatcgaaccctaaatctaacaaaactcacggtgcacacataaacacatacattatacattataaccctaaaataatacctatcaatactccaaatcatatatcacacaaaaaaacaatgacaaaaaaatgagggggcataaatcttaccttggacattttgattttgatgggggcggcagtgtaggcgctaggcggtgagaagtgctcggttttgatttgggagggggtcggcgttgtaggcggtggtgaggggctggcgttgtgggcggtggtgaggggggttggggttcagttgagagagagagagagag

SEQ ID NO: 227635 - DNA, 1929 bp, Cannabis indica
ggagacttattagtattgcactaccaatctccactatttctcaattatatcaatggatcaaaatcaggtatgtcttttatattattcaattacatgtagtgttctaaattatgtcttctatattattcaattaatcacagtgttctaaattatatgcaatttagtattttggtgttttgtaaacttctaacacgtcatactgccactttatacctaaagttatatgacaactggtccctttgaaaaacaaagtcaaaataattcgaatttttctaatctcttgacagtccatctcaaagcatactaagcatgaaacactctatcaacaatcactttcaagtgaagagttgaaaaaacttaatcatgctacgaaaacatgaagcataagaatatcattgacaaggaatcagtacctcattggcaaagaacaacgcgttaacatcaagaccaacgtggtagaaaagccaagcagcttgtctaagcttccacattgtctccctctttacattcataaccggaaccgtaacatattcatcttcatcagcacctttggccttactttcctttctcactctgttctccaataaccacgcataacatatggccgccaccattgaactcgtacctgcatttttcatcaaactaagaaacttaacaaaaacttccatcaatagaataaaaaacgaaaattcattcacttcattcatatgaaagttactcaactgttcgaagtcccagaaagtatgattttggccttagcattatcatcaccttccaagacttttccaagcttaatcctctgttccttgaggaacccattgagcccaaactcccaagcttccccggattcagagggcaacccatttgagccacgcttaaaagaaatcttgtcgatggagcacgtcgacgaagacacagacctcctttgagccgactcaataaggtttttgggcggagagagcaaatgggtctcggtcaaaagtgccggaccagtctgaaagttccgggccggaggaatcgggataccctgtgggcgtggcgaggaggggtctgtctggaatcgggatttccggggcagagatgggcgagaagtgagaatggggactcgaggttgaggttcgaagctttgttgcggtgtgggggttggattgagaatgtcggagaaccagttataggaagaggaaagacggggtgcttcagtaggggagtccggtgccggggagacgccggctgcaaaggtttctgatttgttgcgactgtgtgtggctgacttggacaagatttctccgctgaaactctctactgctctgtatctgttgttctcaccaaaaccaatttatacatttttcttcaaaatggtccaaatctatatagcaatatttgcagtctttcattccattgagaatttaatgagattattgtttttccaggagaatacttcaactttatagttttgggtagaaaatgtattgttacacttaatataatgattattcccattctttagcattatttttatttataaaacataacaaatgaatattagtctattacaatatgttaattaagtaaaagtgatggatgagcaacacatgagatttaatttgctgattaaagaaaaaaaagttgaattgcatgatgaaaaaaagtggtagtaaattgcataccttgtagcaaacttagaaaataaatgaataatagtagatgttaacgttacataccttctagcagacctagagagtggatctcttctatcaagagacgaggccgaggccggcgatccttgagccgccgcagctgcgaacctcggggagccaacaaggcgagagggagaggtactgcgagaaggagaagaagccaccaagcgcctagcctcgtcaagccaatcctgtgtcaacttactactactaatactactccttgagctaa

SEQ ID NO: 227636 - DNA, 2883 bp, Cannabis indica
ttatagttatacaaattactcagtcttggtaattaccatccaacattatattatctgtctacaatctgacaacaatttttttggttgcaggcgatatctaaacccatggctagtcacaaattcacttcttcggagtcaaatgacaatgaagatgttgcagggtcttattttattagtgccgtctgttggaaaagcgatagccccacattgttaacagcaactagtggaggagcaattaaagttttagtgctttctccctgaataaacagaactaaactcttataaagttatctcatgacattgccgattgccttttggtgattgataaataaataagaaagagaagaagagcaacggggttttgtgtttgtttaatcgtgacgaacagacaactataattttcttttctaaaagtccaaaacatcctcagtatgagattgcttagtcgatagtcataacgggattgttaaaagttttttacactaagctaaaccaaacaaaccagggaccaacaaccaacgcctttgctcgtgattccaacatatacccgccggtattcacctccaaacaagtctttacatttggatttatttatttagatatgaatttttcttttatttttgaatttggatccagacaaaatggagagacattattaaatgtcatatccatctaatccagtcaaagatcttctcaaatttgtcttgaatgtcagtctgaataaggatatagatattagatattcgctattatagattgattgattctgggaatcccatctgtctcatattaacaaaaccaaattacacgcaaaaatccaaatttccctttccaacctgttccttaccttttccgaaaactttggcgcaaaaatagccatgaaggtagaaaatttggatcaagcgaacaccaatctctcggcatcggccggcaaggctccggtgactggagatgatattaatcataaagaagaggaggaggtgtttgtgccgcctctgaatttcaccatggtcgattgtggtgtctttaggtctggatttcctggctctgccaatttcagctttttgcaatccttagaaattcgatcaattgtgtaagtggatcgcttccgtttaaaatttgttcgataatttcttaattttgattttaccgatctccctctatttagataattgtgcccagaaccctatccagaagcgaacaatgagtttgttaaggcaaatgggattaaactttgccagttcgcgatcgaaggctaccaggttctgctactgcttttacttgattctcaaaactgttttggaaataattaagccaaatttatttgtatatacatatgtgatcgattatatgatagaattatttcatcgattaaagagccaaattcctttcaagttctaagaaacctaggttttttatatgccataaactgttggaaaaatgaaatatataatcatatacgtttaactgatttgatttgacatgatgcatgaatatgcaaggaaatcaatttgttcaacgattataaatgtgtcattgaatgtaaccctcgtttacctggaaaacttttgactttatgtgcatatagaaatagttttttggtttagacattgattctgggtaatttgctgcccacaggagccttttgtaaacattccagaggaaacaattgtggaagccttgaaagtagttctttcttggtataactaacacttaataatgtttaatccatatcatagctttcgcattcttatttacttaggtaaaatctctctcacctttattaagtttcacttattctttcttcaaattgtatgctaatcttattgcaaattgcagcaccgaacgggttgtctcgtgggttgcttaaggagaatgcaaaaaatggtgtctttcatctattttcgatgaataccagagatttgctgcagccaaagccagagtttcagatcagaggttcatagaaatgttcgatatttctagccttaaccagttaacattcccattttcttgttcaaagagagaaaaacagatgccatagaaaaagtgatagaaagattatcatcctaccataaagggacgagaagcatacatttatagtcctttggggtatgagtttgttgtgtttgcttgttcagttttagtatatacatttaggcaattcaatataccagcaaattttagacttgcatttacataaatatcagattatttctacttaactggcttgaagttaagaccaaaaaaatcagatattctaatataaacatatcatataaggcaggttcataaagattgtgataataatggaaaattccccataaatatttaacaccccatcttagtcaaaacaccatgaaaggaaaaagaaaatgtaaaatgtataaatatggacgagcaacaatcaaatcgtcaacccaataaatgacgactgaaacgatatctcggcctatttgctatacctccatgttcatctaaacaaagacacataaatagtctccgcttattaattttaaagaacagaggcgtttcgttttaaaaacttacattaaaagaataggaaatgattcataaacaaaaaatcgatgtcattgtaaaacaacaagatccccaaccctaaaaaccagaagagatagacaaaaaaattaaattaaaaagacgaaccaggcgaagatattaggaagagtgactgctacgatatgtataagaacttgggggaatttatagacatcatctgttgctggtttggtgccctagttcagtagctacttccttttaccagattaacccttataattttcggaactttaaatggggtatacacgtaattttacaaaagagacattatccgtgggctaagagctattaaaggcccacatttct

SEQ ID NO: 227637 - DNA, 2267 bp, Cannabis indica
aaaaattaaacatacatatattgcacttaacatcacttaattgaacgtaattaaaaaaaactaattatacgtgcacggtacgtaacatcaacctattatagatatatatgcacattatttaacttcttagaagggctattccaattatcacacatatatacacaccttaaaaattggcttgtattacggttgttcatttaattagtagccctaacctttttatttgtttgtttgtttgagaatccccttgataacttaatttatagtaaaatacatgatacaagctagatattggtgacacatacataaattattgaaacacatgttacacaaaaaaaaattcagtgccaaaaacatatgagaagaaaatgagctagatctatcaattattggttagccaaaaaacaaaaatacaatattaacacatgtaatataaattataaattacaagtaaaaatgttcatataattctaaacttgaaaatattactgataaaatatgaattatagttagtataaattatagatatgtatttccttataccctaggaaagactgagaaaatactgaccaaaggccatgtgaagagccttaattagctttgctgatccaagaaagtggagttcaactgcaaaccatacctggtcatgaggatattgaatgccaagaaataaggttaattaatatataaatacatatatacgatgaaatacagtattattgctattgctatatggggtattatatgatgatcacttaaatcatttatttttgtcgtagcaagatataaatttggcttatgaaaataccaaatgttaaatacataaattacacattttttttacacacaaataaggtgcatttaattgtcgttataaataattttaagtaaaactacactatatgattgaaatcagttacacgtaattataattgtatataaacaatagtaaaattggaatgggacgcaaccactactcaatactaattaccaaacagcactatatatgggcccaaaaaggcatctaatataattagttattttttttaatataaaaaaattattattagacaaacgctaaaataataagtcgaaaaaatccgacctccaaactcttgcttcatctatataaaaaaaagtaggtttggcaaaattatgagctatagagttcacagaatattacaaaataaaaccttaaaaacattaagctttatctcaaactaaataattatatcttgtaaaaccaaaccaccgcagacaagcctttcttttatttacgagttttgtaataatttaataatctgtctctacctcaatatatattataatatctaagacgagagcacaattgcaaacccaaccagtatagcaatagctttggcaacaggtggagctaaaagacccaccgccgagatcgctgcagacgctactcaatatcctgtaaagtcccaaaataatctctcaaaaacccatattacaacactcagaagatcgcaacccaacattaatattaaggggtgttcatataatctgcaatccgtggtttcaaatcccaaccaatttggatcaaaccctttgagattggaccaaatgaatccggtgtgaatgatttaatcatccggaccgttttaaagtctctggttcggtcacagttttagaaatctcgaaagcgggttcaaaccaaaccaattcgtataattattatatatattttatatattatttttggataaaatgttgatatttgagaataacttgaagtaatattgatattgagtttatattgttatgataataattttttatttttacttatgtattatataaacttattaaaagtaaaaaaaatgccaaaaaatgaacaattattgtaaaaaaaaaattagaacaattacaaaatacacggtttgaaccaaaccaatctgtttttgagtggtttggtttggtttgatcattttattagtctggtttggttttgaatttttaaaaaaccgtaatagtggttcgatttgaaaaaattgaaaatccagaccaaaccaatccgtgaacactgctaagtttgaactactcttcagcagagccatcttaaatacttcagaggccctgttctaatttttaaaattaggcccttacaaaaaaagtataatttataaaaaatatttttaaatattatcatacggttatatattttacaaaacaccaaaaattctaattattttattaaaattgttattgattctaatacaataaaaaaataatagaaaaaa

SEQ ID NO: 227638 - DNA, 4442 bp, Cannabis indica
ggggcattttcgtggggttcggggtcgccagttctggttggtcggggttgagcgtcgacggcgtgggtggtctgccgtgggtgtgtgggtgcagcaccgagcgagagagaaagagagaaaagagaggcgaaagagagagagggctgatggtttcaaatggggggtattgtgggaattaagaaaatgttatcccattttaccaatattccctattttaagtttagggaaaaaattattccctaatgtaagcatagaaatttaaatttccctttgtatatcatggaatttttgctgggtaatctgcaaaaacaaaatagaagaaaattggattagaatatatatatatataatatttttggctggctgttgcagaatttcatggttgaagctgctaataatgctggatcagcacaaactcaagctactggctccacggaccaaggctataattcttatgctgctcatggttctgtgtatgcatctcctccatctaactcagcacacgcaggccatgctggaggctatggctcggtctatggaacaaactacggttactaaataaatagggcagattgatatggtttgctatttgatgaaactatatcaatagcaattattgagaacatggtataactaccaaatagtttttatttaatcttttttctcttaatgacagttgtaattttgtactcggcattgtcatgctgtttagaactagtaaatgttagattttatggcgtgcattaggttaaactagacagttgggtcatgtccattttgctacgacttttcttcaaactctttgcatcaacgtattataagattgagtgtgatgggagccaaaatttaactctaatggaaagttggttaaactaagtcacaagtctcactcacaatggcatgcttaacattttaccatggaaccataataggatggacataacgtattaatatatttaaggctcatagatacgctctaaaacgtctttggctagtccatttggttaagacaattaattcttttaaattgggcacgcaggcctaattggttcataattcatcataaagggttgtggctatggtgtaaaaggaatggaagagagtagtgttcattatacccaagctctcttttctctgtatgtatagattaaagaactgtaatcaacattgtcattggagatcaatatcaaaatttgaggtatgcttattattatgttaatgctctaaaattaaacgtttgttcttggctaatatgagcatgtatggttagttgttgattgttattgatatagcatgttcaatgtgtagtaattttaacaattggtatcagagtctatccatttgattttagggtttgcatttaacaaaaactctttttttttttcgaaatttatattgttcgagagaaaatcagattggatgataagtattgagtttataaatattttaaattgtattttccgtttcatttatgttaaaaatgctgaaaactccaattttttatataaatcttaatggttgaatgtatatatgagatttactcgtttggagtatttttcgagcgaaatgagtatggaaaagttaaagagcacgaacaatggtgaaaacccttcaaacggtatccaaaaaggtgtagaggaggccgagatccaaccaagtttgaaactgagttgatacgacccaaatcaagacccatttggcaaagaagatggatcagacccccatgcgcaaatgacacaccgttgggcatttggggttgtcgtttttagtcaaacgacacgtcgtttgcaaaaaatgacatgttttttacgacaaaaaaaaataaatttttgggtggcgggtggggccacgtggagtgttcttttagaactaaattttcatcattttgcttcattttttattttctcatttaattttgtgattttattttgagtttggtcaatttaaattattaattgactcataatcacatgattaaattgaataaaattattttttctgataatttttttatttcattagatgaaacataattatattcatgccataaatttatttaattatgttattgaataagtaattgagtgcttatgtattcacctatcatgagtctaagcattttaattttaattctcattcataaaattgtgagaattgtgacaaacttatcattaattgatttaatctcataattgccacttttcatttgattatatgagatgtattcccatttttcatttgctccactgtcaataaattgtcattcagtggaacacatgtgatgtgttgctccactatcaatgatccaagacataaattaaaataaagatttgttaccagccatgttggatgctgtaggagtagtgtttggatcatcattaggagtaatttgggtaagttgttgactgagaagtgaaattaactgttgcactgagtagagagatctacatgagctgagtttctagcaacattttctgaactattactaatagtgacatgatttgcagtaaattttcctttgtctgatttcttcttatctttatagtccgaaggaaaaccatgaataaaataacacttgtcaacataatggcctggtttgccacatttggtgcatgagggtcttggtttctttgagcatggaggaatggtggaagaagaaggacgaacaaaggatgccaaggtagatagatctgaggagccaagagtcctttgacgctcctcttgaacaatcatgctaaacaccctagataagttggggatgggttcattaaggaggatttgagcccgtactgaagcatacgactcattcagaacatttaagaattgtaaaacttggttctaattgtagaaatcaaggaagagtttcattacaccacaggtgcaagtagtgttaggttggaattcctttaattcgtgccaaaacgattttaatttggtgaaataagaggtgacagattgatcaccttgctacaaacaggtgagttgagtttgcagctgaaagatacgaggtccattaccctcattgaatctttcttgaagatcatgccacatatttgtggcaagatcaaaatacatgatgctctgtgcaatttcaaaagaaacagagttgacgagttaagacgttaccatgttgttacaacaaatccaagaattgagaagaggattaccaactgttggtcaaggaagggtaccgatgaaagcagatttattctttgctgtaagcgctatagggatcccacgtttccaagattggtagttagcaccattgaggatcgtgaaaatcagaattaacccaggatagtctgctgtgttgagaaagaaggggctcgagaaatcttcatgagccagacgatcgagagacgaagggcgacgtataggagcaacagattgagaaagatcaccagttggtagacctggagaagattgagctggttcgaggatatcatcgtcattctgagatcacaatcttgaactttgaagtcttcgtccagcaacataggagttgagaataggttcagaagttgcatcaggattagactctgattgattatgctcagttgtggatgggggaacaccattttaagagcgtgtggagggtctcaccattgatgcggtggccaaaatttttgctaatatcatgtgaggaaaaacagagtacgagagaaaaagcttagagcctgtttggctgtgttttcaatttttagtttttaaaattgtgtttttaaaagtgagaatagaaaactatttttgtcattctaaaaatttaatagtgtttggcacaagttttttaaaactattcttaaattttttcttactaaaaaaattaatattttaacatcataccatgacatgaatccatttgactccgggttcgggtttggttcgggtttagaatctgagtatgtgaaaaaaaatataaaatataatatgttagacaaaaaaaaattatttttgaaaattaaaaataaaattttaatgttttctgttttctaattttttaaaattgaatttttaaaaaaatgttttaaaatttttatcaaacgattcctattagtttttaaaaattgttttctattttttaaaactgaaaataatttttaagttatgaagccaaaagtcccttagaagcttatattgttattattctttgtttattcaattacaggaggtgcaatatatatagataacataagctaagttagttagggaagtaactaacttagctagcctataaacaacctaactagttgagtcttataacggcttaacagtaatttaactaacatgaaagactgaatgtaatatcgtaatagaatatgatatcatcgtttcttgaagatataaaagtaagttaaactatcaaagaaaaactttgacaatatttgttagttttacttgcattataattaacaaaaaaatattttctttctaatgattttttt

SEQ ID NO: 227639 - DNA, 2547 bp, Cannabis indica
aaaattaattaaaaaagtattaacacccattacactgaaacatataaagcttctacctaccataatttgtttctcatgcatgagtcagagtcagtcctgaataaacatgttcgaactttttaattaaaaagtaaaacataacatgttggaaataataatggatgagcgatattgcagattacttttcttttcatatgagtccaccgagtcaccgacactagcacaaaaagcaaacccattaaaacgtaaatatatctatattatataatatataaatatacatacattacgtatacacattaacgcttcttattgtaacaaacacaattacattattttttttaatgaacaaacacaaattcaggacgatcgtaaaagcaggcatatttcaataaagttagcactacctgtatattaatgtaatgtgaaggcttgcttgaggcatcaacgtgttacgcatgtgtatcaagaaaataaaatttaattaggaaatttatatatatatatatgtatatttttactgagtcagtgcagaacatgaaaatacgtaatgacaatatcaatatcaactcccaataaagcctaaatataatccaagtatgaaatgattatttaattagttaattagatatttcgatagtataattctcgacaattatattaattttaatttgcaaatcgataatattaattctctacaattattatggatattgtgatactttcagttattaccaccaataatattatactataatagtataaaaacaatgacaatatgagatttaccatgaattagtgttaaatattagacatcattaacatttttcataaaaaaatttatttttatatttggaaaaataaaatcattaaaatatcccgagtaaatctcgtgagaaaaactattcaccaatcagtttcactttgaaagaataaaataaaataaaaacacactttgggctacaatacgaagtttaaagtaggagcacactttggctaggtgagacccattggctttttcttttgtataaagacaataaattccaaagtgcaatacaactttagtcaatcacttatcctgacgttgagatcactgcgtcgtatattataataattcgaatgttttgattacaattattgagataaaagaacaggaaaacttacatgagaagttgccgaagttacaataatatataggaatgattgcggtaaaagtcactacaaatttaaagttgatgcagatgaatctctgttaagtaaaaatttcacatttagaatattaaaaaataaatagcaaaatataatttcacctatactaaagttatagtataagaatttattaatttaagtttgactcatccaagattataagaataatctcttaattacgattcttttatttaaagaaaacaccatttcattccaattacgataatattagaggatttaaaatgatttaaggaaatttgggataaatttggaattgtagctgaactaagtcaatttaattaaccgagctgcctacataccttctttgtgaaggatcaaaccacttgtacttcagaatacagtattttcgaatttgggtataaggattccggcagataaccactttcagaaatcctttactattttaaaaatttagaaaaattcctaagtagatgatcttttatggaattttgagatttgtattttatactattttgcggtatcaacgactgtacttagtcttaacaactaagttacctacgttactttttataggaatcaagtcaaacgtagttccaatgaggtgttttgataattatgaggtgaataacctctttttagaatgccattttttatggccttgaaattgaattttagtgcacatttgaaatttgaggtaatattaccattttgagatttttatgaggttaatgacccctttgaaattttgtgagatgaataacctctttaatatttcaagattgattttgatgagttcattcggaattttgtgccattttgtatgactttagaattttatcactttttctgactaattttttgtcttgaaatctttattgttattaaaaaaaataaaaaaaaataggagattatctggcagatatttcaattatttattctaaaatttggggaataataacttatctttcattagataccatttcaaattaaattggtcaattaaaatttaagatagtatataagatatttataattcagacttagattcctatttgaattatatgtttgaaaaccgccatttaactttttacactgatgtagtatatatatattatgagtacatgttacatgtactatatatatagggacccgattttgtcccattattgtacttttacggattgtaatctgtgatgtacggcaaccgtaggatagggtagttaatttgatctaagggttggggttaatctaggggtatttagagttacaaaaatgacaaccagttaaatttttaaattttaaatttattaaatttggaaaagttaaaactaatcatccatcaatcacatcaaccgt

SEQ ID NO: 227640 - DNA, 2692 bp, Cannabis indica
atattatgatgatgatgatgatgatgagggtccgtttattatcaatttttttttggggggggtttcattaggaattttttttcttttctttcatcaaagggtggttctcgttttttttgtcttgtcttataaattatttttatttttcgtttcgatgggaagggaagggaaggaagaaagaattatgtcatatttagtttgatgtaattggtagtttaacaagtcaaaaggtctaaatctaatggcacctgtatctttgtagtagtgacaacaatgctgtaacaaggatcttatgtatatgtatatatttgtaaaatattattattatcattgcaattgattaccctaaattattatataccttcttataaaattgggtttggaataagtgttacatatttgagggtagccttttcctcttattttcttttcagtccttgaaatattactaagtatatatgaagactgtaatgtaataataaaagaaacattaaatattattttgaattttgtattttgtcaaagttaataataatttgatttaaaagtgttataataaattggttaccttcttgtatttatttctactagattttatcttgaagttagttatatataaaaagaaaacgttgaaaattgagttgagttttatttatattattttagaaaatataaaatttatttgcctatggaaaaaaaacaatatttgatttgattaaattgctaatgcaactcttcccaacccaacttcctctttttgtttggaacagcaatagaattggggatatttaaccatattgaagactgctaactaattgcaaaactaggtattttaatcacattgagcaatgtattaattcttaattatgttgaggtatgcttcattcatattttctttccaagaaaaatacacatcagttgaaaaatttaatcgtttatgaacatataatggttgaaaacaaaagtggattatataatgcatcatattattctgtgtaaactagcattacatttttctttttcctttttcttccaccaaattctgtgtattttttttttcttttgaataagtgaatgcaatacaatggtgtaaagaaaaggaaaaggaaagagagtaactgaaaatgcaaagcaccacaagggttgttgacagttgagctactactaatactactagacttagactagtattagcctagatagtactactcttctttgcctttcttatcttcatcgcctttaagaaaccgcaagaaccaataggcagaggacttaggatgacgggtaagacggttgtcattgtagtcaacatacactatcccaaagcgttttgtatagccttgagcccactcgaagttgtccaacaacgaccatgcgaagtatcccctcacatctgctccatccctgcttcatcaacaaatattcaggatcaaaaaagtaaaacaattgcgacgttggtgcctagaagagactcaaacattagattttgttggagcattaccatatatctgaccatttgaactacctacaatctattgttatgtagtgaattgtgatgcataagacttaagaggggtgtgtgtgtgtttgtaaatcaagttcaaccaatatttacaatattttgtatatgaacatagtatccaatgcaatgcaagcattatgcatatgctttataatacttgttaagctacttacttgattgcctgagcaactccagcaagatatcccttgaagtaagtaactctcaacttatcatctaacatttcatgaagatgggcagccttattctcttcatcatccatacctacattgcaatggcatcgatatcatataacttttatactataatgctatatttagctggaaaattgataggccttagttattaaataaaggggtataagggtaatagtattacggtaatagtactatatatatatatatatatatgagtgaataggtaagcaaaaggggggaatgaaattgtaatagagctactgctcttggcttgggagagcacctggtctctcgaataccaagtaccttgttcacttcaattttcactattccattttactactgtttttcaaccgaaatgataggaaattcctatcaagaatctactactgtaatactgcttaccattctcagtaatgaaaatcgttggattgttgtatgttttgactacgtaattaataaccttccggattccccaaggaacaacataaagccactctgatgctgcctgtaacagggattaatgaaactataataagattgtgttaatgcattatatatggacctaaaaaaccacaagagaattatgaaagagaaaggtgattcattaccttctcaccaattgtctcacctccttcccattcaactgacaatgaaaaaagtaaacaatgtaaattgagataaagctatttggaaaaataaaaagagagagagaaaacaagaggtggttaatggcgattacgaagtctcttcatctcttgtgctctatagtaatcactttctgcattgctatcttttgcatatgaaattaatcttgttgtataatgattcagaccaatatagtccacagaattcctaagcagattcttttcttcctcggtgaattcgggaagtttatctccgattttttcacgcatagattcaggataatctccataatagattgggtgcaggt

SEQ ID NO: 227641 - DNA, 3234 bp, Cannabis indica
caagtaaagaaaatttgcactcatgataaccctgctggcatttttacaaagagtgttaccagggataaattcattcattgcttcaacctattgaacatactagattgcaagaatatgatcaattcagccagctctgtccaagcagtgaacaagtgaatcaaatcaggtggatttgtggtggatttgactcatttgtcccccgccacatcagcaaatacctatcctggtggcaagaaggcagttaattcggttggagcttcaccagttgggaaaagctactgcaacctataaaaaggcagccacacctacttgttttcttaaggctttcctattttgttttgtacatagattcatacagaaaatagtttcaatcttgagggattagagggttgtaaaagtctttctcatgtattttattgagtggactcaagtgagattcaatttgtaatgtgattttttctgtactgaattctttcaatgtacctatgattttcgaatcattctccatgtacaatcaatgatcatttaaggaataaagtggatgtgagttctttgcttctttttctttcaagtgttcattaagttcttatgttgtttgttcaatatttctcttgttccatctctgtttttctggtttatgtttcttgtctttgatgttgttgtttgagttcaatattgccactgttgttaatcaacaatgagagaaaaaggtgagtttcgattcaccacaaattatctttgaacatggataaaattctctacgtgttatgctctcaatttcctacaagttttgctgcattatttctttatgcaatttacatgatctgttttagttggttcttagctgattgttcatctaacaaattagatttatattatttgttcatgaaaattataaatatgtacttttattaaaaaaaaaatatagatatgtacttactatgttcccacaattcgacttgtattgtcttgagtttgatcaatgacaaaaagtcttgccattccaaaatctgaaatcttagggtgcatttcttcatctaacaagatgttactagctttgagatctcgatgaataattctcaaacgagaatcttcatgtaggtaaagaagtcctcgaaccactccttctattatcttgtaacgcttatcccaatctaaatctgatcgcttccttggatctgcatatattcatatgtgcgtacaagtatatgtataagaaaatttatcaatctttgatttctctttcaaaacaaaatcataacattaaatgcaaccataccaaatatgaagtgatcaagacttgtattttggacaaactcatatagaagaagcttctcacttccttccatgctaaaaccaagaagcctaacaagattgcgatgctgtaacttggcaactagtattacctcattcttgaattcgtgatcaccttgggctgatcccttagacaatcttttcactgctatatctcgtccatcaggaagcctaccctgaagcacatcacaaaaaataaacaatcatataatgaatgaaatagacttgaaaatttatttctaacaaaagataaattatttcatacttgaaatgtatatatttttaccttataaactgcaccaaatccaccttgtccaagcttattttcctcagagaaattatctgtagcaagttgaatagactcaaaactgaattgcaaagattctgcactttcaatttcttccacgggttcatatgtgaaatgatctgattgaacaacaatacaatacaagtcagaaaagtacatttatttaaagtctaaactatcatttgtggcaataaaattgactaactcttcaaaattaaatagatttcctaatgggaaaaattgtgataaatagagtaatttacaatatttaaatcaaattatataacttttttttatcaaatttttatatattatatgtggtgtagctcatagaaatctgaactgaaaacattttgttactaaccaatttcaagccaactaacttaattgtcgctttgttgagttatttcttgatgtatatatatttgaagctaatcgagtccacgatcaagtcaaagtatattgaaaaatattatcctatatggattaaatgtaaaaaaaaatattaattcatatataagaacataggttactctgctcattaccaattagttttcagatagaatctcatcattcttgtcatggtatcagagctatatctttagtggactttcgattcacacttatcaagatattaaagtcagttgcacgatatccgcatagtgcaaagacacttgaaatccaaacaaaataagcgaataaatggcacaacttgtgataaagcaattcaagattggtgagcaaaaaatagccaccatcttgaggaaggaatatgggacaacattatcccacatgaattaaatttaaaaatattgagtcatatataagaacatgggctaattcttgtcaaagcattttttttgggagggagtgggaattggttcataacctgaggttgagtgttagttcgacattgctcgatgtactactgtgagtttaattgattgaataaaggaaagagatagtgattctaacactagatgtaggaacaagaatgaattagtccagtatctaaaccagtataaataatttgttgtgtgtgtttctttgttttggtgcttgttctctaactctatattttgtgttcatcaattttgtttgattagttgtgttaagtatgttaattttgtttaattgtataattaatttttacattttttaagatattatttacagaaaatgcgatcttttgaagttttaatgtttcttttatgctatattcttgttattttgttgttaattttttgttatttgtatattatttttatgttgttttcttattactttcatgtagttttcttgttgttttttgtgttattttgatagaacaccgtagaaatataattatagatatatatttgaacgtaatagtgtaatttttttttatatatattttgaatctaatacaatctacacaatagctcaaatccatagtagtgcgaattggatcaaaaattttgaattagatacttttcaaatattaaattatttaatatttattaaaatatacttttcacatgaccaaaatctattaaatattctttttaaattctccaacaataaaataaaacaccttattgttgttctatattcctaactacaaattaaaataa

SEQ ID NO: 227642 - DNA, 661 bp, Cannabis indica
aaagttcaaaagacaaaaatcttaattatactttgtttatataccaagcaagggtgccactaaatctatattattgattccaagcaataggccagcgacgagcaagattcaaaattcaagccattttaaattgtaaaacattaccactaaatactataataaaattgcatcttactaatgattattgatactctataaataattttatattattaaattatatagaattggatatgcatcaataataataagataccttaacaaagctagacactaatgtcttctagtacttctcaaagtttatgtttggtaattttgggttttataggctaaattttgaaaggcaaggactttaaagtcaaaatacgcttaaggcagggattttgttgtgcaaaatagttaattattattattttaattggcactgcaaaaagaagctgaataaagtaaaaacgtgaaggcaaggacgatcaatttcttaagaggtggcggtaattttgtgtgtaaagacatacaattgtaatctgtgtgtggaagaagtaaagccgtcgaaaatggggatcagattcatcttgatggtcaacaagcagggccagactcgccttgcccagtactacgagtatctcaccctcgaagaaaggcgtgctcttgagggtgaaat

SEQ ID NO: 227643 - DNA, 2331 bp, Cannabis indica
aattacagtgttacaaatattaaatacttacgccgctaaatataaacattagaattatagccacttacaaactaacttgaacttatactgctatttatccttaaaaaaataaaaaaaaaataaaaaaagaaggggggagggggtgtgttgaggttggcatccatctaaattggtcttgagccttgaattgaacagatgttttaaaacataaaaagaaacaatccatccaagtggaaggagaagatggtttgtgtcgttattcgcttgatttagacaaacttgtagtgctcttctttctttctttctctctctctctctctttgagttgagtgcggtattacccttcattgctctaccttttgcttctctctttatctttctttaagctgtgtgtgtcaatgtctgcagtgctaacttccgagtggcaaactcttttgctatgttcttctctatcatactatattagcgacttgtaaatgaaggatacagataccatattcctctgcttaatagttggtttcttactcttgctctgaatatgacctctttctgcattggccactcttcaatctcttccaaggtatcttctttcttcaatttctttttgactactcggttatcggttaatggtcattttggtttatgaatatgggacctccataaccgtttattcagtttcattttaacactcgttttgattggtcaaatgggtttttcccattgcatgaaataaatattctgatgtcccataattctcacttgaaagctctttttatatgcaattattagtattagtgtttatgtttcagatcatacttctgtgagagatctgagattggttggctttatgtaaattcgagtacgcctgcattgtttttgtttaatcatatttattggatctccctttctttcattcggaaagagaggagaaaacaaacggaaaccttcttggagtcaaacaattaatactatatttaaggaaacacagttagctattaaatacatttaagcaattatcaaggattacacaggccatataaatggtaatatggatttggattactagtaagggactgatatacttattttctagttgtattcttgagtttatgtgagctcttcttcagtcagccaaaaagaaacttggatgtgttctcactgaattccaatttctaatcataatcaggtctcccagcaacaccataaagatcaagcttttccagaaatggaccattttatttaatttcttttcattctataattaaagtcattgtgaatttcgcttttaacactttagactctgtaatgcgtatggccttacctgaatgtcctagaacaaagtaaatgtttgacttcaccagtccacctaacttcaaattccctcattctagatatatagtgtcatttgttgcatctaatctatattgatagtatcatctaaggtaacttcttattaaaataaatatgagacaccaggaaggaagggaacctgaaaacgttacataacaatcacatgatatttattcctctttatgtagtatattaacataagaaagttggtgtatctttctgagatcaggaaactttctcatattcagtgcttcatttcttttagattgacatcttggaaaagcgtataaaaccctggcataatgatagagtggatcaaaggtttgctctttcactccgaagtaatagcactaaactctttggccaacaagttgtcacaaagagggctcacttacatggggattggagtttcaaaggaggatcaagagttattgttagacctaaacctgagagatttgttctatatcagaaagtctctggaattaatgcctcatgtgatccttctttccatttcaagcttttcaatcttataaaatgctttctttggtttagactgttagtttcttttttttttataattcaattgctacaggtaaaagaaagttcattaagtttaatgttccataatagagtgaacagctccacttgcagacaaaagaatcatataaattctcactcctttttttactaaatcttcccttcaggggtatgactaaaatgataatagtttcttgttagctattcagtggtttccctccttgtaatatgcaaaataccttctttacatcttctgcatatgaatagatggcatattctgttagaaatctccttatcgttgctcatcaatattaattattggccattgatttgtgatttttttctcctatatatctattttgaaactgtcccaaacttcattaaaggtcttaggctcaaatgaaaatgattgttttttatttgtgtagggttggcaaattctca

SEQ ID NO: 227644 - DNA, 1275 bp, Cannabis indica
caaattaaaattaattagagtaatctctttgtcgtttcttattgcaacgtcttagaatcagaatgatatagattctattctctttttattataatattgtacatttcatttgcccaaccaaaaggaattaaataaagaaaaaaaaatgtatattttgttgggaataaaatgtactattttttttttcattaaattttgctttatatattttattttctcttcttccccatccttattgtcgtttccaatattctaactaatggcccaattattggaccctctcaatgagggtgtggttgtacattcttatttcttatatatccttttatatatagtgaatatatatatataattatcaattattattacctaaacataaaattaaatagtaaaattaattaagtcaacctacccttatttttctcatgatcaaaaaaaattatacattgtttaatttacataattattatgtgtccaaattaacagcctgtgtttattacgataatgaagccattaaagccgtttttaagggtttatgttcaagaagactttaggtccaaataatttattattattattattattattattattattattattattattattattattattatttggaatgaggccaaaataatattgctatcaaaaagttattttgaataataaaaccaaacatatcaatagttacgttaacatgacttaccctaactattttagcactaaaaaattggaccacaataaagttttttttttttttctgaaaaaaaataaaaatattgcttatagttattattcttgatcaccattttaattgacaaaagagaaagaaaaaaaatgtaccacaaaaaatgctgaagcagagctctaattattattctaagctacatatattaatatggaaaataataaaatatttatataatttttctggctttaacaataaaactaatggttaggaattaaagatttggtgaatccaacaccatgccataaaataattctctttttttattagatataatataatatatccacgatcgaagaccaagtcaacatctaatatgcattttatctcttaagaaaaaaatttaattaaatatatgcatatataacaatcatcatatatgactccttataaacatataattaaactaaaatcatttaatttaagattatttgttagattttaacgagacccctatttgtttttaaccgaaacaatacattaattatcaacgcaaatcattacataaagagaggcaaatt

SEQ ID NO: 227645 - DNA, 2749 bp, Cannabis indica
cagtggatggctcgctatggtcgaacctacaaagatgatgctgaaaaggaaattcgtttccaaatatttaagagaaatatggaatttattgagtcatttaacaaagcagggaataagttatataaattaggggtcaatgaatttgttgaccttaccaatgaggaattcaaagcctctcgtaatggttatagaaatttctctagtgtttctagatccactccattcaagtatgaaagtgtgattgcaattccgtccagtatggattggaggaagaaaggagctgtcactccagtcaaggaccagggccaatgtggtaatgatgaacaagaacatattttattaattgaataaaatggtgtccctaatacatataatatatataatatcagcttatgttaattaatttgatatgaatgtattatatatatatttttcaggatgttgttgggcgttctctgcagtggctgccacggaaggaatcacacaattgtctacaggaaagctgatatccttatctgaacaagaattggtagattgtgacataaatggcactgaccaaggctgcgaggggggactcatggatgacgccttcaagttcatcattgacaatggaggcctaaacacagaggccaactatccttacaagggagttgacgccacttgtaacaagaagtcctcatcttctgatgctgccaaaataactggctacgaagatgtgccagccaatagtgagaagtcattgctaaaagccgttgccaaccaaccaatctcagtggcaatagatgcaagtggttctgagttccaattgtactcaagcggtgtcttcaccggagaatgtgggacccaattggatcatggtgtcacagctgtaggatatgggactgcagatgatggtactaagtattggttggtgaagaattcatggggttcgagttggggtgagaatggttacattaggatgcagagagatgtggatgccgaagaaggtctttgtggcattgctatggaagcttcctatcctactgttgcttaagtatatataatttatatgtgtacaacaaaacctatgatagctaaaatgaatgttgatcacctactcatatctcttaaaactcatacatgaatgtaattcttaatattgtttatatagttggttattagtttactaattgcagttgtgttctaacagagcaacaacacatgatcaaaaataacttcatttcataaaagtcacaaccacaaaccttaattgatgggtaaaaaacacacttaaataaatcaaacagagaagacttttgtccttgtagcagagcagagcttgaaagatgaaatagtaatatatgaagttgaagaatttgtatgagaaaaatgtgtatcattcttatgtgtgacaaactcaaagtagagctcaagagcctaacagctataatataatatggaagcaaagaagaacaatctttaattagccatgaatgagacttgggttttgtttagttgatatataaactaagaaataaaaaagaattattgccttcaagtgggtgtttgaaagaaatcaagaaataatatatagatttgtcactaaatttggcactaaaaattatcagtgtgaactgtagaataaatttagagattgtgcttcaatgagaatcccatgaacactaataaatctttctatatttgttatgttattattattgcttgaattggtttcttagttgttaattatgatactaatttctgaatatttttctgttgcagagtgcctatttattgattcattattagtattaaaatggtgagaagaagtgcaatgtgatcattttttagaaatattaagtaaacaaaagaaatgtacgaaaatacagaacataaaaaaattatactatattggtttggtttggccaataccattcaaaatttagagtatgacctatattatatccagttccaagtttttcaactatgtcagaatcagaatcatgattacaagtctgtacatgtacaactttctcatacattaacacaacttactagctctttaagacttacagtccaagtaataagcctcatcatagtatttatcgctgtcactcgagatggtactaataaagcttcaaagactttttatcatgcttctttaaaaggcatgacgaaaaggggctgatgatacgtacattctttctcaacttaccctcaattctgtacaaacccctcacttgctgaagatggtaatactaaagcttcggagactgtatatatgctttttggagaggcataacaaaaggggattgaagatgtcctctgtccttcttaacttatcttcgtcatccaattctgtacaactttctcaaacttcctcatgtactttttgactgaatgtcattcttaaaaagaggaacaaatggttatgataagagaggggggttgtactcggtagagctgcctacataccttttctcagggatcaagcccagatgtagttctgtctcccagcatgagtatttgttagaagtagtgtgtggagtcataagaccgttaaacaaaataaatgtaaagagaattgaacagtagtttgctctctaaaccttagatgcatagcttgctctctaatttctgtccaagattatagcccaagtaaatgacaattatttagggaatagacaaaatcaatccatgacaagtacacaccctgatatcaattttggtcagaggttttcaatagaattcataatcatgttatgatctt

SEQ ID NO: 227646 - DNA, 2778 bp, Cannabis indica
aatacactaccttaaacctttataatttaatattgcattagtattggtgatgatttaatgaatatgatattcttataattttttattataaattttatttttttatgaattattataaactatatttttttatgaattattttaaactatatttagtatgagttttattaataatttttaaaaatatatatatttaagttattacttcattatcacttttttatttttaagtttggtgttatgtagtacaagtttgctatatattaaatataaatttaagagattgtattttttgataaaaagaaaaaaatatatatatatataggagctttaaaatatttgaaaaaggaaattcattgtgttgtttaggtttaattagaattattatgacattttgtataatgataggataattttatggtgcaacttctaaaaagagaaaacttctgatttttcttatatgataccctgattttttaaaatgtcatgaaaacttgcatgaagtcataataaataatcaggatcaacatgttcatacttcatataaaagaactttgtctataacttttacacttgagaaaaacagaataaaagaaatgagtagctgagcggtgattttcctaaaggctgtgtacgaagatgtgtaccttgaaattgaatgaatatgatgagctgttttgttgatggattttacaggcaaaacaacgacagtgaaaaccaggtacgtagtaatgtcggaggagatcctaagaaaatacccagagcttgctctcgaaggaaaacccaccgtcaaacaaaggctcgacatttgcaacgacgccgtaacagagatggccatagaagcttcccaatcctgcatcaaccaatggggtcgaccaatttcccacataacccacttggtctacgtctcatccagcgaagtcagactccccggtggcgacctctacttagccgccggactcggcctcaaccgacacacccagagactcatgctcaactttgccggctgctccggaggcgttgccggtctccgggtcgctaaagacattgccgagaacaacccaggtagccgtgttcttctcgccacttcggaaaccacaattattggctacaaacctcccagcccagataggccgtacgatttggttggcgttgctctgttcggagatggtgctggagccatgattatcgggtcggaccctgacttgggtatagagaagcctctgttcgagcttcatgcggctgcacaggaattcttacctggaactgacaaagccattgatgggagattgacagaagaggggatcagcttcaagctcgatagggagcttccccaagtgatcgaagataatgttgaagggttttgtgagaaattaatggaagtggttggatttgataaagagtactataataagatgttttgggctgttcatcctggaggaccggctatactgaataggatagagaaacggcttgatttggtgccggagaaattggttgcaagtgaagggctttgatggattatgggaatgccagtagtaatactattgtgtatgttttggagtatatgattgaagagagctcaaagatgatgatgatgatgaagaagaagcagcagggtggctctggccatggccatggccttggccttgcccaggaagagcagaatgaatggggtttggttctggcttttggaccaggcattacttttgagggtattctagctaggaatcttacttctttccaaccataaatatgatcctattattactattattattattacacaatgattctatacgtacaatttccatgaaaaaagaaaaataaattgtaagacaaatgaagtgtattggacattttgtttcttttgtttgagacttagtcagttggaaataaaattctccttttttttttttttcctttctatttgcaatttcaataggtttgatttgtttttattttttgtcaggacaagaggtttgatttgtttcatgcccgaaagaaaattcagttccggttttgctataattcgggaaaaaaaatcatgtgtccccaattttggtttcctatccctgtctctccaaaagatgattgccaccttttccttcatttatccacctaacagactcactttttaaacattaatgttagccattttgtttactttgctcttcgtgagtcattcatttctttttatattataaaaatttaagaaaatggttaagtagagtcaccacaaaatatagacatagagatattttttttagtaggtgttacttttttattttataccatttttttttatgtataaatagattaaattaattcttcttatgtatgaactataattatattttatttactgataattaaattataaaattatattaaatttaaaatttgacatttttatataatgtgagtagctattaaaatttttatttatttatttatttatttatttttgaacaaaatggagctttattcaaaactagcaaggcaaaacacaacaaaggttcaacgagcctacaggactgcaagcaaggcagcaaccaaaagataaagctattagcccctaattacattaataatgtatttatcctgctttttaaaggtggtacaagtcatacttaagattctagattgagaaatcttcttaatctccatgctcactttaaaaggagaagtacaaactaaatcaaatatacaaccatttctatttttccacaacaagtaaatcgctgttgcaaaaacagtgtttatcactcggttctt

SEQ ID NO: 227647 - DNA, 4288 bp, Cannabis indica
tttttaaaaaaaaaatgcatattaaaattttaaatgagtagattctcaacaatagagattgagaagccatcttctaaacacttttttttttatcattattatttatatttatattctttggtttagtacttttcgtatccttgagttgtctaatgcaattgaaccaaacaatattgaaaagcaagtacagttgatttgagctggagataaaatgagcttatctttctaaaaggagaacaagatgaaagaaacattatctctttctaacatgaaataagaataatatacatcaatattgcagggtccatgcttcattatggtttacccaaaagcacaaatctaatatataaccattacagtttttcttcttgaaactttacataaaaaaatgtgtatagtaccataccatcgtgtataaataaaaaaaaaaacaagagaaagtataatatttaattatttttatatatagaaagatatttatttattaaatattattaaaacaatatagaaaattatctgatagagcatattttctaactattattattatacaatatctctttatgactattagatggattatttatggttacaaaaactttcccacctatgaacaaaagaatggttctaccataaatatgtcatatatatttatattcttttttttttgtattttctcgagatgtaagcgtcttgaatgtataatattgaaatttggagtttgtagatgttgtcagaagaatttagacaacactaaatttgtgtgagtattcaaataaagttagaacattcaaaagcaaatatgcaagcacttacttaaagtagcgagtactcaaagtataggctactggatagacaaaacgaaagtagaaataaagagaaacaggagaattatagtggttcagtcagagcttggtctgcttagtcaacttttggtaataatttttagcttagtttatttaatttggatcacccttttatatagaaagcaagtgtcatttaagattacataactgatcagtttaatactgtttttacaataaatgacagtattaaatctaaataaatgtttgaaaaatgaatgaagaatagtttcgtccattcttgaattaattgcaacaacatatgcgacttgataagtcgcaacttgtctattcatattccatacacacgagctcgcaggctctatggtgttgtactcacaagatggggcctttgggcttattcgttaaatgtctatgttcaattttgattgcatagtcaaacaatatatgcattgacaacttgggacatgcgagtccttgacgagttgttgaacacactagtcatttgaaccaaacctatgtaaatagacgatctttactcatcgcaagagaaatatacttggtcatcacatataatcagtacatgcgcgatcagtataatttttctcggtcctacctattctttgactatgcggggcatagtagtgacaagaccctatctcgatcgcatcttctcatcttctcgtaagttcacatcaagcgaggatagctctactagagctatttattgacacgtctttgcccctagtttgcgatgacaaccgcttgtcaaataacaaaattatacacaagggacaagcgagttgctctgtcagaagacagtgacctttggctgtcttgtcgagaattttgaaatgacagttgtatttattactttattttcccaagatgccatgtcatctaaccctttggggttcgtgcaggcatgttttgagacaattgttggattgggtaacctttggttttcgaatgccacatgttaagatcctaacagatgggaacggatgggactgattcgtatttaaacctctaggatacgaattgattcacttcactttccctcctctttttagtttccattgaaacttttctctctaaaacttcaagagaaacctttttcaaaacttcaattccttttgctgaagattgtttcaaagttcgaagggtcttccgaagtgataatcgagcttagaagaacaagcttctagattaaaggttggttcttttctaaaaacttcctctatttaatgtgttttctttgaataatcgcatgccttttgggtttttcgggtagattttgcatgaaaacagtgggatatattttgggcaatgaaactctaacaagaataagggagtaaggggaatttttttggaaaagttttgcatgttacttgaatgctcgcatcttctttgtcatgaactttgaatattcacacttttagttagaacacattgagtattcgcatataccaaattatgatctcagactaatagagtttgaattattcaccaagtggttgggtgtttcacagtgatcaaatttttattcaactacacaaacattaaatcactgtgaaataccaaaccactttgttttctttggcgttagttttgttatttttattgacatttttattcattttgaaatagttatacgtgcaaggaaactcctccttaaattgcactcacaatatgttgaagagatcttctatcttttagatgagcaatctttcggacaatcagacattcgaatctgagggtggagcattcgcggatgaatctcagaagaggatttagtttcatgggtaagtaagtttgatttgacgacattccaaaaacctgaagtttatcaatgttggttgtacgaaacccatgtcgatgcaacgtcctcacccacccttcaccaacccaacaattattccgactagcatcactgtggttttagtccccatcatttgctgttgtgtcgcggtttctttccttttgtcaaagtgattttgatatattatgatgtttctccattccaactcacccccaatagttatagaaccacccttgaattctatgtgaaataaatggaatacatgcaagcgaaacctagtatcgaggattttcgctatttctacgacatcaagaacgttgaccatgacaattgttatcccaattttcgcccacctgacatgacaagcttacataaataatatcagcgccacgtgacagtacaactcaccaataaggaggtcaagttagcaccttagccaacaagggtctcagcactcaaacaggacgacaagtgacaaaccacccacctcaagggggctagtcggccacccctaaccggccctatggccgaccaacctctggacagcacaaggtcagccaacctactgcctgcaggttcttggtcagccagaattagacctagtaggattctggtgcacaaccttacacgtggactacaagttggactgggagttaggccttaacgacccaatgaagtagatggaaaatatctatgtttaagggaaaatttagtcttttgtatttaatcaatttaatatgtaaatatctactcattttatttgtaaattagggtttaagctctcctatataaagattcttaacttaaccctagaaaagctaagtcattaagtcttattcaagccgtcaaacactaagtatgatagcactctctttctctctcccattcacacacccacataagcttctctcaacacttgagttttgacatcttcgatttttttactttgtaaccttaagagagctatatcagatcccacctatagtgatgtgaatagtgttatctctcggtatctatacaactaaagggggagtagctcattacccgctaactaagggggtcgaacctctataaaaatccttgtgttctttacttttgagttctagttgtgtaacatgtggcaaacattagattaatacggccccgctctcggttggccacttttcgaggttaacagtaaccaagctcccaataagtagattcgaaatttactaagtaaattttctaacttattaattcctactgactccactatagatttggagttgtactcctaattacatagaacgctctatatgttctaaatatagatacgtcattaattatctattatttcaatccaaataatcaaagattctctataaatgatttacatcgagtagagacaaatttaccattctacccatcaatgtattttatcattaaaatacatagcttcctataattgatattttcagtaaactaatataattactgaaataagagcttttccatttatctctattaagccaatctcaaaggaaattatcatttcacttctatataattatagaagctatagattctatatctatgattagcgctcccactcaattgtaacaccattttccctacgtaacgaactttttaaagtagctaaacc

SEQ ID NO: 227648 - DNA, 1372 bp, Cannabis indica
cgcaaattactctatttaaaatagagtagtatataatgtctatagctatcttaagtatttacacttggtttaatatattacgcaataacttccaaataaaccgtaagtgactgttttttaatactgaccggccggaacgttataaacactgtataaagtttgccataaaaagttgtgaactcacttaataaagataaaagagttttgaaaatcacgttcgtatcgtatgtacgttatattattatctattgtttttgtttttgtttttgtttttccttaaacgtaaatacgtttttttttcttgtttgtttgttttcaaatatatatctaaacgaatactaccgtcaacaaaaagctcgtgacttttttttaggcctcaacttttgtgatgcccttaactttttattgagacaattaataaaaggaaaaaagagagaaaaaaatagatgtctttataaacgtgtggacaattatatatgaagaaccagatacttataatatatgtcatttgtcgtccataaaaatcaatttgagaattatatacgtcagattgtcttcctaaatttaaagaaagaccatgaatgatatgctattataatcacaacaatcaagatgtatataagacttggtttagcctaatataacaaagacaatacacaggaccagctgtttttatacatattgcattatctataattatatattaataaatttatatgtatgtcctactattttgatcgatgtctctagtaaaatattttaatttttttttttaatttaaaaatgggtttactgaaaggcatttttcaacccctaggtaggtacgtagaatacaatcaataatgaataaaagaaaaaaaaaagaaacaatggccttggaattaccacgaggacccaattacactttataacgttaaaaaaataatatataggtgctataaaatatttcctcaaaaaaacggacatttgaattcttgctccatgcattgcatatctctcataaaatagaaagcaaaaaggtattattatgacaatctatgtctatacggcaatgccacttataacatctcttcaatggatttttatcttttttttttaagtcatagtacaaaaattgtgttaaatttcacacattaaaattatgaaggatattgtggtcatcaagttctttttatgtttcaatttttataaattgaactttttgatctttttattttgtgtggtaatactttcttaatttcatttttgttaataaatttgaaacgtcagtaaaattgccaactgaaattgctacttgtgtacacagagccggtcttaggtaggtcagttaggagtgcgcttcaagctcttgaacgctcagggcctcgaaatt

SEQ ID NO: 227649 - DNA, 2542 bp, Cannabis indica
taaagcgtgaaacaagaggaaaagtaattaaattcaaaacggcacaattcaacaataattttgacaatttaaaagtcacattatttctgtaaattagatttattttaaggtttaagatgtaaattttttaaatttaaagaagtttggccacaaatttatcgtattttaaactgtttaacgtatttaattttttttttcctgaattgtgattatcaatgagtctacgaaggagtatctatctaatctttaaggtgcatcattgcttttttaacttatattagtctttctacgtagaaacatttgatggtggacaagtatatcatatttatatttagaaataatgtgcattaaattgtaccgagtacgatgcccttgaatggaattaattagcaataataggaagagggtttgcttggcccaaaacattttttattttatatttttcaaaataaaggttttcatttcaaagtacagaattcttttcccccgtgtgcatttgaaaattaaaaataaactcaacagttttgtgcaacattccaattattttttttggtacaacattacaataatttaatgagctatatcacttggaagatgaaacatttaatctttgtatgcaaaattattggttatatttttttttttcaaaaaaagagaaattattggctgtatttattcaattctttagaaacttttcccccaattattggtagaaaaaaattgaaataaaagttcatatatagcacattatacaagccttatgtgaacactcaaagttgaatgtgtaaatatgtgggatgagacaggtgttcaattcccctgtaaaaatatcttatgttgaatcatcattaacattttctttggttaaggatcattaacaaattaattactacttaaataaacactttataagggaattaacggcacgttactatgtaaggtagtaaataagaatacagctaataattttcattttcctcctttcatttttgtatacacataattagtaattaatttggtctcttcaaattttgtagaaaaaaaaatgaatttcttttatcagtcgcataaagtttaaaaggttactcaaacaattatttatttatgtatgaatttttattttattttattttagaaaatgtatgaagtatgagccgttattaattgttttgtttttctatttctgaattaagtaaactaatattgacagattcatgtcatcatcgctaaaatttcataataatttagtattgaattaaatattctatttaggaagttttaatttccaagctgccaattggatttcgatttatcaatctcatcattttgaagaattataaatttctttagtatttttatttagtattattattgattcatgaatacatctgtaaaagtctgtaactgcatcacagaataaacaaaattgaattcaaaagctgtttagtaacgtataaagatgacccttattattaccattatgattatggttctatgtattctcttttcttccagggattaattaatttaataagaagaccaattacttgttcttcttatgaccctttgacagtcttttttttttaattatctcactgtataagaaccaaaagcacgaaactgacaaatttgaagccaaaattttcaaaaaaataaaattaaaaatgaaaacccgtcgtttcggttaactacaaaaaataagaatcttaatgagagagtttaaatcagtgaaaactcttctcactccccaataatcccaatcaagtttaaactgtggaacctttagaaagttaatttcatagttaaacaattaaacctaaattaaattaatttaattgttttttttatattagccgaattttagacaaatggcagagggtttacacagagggacaaatgtctccaaccgctgggccattccctccagttgtttccacactctctctctctctctctctctctcattgtcgtaccgccccctcctcctcctcctccttcttcttcttcttctctgctaaataataattcttgtaacccacagatgaggtgagggtgcattggggtgtttcgcagaggacaagcttttgggttgaggatttatagcccttttcacagtcaacccaaaggaactcacccccaacatctaacactacattggcttttactgcaggggttctttgggttagttctgttgtgtattggagagttttggtgtcctttgtaacgcgttggacaagggccttgggcaatgtagaagtagtagtagtggagacaccagagaacaaacccgccattccttcttgctgcacaatgcgaactccaacggtgattgggccgacgtgcaccggcggcgcgggaggcggagttgggatacggacggatcccgcagctgagttggggtgaaaagaaagagctggtcggagattttgaaccgtcaccgtgttaggggtgacagactcgccctgtagctgcatacggaccttgacgaggtcgattgggtgggttgaacaacaggcaatgatcgaagctatgcctccttcaa

SEQ ID NO: 227650 - DNA, 4192 bp, Cannabis indica
gtatacactaccagttatgatggcaaaagggtcagaaacactgcaacgaaagactgtgcaggccggattaagtacagaggtaaatatatatatatatgtatgtatatatgttcctttagtactgactaaactaagagaatggtttagaaatgagaaggatagaacaagaagagagaaccaagaagaatttttcccaatcctcgagaaaagaaaaaattaatattggatttcagagacaatatattttggccaagaagcaacaaaaatggcagggaataaagaaaagaaaaacaatatatatggttataagggttcccaaaagaagccctacaaattatttaaatttatataagtatacttctctccataaagttttattaatgctataaaaaaaaagtgcagatgggaattagttctctgcagacccaagaagagatgtttctttggatttccttagccagagatacataagagtactgctttgtctttttggctctctcttggataaagcaagcaaaattaaagaactgggcctcattatgaaaaaagggtttatttatttatataggtttaagttaaaataataagaataataataagaataaagagaggatgtagtgtaggtgttaaggcaatgttgaattagcaatttgggaaggtgaagtgaagaatatgagcatgagaagcggtgaatgtgagacacattatgctaattttttattattattttgtgtttatattttaacatttttgagttctaataataggtacgtaagagagagggagagggaattagaatgtgtgggtcaaatatgaggaggagagagagtaagagatagagatatatatttggataaattaaaattgtaaaagggaaatttggggaagaatgaaacaaggcaggaagcagggaaggagttggaatggtatgaatatgtgggtcagatctcccatttccatgtggacaataaaatgtgggtgggtcattgggtcactgggtctggacccattgaccctttccctctctctctctttcccttctacataataatattagatagatagcatgtgaagtgtgtcagaaatagaggaaaatatttgtgagtggaattatgtactggaaagcctgcaaagcctaaggagaagaagtaaaaaagaaaaaccttgtataatatcatgattcatgcctttgcctaatccaagtttacaaacatacccttggtcgcacatggttgatgatgaagaatcactaatcttcaatttcaatatgtataacaacgacaaccaatctcaagcggtgctgcaactaaatgttatgtttgtagttttcttttcttttttcattattattttgtctctcctaattgtttttttggttacattttatatgtatttttgtacacacgtatagtgtatatatgtgtgtgacagagccttaattcgtggctgtcatttgtgttttccagatggatatgaatgttaagaggtgactgtcacataattatttgtcatgctagctagcaataataatgttttcacaattaattcttaaccaatttattttttctcaattgatttgagcttctgtgatcggttgctctatttggctatgatcagtttcaggtttagtgatatatatgattgtaatgtaatgtacatttattataattcctgtgtatattattgaaaaaaaaactacactgctatccacatcatttgaattattttgggttgaacttgttggtttacgtataatttatgaatattttttttttttaaatattttcttttttaaaatgttttatttataattctacgccctaaaatttttgtttgtaaaagtatatttataaagtttcaaaattacaaaaatatattttactcggcaaaaagtaaaaaagaaataatgagaaatcaacatcacaacaactttaaataaaatataaaacaaaaaaaaaaaaccatcataataactataatacaactagttatgatcatgttaccgaattagaaaacgatatgaggttatttctccttcttcaacaatagatgggccatggcagggaaggagcgacctaaaagtgagatattactaggaagaaaggcagtgatgcagtggaattctcgacaactgatttagacagtgatgctataatgacgatccagagcacaatgatcaatcgaagattgagatggaatgaagaatcagagataaggaatgatttctcacgataatggattcaaagcagaaaagaaatcaatcttggaagaggtcgtgttcattgaagatgctacaagcattcctaaattcccacttcctattctgaatcctttggaaaataagatcggagagggagtggtttgtctacggtttcaaaaaaaaaaaaatgtgtcaaaatagacaaggaggatattgaggatgaggtgaattattgggcatcttcactggtttgttatattttgggagataaccctcctttgggagtgatagaaggtttttttttaggagaatttggaagacaaaaaggatagataacgtaggattgttgtctcatggattttacttgattcgatttgatatagagaaaaatagggatactttcttgacatgtcaatcctcccgcgttccatgacatgatccaggaacttgatactttcttgaacgaatgagcacttctctcgctttacatacaactcttctttcctcaacttctagaacactgcaaccaagtgttctcgatgctcttctaaagtggcactatagaccacgatatcatccaagtacactaccacgaacttatttaagtcttaaatggaagactattcacgagtgtatagaatgtagttggtgtatttgtcaacccaaacgacatgacacaaaactcaaatgtcccatattgagtaacacaagtcgtatttagttcttcgccttctgcaatccaaacctgataatagtctgatctcaaatcaaacttcgtgaagtattttgccccacttagctggtcaaacagatcaacaataaaaggaatggggtatttattgcgtacagtcactttgttgagggcgcaatagtctatgcatagtttcaaggtctcgtccttcttattttggaacaacacaggcgcaccaaatggggccctcaatgactcaatcaaccctgattctaacatccccgttaactgcctctttaactccttaagttctagggaaaacaactggtatgtcgctttagttgggggctttgcacccggcaccagttcgattcgataatcatctcccttcttgggagatagcttctttgggagttcatctggcattacatctttgtattcatctaacacctgcccaatttcaagtagagtggatctcctccactttttcatcatacacaacgggagcgatgataaatgttggcctcttctttttcaggcccctcttcagttgtaaggtcgatagaagattgacttttgggggttgtcttacttttgcgggaaccattgaaggtttcttacccatgataagtaaatttcctgttgctagaataggaatggcccttttctcacctagaaacttcattcctaataccacatcaaagtcatccatgtgaaccgctacgaggtccagttgcccctcccatccgttaatcttaatattcactttcttagccactccaatcattgccatggcctttgaattgactgctttcatgcagctcgtatccttctccagtttcaggcccatcctcttggcttcgattttggaaatgaagttttgtgttgtgccaatatcaatcaacacgctcttggcctactttccatttaaagtggcttgtaaaaacatcaatcccttcctaagggctttctttcctctcgtgccatgcttcttgagagcattcaacaatttctcgtgtgcacatagtcttcatcttcatcttcttccccacatccatgctcctcttgagaaatggatgcctttatggtacttaacttggactggtgggggaaagcagccaccctgtgtggccttacaagccaacactaagggctctccagtgtagcattagtcttagaggagaaactagattcgggagttcttatcccttcccccacttttttcccttccactacttccccaacttcttactcccaacattattggtagatggtctggggattcgacttctttgcctgtg

SEQ ID NO: 227651 - DNA, 1615 bp, Cannabis indica
aagttgagaaaaattgtggttttctggtggtgatgaaaaatggttctagtgctccaaaaaaccacaatttcaagttgacttcagctgctttttatttgtattttagcatctgcatctgtttgatatataacaaaaactcgacttgcttcaatattcctatcgttaggcactagaaaccgtgaatacttcccttctcaccactttttcctcatacttgtggtttagttttttttatctcttgaattttcttgtatttggacttcaaatatgcacttcttatggagaagcaacacaagcatgatttcagacttaacattggagttcgtacaacatacctattctgggaaaaacacgaattctagttttatattacgtctcattttaaaatggcttctcccaatcaaatagtattttctaggtgaagacgtcttttttttttttctttccaggagtaacatttgttccaacaacatattttgtgaaaaacaagaatgttttgttttatgtttttatgttggtattttctcatcaagcaattgcatcattttcttgttcttctatgttaactttttctctggtttccattttgatatgtggaaaccttatatgatttagagttttcttaattcttttgttttaggtccttgaaatttcttggtgtgctggaaagggggtttgacaagtcattaaatcttaatttaggtctttaatttttcttgaatcctttgtctttcccaatttcttttcaggcatatgcaagctaatgtttgtgtttttcttttgttcgttaatgagaatgttggccttttcacgatcattatgcctaacaatctgcatcttcgctattttaatgatcatcttcattctttgtttatgattaagtacgtgttctctttttctttcaggctgttaaggtttctgtcaactcagtcggtctaggtttatgtattattattattcttttatttgtacatgtatgtttattttttaatgttcatgcatagtttttcattattcaggctcttcggttatactgttagataagagtctttttcgagacaagaccagtctcccaaatgcaattagattgcagttttcatttcattaaacttgaaaaattcaaaatacagagtcatgggttatatacccagcttacatttcaagaaatcagcaaaaatgtaaaaattgacaaacaacaatcctgggttcgcacccctcaacgagactccatcttaacaaaatcttgtaacctcctaggcttcacgtgcacacgagtcccacgcgctcgcatacttccttcttctataccttcccgtgccatgctcgaactcgtctcactttttggtggcttttcaaatggaggttcttgttgtgaaaattgtgtacgcaagtatacgcaatcgtaacaagtaataaagtgataaatcgagtatcgtctccacagggattgaaaattggaaattaatttataaaactaattactcacaaattggtttcaacaaaaataaaataaagtgatgagaatatgtaaacaaattaacgaacacaaactacgaagaaagcaagctagaattattaaattggcctaaaagtgcaaagttgttataatggtgct

SEQ ID NO: 227652 - DNA, 1949 bp, Cannabis indica
cttgatacaattatcatcaatcctgacagaagcattgctcttgctacccatgaaagtctcaaagtgcttcacaaagtgtttaaccacttcctcaaagttatcaacaatagtatatcctttcatgaaagtggtaattctattctctattcttctttttctaatagccatatgaaaatagctagaattttcatcattgaatttaatccactttatcttactttgttgcctaagcatctgcgtatacctgtctttagctaacacaaaaacctgctgcatttttgaaacagcagtctgctagtgcacaacatttggtttggtagcagttgcctcctggataaggcaaatactgtctttagcttccttgtactccatagccagatctcaatattgttcctactaaagatcttcaacacatgcttcaatctaagcattttttgcaccaccccagcaagccctgcaccagcaataggcttgttccagctgtccattacagtttgttcaaaccctgagtaagaataccagtgattcccataacgaaatggtttcaccccaacattgttaagctcttggaaatgaattaagcacaagcagtcgttagagacaatctcccacttaaagaaatcataagtattaggaaattcatccaaccaaatgttgttggtgaaaactctatcgagtttggaaaaaatcccgtcacctacctcatgcttgttagtccaagtataaaaagaacccaaacatttaaattcctcaacttgcccataaaacttgactttgcaatgaaccaactggttgtcctcattaatgacattgagctgaatataactcttctgccaaagcagcaggattcttccagcaaccacattagtagaataaaaattccaagtaggaaaattattctccatactatcacagattttctcctgtttaatattggtttcaaataaggctccgaaacaaattttattcaatctaaaaacatcaagaataacaagtttcttgtcctttttattcaaacctctcacaattcaccctaacatattacaagcatccataaaaaaatattagagttaggaatcaaaacctcatctattgcagcagcctgcagcatttcatagccattattcctactagtaatagtaggaacttccagtatttttgaagcatcattttgtctcagcccttttcttatgggggtaatctaattactatcattctctactctatctttaccaacatctcctgcttgatttttcatcaaaaccaatctcgagtcagtagcatatgttctatgttcagccatttcccttggctctttgtcttggacaatattagtttgttgcttgtctttctctttttctttcttagtaccttgtttcttcttccatatcactttcttctttttattgcagctagcagtagtatgccccaaattagtacaaactgagcatttagttgggagccactcatactcaatcggctgctcagccaattgtttcctttcattaatgaaggatatggtctttggtggatcatgtaaaatctcaatttcaacgaggacacaagcaaacttcaccaaagatcgctcttgagaaaccttatcaatcatcaccagtttgccaattgtgcttaccaaagcattaagattatttcttccccaatattaaagccccaacccattcagccgaatccaaacaggtacataattcactatttgggcagaatcaatttcagttgaccattgtcgaagcaccacaggttttttgttgaagtgaataactccagcttcaagaattagatcacgagttgcctcatccctaaaattgacaagagtgcagctcgagtgcattcttacaatcttctcaacacccaaattgcccccaattcttttgataaatccttcaaaaaccgtaaaaggagggttaacacctaagacgatacatagaata

SEQ ID NO: 227653 - DNA, 854 bp, Cannabis indica
aattcaaaaaatgtagaagaaatcgtaatggggctagtatctgtagttatagggattgggctagattatggaattggaaaaaaggctctttgttatgctttgaatgtaacaaagttgattttttttattgctcaaattgtgaaatgaattttatgattcggtttcttatgcatcagcattgtccaccattctttatattttatgttttgaatgtaaaaaagttgagtttatttatattttcgtacatatgcaaagaatacaaatttagcccattgcaagtagtgataggatagaggtcctccttcaaacatgataaatcttcaagcaaaatcttgcaaattctttcaaaagataaaaccagaattattacaaaagagtatttgtatgtctgcaattacaggaaaaaacaaggaaaaatgcattgtaacagaaagatggctctaccagttcgctccttaacgactttctgccataacaaagtgttgtagccactttggtctttgctcgaatccttctctcgcgtgcttgagcttcctgcccactttcagctggctccttagcctcttcttctccttggttcactgttgaagtcgaaacctccacctcttggagttgagcaaaactatctaaccattctcttatcctttagtccaccaattttgtgttttgctaacattactcccctcctcaaaacacaccttgtccccaaggtgtgagatatcatcagtgtcttaaaagtggaaaaactcttccaaagtaacatcttcaggagaactacaaagaccattgaaactaatacctcttgaaatggttttgaattgatcaatttgattcgaatagccaagatagctaaa

SEQ ID NO: 227654 - DNA, 3639 bp, Cannabis indica
aaagaaaagagttagtgctccagggtattgtgctatcaagctaaatatgtccaaggtctatgatcgagtagaatggtcattcttagaaatttttttagagaagtcgacatttcatattgattgaatcatgaaaattctagattgcatctccactgtggagtactcaattttggttaatggttgtgtgtttggttctattggacttgagaggggtctcagacaattatcttcatatgttgtgtcgtgaaggcctgactgcgttggctaaaaagaattatgctgatagcttactccacgggattctttgtggtattttggggccaaccatctctcatttttttgctaatgactctcttttctttttgaaagcatcagtgttacaatgtgagagattcaagtcattattgtcttagaatggttctacttctagttagagtgtcaattttgagaaattgttaatctacattagtctgaatattatgaccactaacaaggataatatggcagcaacacttggtgtggtcagtgtggagtgccatgaaaaatatctggatcttccttatttctctggtcagaataaatctaggatgtttcattcagtatgagattgtatttggaaaaactaaataattcccttacttctaggattctaaaaggcttgtatgacatgcataagccttttggttccatgtttaaatctaaaaaaggatctttcatttggaagaatattttatgagagaatgagttattttatgctggattaatctagagagtttgtgactgtattagaattaaagtttatgaagagaattgggttttgatgccttctaactttcttatgttctcacctaacctgcttggtgaaggaagtatgatgtcctaacttagaattgagattggaaatttgatatgatccgtggtctattttctctagatgaagtttcgataattccatctattccttggccttcttaccaactcgcgacaaattgattttaaggtatgataattctggctaaatatgctttgtcaaaagttattagcaatgtttagtgactcagttatccttcttgtattcatagtctcattttacatgagataaattaatataatcagcatctccttcacattctctttaaactttacttgaaaggtggtcattggggttttcttttaaaaaaatatatttaaattatgagataattcaattttagaaatacatacttgatgatgaaacaaataatcgtaccaaaatatagatgaaaaatattttcgatttttaaaataataaaataagtactttctcttaaaatattattattttaaacaatcaaagtgcttttttacctggatgcttgatttctgataatattatgatttcttttgaaataatgcattatttaaagagaaagagaatggggaaggagggtgttatggccttgaagcttgatatgagtaaggcctatgacagagtgggctggtcttttcttgaggctatgttgatgcgaatgggctttcatagacgatttgtctcgatgattatgttctgcattactgtgagctataatgttacatatggaagtcatgttatggggcctatcttacctggaaggagtttaaggcaaggggatccattatctccttatctttttctagtttgtgctgagggtctttctgcgttgttgaaacactttgaggctactaggcgattgactggttttcaagttgctagaaatgctcctcgggtctctcatatgctatttgctgatgatagctatgtttactgtaaggccaatgttaatgaagcatccaatgtcctacaactgcttcgtgtgtatgaaatggcttcgggtcagcaggttaattatgctaagtcttccatattttttagcaagaatacgagtgtggatactcgtgcaaggttgtgtgatatgctgggtatggtggaggcttcggataatagcttttatttgggactgccttgcattatggggagaaacaaaaatgctattcttggttttctcaaggataaaatgcagaagaagatctttagttgggagagttgattcctttcaaaagcagggaaggagatattgctgaaatcagtggcttaagctttgcctagttatgctatgagtgtttttttgctcactaaggaaatttgctcaagtcttgaaggcatgatggctaagttttggtagaagtctcagtcaagtgcgcagagtaaaggggtgagttggaagaaactttgtaagcataagtatgatggtggtattgggtttagagatcaccgggactataatcttgcttttcttggcaaacaagggtggcgtctgttgactaatccaagttttatttggctgagtatttttttaggctcaagctctggtgcggaatggggtcaggagatcaattgggagaggccatgatgttagtattctccaggactcgtggttgccagacttggataacccatatgttacttcggttaatccggggttggtcaatcaaagggtttctagtttgtttttgatgggtgagttggcttgggacttggaattggtggaggatatgtttgaagctcgagatagaaatcttattgtttctattcagcttagtgctacagctgtgaaggatgattggaatgggtgtcgtgaaccatcagggattttacactgtgaaaagtgcctataaactgttgcaagaaatgtcttcagctggtgtgaatgttgaaaaccaggcgagatggaagctgttgtggcagcttgatgttcccccgaaagttcaccattttctttggcgagcgatctcaggatgccttccaactaagacacagctcacactaaacatgtgaatgtggatttgatgtgtcctttctataatcttgctagtgaatccattcatcatgttcttcttcagtgtggttttgcacaatcatgttggagagttttgggtgtcaatatggctgctggtttgggagtagacttcagtagctggttcttcaatgtggccgaaactcaaagtcgggtattggtgtgtgaagcgacaatggttggttagaaaatttgggttgcaagaaatgatgtgttgtggaataataaatcttgttcggctatggggtggttcggtcagctagagttgcccttgaccaatggaagaatgctcaatctcaaaaaggtggtgcgttgttagttaatgatattaacaatgcatgtgagcgttggaggaaacctgtgttcaatacggttaaggtgaatgttgacggagctatttttgaagatgagaacaagtttggtgttcgttgtgtggcttgtgattccaatggatgtttgattgcggctttgtctgtgagtcgttttggcttagtcaaggcggaaattgctgaaataattgggatcaaagaagccttgagttggataaagaagaaacaatggactaatgttgtaatcgaaactgatgctttggtggtggttctagctattaatagcactattcttatgccttctcagtttggattattagctcaggattgccgtgaaatgctttcttctctttctaatgtttttttgatttatgttaaacgatctgctaataaggccgctcattatgttgctagagggtcttgttatttgtcagatt

SEQ ID NO: 227655 - DNA, 2858 bp, Cannabis indica
ggtaaaatatatccaacaagtataacgtttatgtacatgcatattgttatctctaatatgatagataaatacaaatatcatgcatgtattagtaaatatgtgcatatgtgcatctgaatattttcttaccttatttcttattaattctagtgttctagtcaatctaagtggaaccctgcttgacaaatagagtccctaagtcacatcaccggtaaataggtaagtgtctctctaaaacactttctaatactaaaatacataattgaatgttttcctatcgatgaataaggtgaaaataccctaaatgtcccaaaaacacgaaaaatgagttaccacgtggatttcccaaccagtctactagatttctaggacccaactagttgagcaattcctacatctggtcgacctgttgtgcgattggttcactaactcaaaaattttcaagttcattccttccataccagtccaatcaaatcaaaactttcataacaactaaatttcaccaatataactattctagcagctcaaaacatatttaatctcaagtatcaaaatccaccattgaagagtttgagctttaaacctaaatctccatttaaacctctctaatactaactcaacagctaataaccttgccaaacaagagtttaatcattaatttcaactctaagtgcaaaaataaacctataatttaacatagcttagatcttttaactacagcttgacaaagaaatcataaggaagtcttacctcctcaataaaatttcaaattaccaaaagattactctctctaagattagattcaatactaaaatgaccatataattccctcaaaagtcttatcccacataattaataccaagaaaaaaattatcattcacctactaactcaaataatcacataatttctaattttccacaactaatacgcggtaccgctaaataattaaaaatataccactctaaatttttgccaatccaccaagttttcactattgtcgataaataacatgttaatattattatgtatacatatataattttttaaaattaaaaactaatctcatgtttgcctattttatatatttaagtcttaatctctaatttcacataatattctatacactataatgtcaattaattaataatttttcatgtctaattagcggtgattataattatctcctattaaaaagatttcgtcctccaaaatcgtacttggataattttggataaatgtcatcatgtcagactctaactcccaggtggctttctccaccttgttgtttctccagagtaccttaatcaaggctatggttttgtttctcaaaaattttttcgattgaatttgaaacattttttctcagcatggacatgtgaaatacattatcaactctagaaaaggcttgaagtaaggctagtcaatacgctacctcgccaaccctttctagtagctcaaatagtcttataaacttagggctcaacttgtcattcttgccaaagtgtttaacacctttcatgggtgaaacctgtaggaaaacatgatctcccacctaaaattcaatatttatatgctttgaatcattataacgcttttatctactttgggaagcaagcattttagctctactcttcttaatatcatcattggtctgctgcactacttttggattcaaatacatcctttctcccacttcatcccggtgaattggaaaacaaaatttcctgccatataaaatctcatagggagccctcaaaatctataacacagggtcgaacaatgtgttccagcatctatattattcttttggactggccatcactttgaggatgaaatattatactgaactttagctctatgaaaaaaaaaactcatttacatataattttgcatactaatcaactatataggttgtctaaatcggtaaaaagtatgctaacttagtgaaatgatctacaatcacccatatgaatcatataatctcgtggttctaggtaatcttataaaagaatccgtgataatatcttcccatttctactcaaaaagagtcaagggctgtaataaacccgctggtctctagtgctcattctttatctaccaacaagtcaaacaattggatacatattctattatatcctttttgatacctagccgccgatataaagattcaagtctgatacatcttggtggtaccaagatgaggtgagtaggcagtggtatgagattcatataatttccttcctgattccatcactaactggaacacgaatccaatccttgtacagaagcatcgtattctcataaattagaaagtccttagtccaaccaggtaagacttcttcctgagattttactaaattaggattttccatttatgcatatctaaccctttctaataggttatattggagagtcaaattactaagcttgcaaaacacaaactcaatgcaggtcgtagtcatttttatttctaaccgagtgattaacttggtaccaaatacctacctaggaccttttctacacaatgcatttattactacattagctttttcaggatgatacaaaatctcacaatcacaatctttcactagctctaacaaccatctttgcgtcatatttagatctttctaagtacaaaagtatttgagactctcgtaatcggtgtagattttacatttctcccaataaaagtaattctgccatattcttagtgcaaacaccattgtggctaattctagaacgtggtttggccttgtgattgtcagatattgtaattttccaacagtccttctatatagagttggatctgccaaattttccttttcatcttgtctaagctttagattagcttccatag

SEQ ID NO: 227656 - DNA, 3743 bp, Cannabis indica
tatatatatatatatatatataatccatggtctatgtgagatcatcaccaccacacaatcacacatgttgatatgagagaaagagagagagagagagagagagaaattgttagggtttgattgatgatatataattgtttgtgttgttgtgtgtcataataatggaatggtggtccacaagacatgcatggcagaagaaccaaagatcactattcactattcactactccaaaaaccaatgtacttttctccttcaaaataaatcaatatcttaattatttatagtctagtggttgacagatgacagtgtcaaaataagtcaataaaataagtcaaccttttccacatgatgatgacaactgttctccattaattaattatctccaatatttatgactgtgtttttgtttgttctcttcacttcaatttgtggtgaactcaaattttacatggcatctacaattcacatttagtggtactttgtgttttatttaaggcttttgttttacaaaatttggcatccatcaaattaaattatatataaaattattaaaaaaatattatgagattcgaactcataatattatataatatattatatattttaaataattaagatataaatatttattgtttatatagtaaataattttattaaaataaaagtttaataaaaaaaatttatttttattttagatctctgaaaaatatgagtcttaagtataagtctaatccacttatatatgagaacgatcctaattaatttagtacatatttaaattaaaaaacataatttaacacatgaatatatgtaaaattgaaaactagacataaatacttttttaaattgtagctcatgccttaattgattagctaaaaaatattgtcgatgttactgtattttagtgcatattttaaatagacgtatcataattaatgattaataattaattcaacttttgagattattattaatagtaaaattaatatacggaatattcctttattaatcaacacatttcaccatatttaattagcaatttagcatgtaatagtgacaagtttcatcacttcaaattgtttattttattttaaaataaaactatcaaattaatgctaagtacatataaaatgctaactacatgaattactaattataatgtttcttattatttatgttattggtgttttttttttttttactattattattgaaatgaaaaattataaatggtgaaagggccacttccatataatataattttgagtgttggacatgtgtttttgtcgtttataaaattatatattaaagaagtagattatgattgactctcttttagaagatatgaatctatactacataaatggtttgaataattaagatatgtttgttatatattgtacatatataattattttagttaaatttatttagaaaaagtattaataattgtgttgagaattaatggatggatttggaactttgaataggtgtgtctgctagttcgagacaaaacaagtgtgatgataaatatttatgttattgaaagaactaattaactcatgggaagtactaactatattttttttttgactacatttaatgtgatagtcttgtaattggaagctacaatgaaatcttatcctcattagagcttgtacttatttctttattgttattaggtcacaaatctaaacactactactagagctcatcaataatagagcattactacttagctaggtggcaagtcaatgatttatcagtattgttattgagcactaataataattacggtttaatattacttaaaaataatattttataattagttaataatattttttaaaagttattttattaatttatatatgattttatatttaattacactaacaacgatataatatctaagagaatgttaagcaccactgaaatcttttaacattaaatataatttatataccatatatatgaatattattactagatacaagtggtgtttagcatcactacaaaataacactttgcaaattgttaatgatatttgttattgagataaattttccctttcttgcaaaaaggactttactatagaactcgtggtatcgaaaatagcttgcaatattatgtaaaataagactcgcagtatcaaaaagacctcgcaatattagctaaaatagatcttgttgtatcaagaaaagcatacctcacatatttaatgaaactgcaatatcaacaaaaaaaagcacaaacacattgatcaacgaaaactaacggaggagcattcaaacgttaaaaatgttacatttattttataactgctataatcaatacaattaatgtgtcaattattgtcaacggtctcattatgatcgaactattgtaactgctacctactacctataagtaggagatttttcctccatttaaaggggctgagctgatctgaataaagaaaccaaacaagagatctctttcaacagtggactaagcaggtcaagccctattgaactactatattttttttagtatttcttctatattatttacatactcgcctatattatatacattatattctttgagtactcactattctaaatgagtactcgcttatttattattaggtattcaaatgatatttgaatactcgcatatcttagtgttgtctaaatttctcagttaataattttataaaagttatattatattaaattaagtgggactcaatatttaattgtaccaataataatataatgccttgaatgatactaaattagtacctttcagcatttctccatatatatcatgcaattaaattctcttgggaagtaacataagagttcaaaagttagattttgagtaatatgaaaaatagagcattgttattaggcatcagtggtgcccagtaccacgtataggtgacactctacgatcggttaatgatattctctacaaattattatcttaaattatatgagactcaatagtacttaattatatcaataacaatatgataagtcacatcactaatatcttttaatatttttttatataaatatgaccaattggtaggccgtgtcctaaaaatgttattactctagtgtttttttctttttcagtttatggcacataatgggtattttgctaatttaaatatatataaatataaatttcacttgtggagctagagcttgaataatgttggatagttttatagtagtacacaccctctaaactgactgttttggtacatttttatatctgttttgatatttaagaaatgtttcaagtccaatttgtatttttataatcgtgtacgttgtaattatttaaaattatttgtaaatttttaaaaaattataaataatttataaaaataaaaataagattaaaatattttgcacaagtaactatttttttttttttatactcgtgataagcaaaacgagttgtatttttaaataaaaatatgccaacatactttaaactttagggtttatagttattgtaagtaacgatgttctaaaccgaatcaataaatttagaatatcgtagcgtaaaaatagtgcattctattccagacgagattaagaatcgaaaaaaaaaaaaaaacttagttaggatttctaaaagaaagatcaaaatagagagataaaataattaaagaagtcaacaattccataagttttgttattgtatatatttgaaataattgaattttatttattttttattt

SEQ ID NO: 227657 - DNA, 1989 bp, Cannabis indica
ttccaaaggttaatatcctctccattaccaatgatggtacaactattttgctgtatagttcttctcacttccaaaatattcttccagataaaggaattcgaattttttggagccactgtccaaaagttttcctttgaacaatattttgaaatgaaacaattaacccaaggtttacctctttcactgccactgtccaagccaacttggaaaggagggccttatccatgtcctcaaaccttctaaagcctaagccaccatttatctttggttggcaaatttgatcccatgacttaagagtaagaaatctatctttttcaatattaccgcaccaccaatactccctgatcagtccatctaattctttgcatgtagccaacagtaattttctagagaacatattatacactggtacatttttggcaaccgattgaatcatagtagtatgacctgtatatgagagaagcttcattttgcacccttcaatgcacttcttcattttatccttcaggaataagtaatcttctctttttcttctcttgaaaagaaagggattacccagatgccattccttccccgttgcttgttggacattcaaaattcttagaagacccttcttcctttcactacgcaggtttgctgagaatagaactttcttttttttccatgctacagagttttcctaaccatattctttcgtacttcctcatgcattcaacaagaacctcgacctccttctcgttagctctagagaataggaatgtaacatccgcaaacatcaaatgcgatatgggaagggcattccgactgaattctataccatgaaagcaccccttctcttcttctctactcagtagttttggcagaacctcctggcacatctaaaagagaaagggggataggggtctccctgtctaagaccccttttcgaggaaatttttttgacagggctgccattaagtagcaccgagtaagtgactgtattgatgcaattcataatcattttacttactctcgaattaaacccatttgccacgagaactctgtgcatgaacttccactcaatcctaggctttgtgcatatccaatttaattgccatcaaaccgccctttccatgcttctttgaaatggtctctaccaactccttcgttagcactaacgactccgctatccatcttcccggaataaaagctgactaaaagggagatataagattctccatcaaaggtagaagcctcagagagatgatctttacaataattttatacacaaaattacaaagactgatcaatcataaattttccgctttatctgggctatccaccttggggattaggcagataaaggagtaattgaatttactatcaaactccccagtactgaaaaaatcttgtaccatctttgacacagacatcccgacaatgtctcaataacttttacaaaatacagggtctaaaatggtatttacttttctttttatcctaaattagtgttaattattttttttaccctttattgaaatgccatgccatcaattaaacatttaaatataataaaaagtatcataagggaaacatttctacaacggtatattgaaaaaaaaatttaacaggtcacatattatagtctcataaattcatgggtaaaaatattattttttttaattgtatttaaatctaaaatatataattcgacacttaattttggtatatttttgtattttcggctctttaataattataatcttagtttttctatataatctcataaaaaattttaaaagctcataaaattcactacgggtatttatccaatctaacctacactattttactcatagtacatctgatccgcactaaatgcaaatttattttttggattcaattcaattcgcacaatagctcaaatcaaatccaattcaatgcgcaaaagtgtagattgaatcggttattttagattgctaacttattaatattaagttatttaatatt

SEQ ID NO: 227658 - DNA, 1327 bp, Cannabis indica
ttagggattgaaagtctattccatacctttttatggaagatcagagagtcttcttggatcctatatggctgagtcataacataaactgttggactatatatactagggtttttaaatgctccttcaacctatgcctccatgtaccagaaaataaaacaattcttttaaatgttaaatattgaataccataccatcctagtaaaaagtgtgttttccacctcaatttttgtgtatataaacagaaataaaaagtaaagctttattttattttaacttttacttcatctagaactacttcaattgtcattttaagatgtaaaaagtggagcttttacttcattataatttaatttagctttcattgtctggaattattaaagatccatatccttctaatgatatatataattaagctaattataagaagatgatcctattcttaatatggtgccttaatcgagtagaataaattagagaaagtagtaagaagtcttattttcttaataattataggattatatatagttgacttgtcaaaatattaatattgtataatgcaatatagtcaatttattattattatcaataatggttaactatccacttctttaggacgatagagatttttgaatgggacaggaccaccttgacggccggtggtctttatatacatatgaaaacgccaaatatcattcttgtctctagtcggtggtctaatataaaatctacaaaaaattattactaactcatatgactaatcagatgcatataattatcatattgagaattgttaaaaagttttagtgtaattaattgatacgttgtaattaagtatcgaattttatataatttaatataataatttttaaaaaaatattaatatattaattattaaatatcacttctaaaaaaatactagacactattgtaaccaacaataataatttatcatatgtataatatgtattaattcttaataagtacctaactagctttctgagaaaaaaaaaagtaccctaactagctagtaagctagtacacaatataagtaagtactaattagtagagcattgttatttgatgcctaatatttttttgtgtgagttgtcactttataattaattaataattttttataatatttattaaagtgaaataaataagatttgatattaaattatactaataataatagagtattactattggactgcgattggttaattaacgatatactccctaaaaatattacattaattatatggaacccgatacttaattagaccaatagcaatactaccatgtaggagagtgctagacactactg

SEQ ID NO: 227659 - DNA, 917 bp, Cannabis indica
tttagtaatgaataatgagacaacacaatctcagtttgacagttttggtatttaattttaccccattagtatcttaatatttcatattgatggagaaattgaggggttttattttttaatttttttaagtatgcatacttcattagatggaatcatcaattagggtggtgtttggtcataaaataaaaatgaaaaagaaatggtagcggtaattgtaaaagtaatagaatatttttttttattcattttattatagaatcaatatctacaatgagaattattgtatttggtaatggaatgaaaattttattattttgaataaattccgttttattctattagcatgatttttcatttataaaattattattttacaaattaaataaacaaataatatatatttatgtatcaccttctaattatattttcttggatgaaattattaaataaaaaaacaaataataaaattacacataaatatttattagaagtagctatttgtttatttgatattaattaatttaatatcatccatataattttggtcatcacactctatctatataataattacgtccaattagtaaagcacggttagagtatcatttagatcagtagtagtagttactgttaattcccaataaatttataaatattagagtacttatttccatcatccatgttgaaataaggatcaatatcttaataagaatcttagaacaaatgatagctaaaggccatctctattaatgcattttctcattcttataatcaattgggattctctgcagtctattgaaacttaacaacttctcaattattttctcctctaccagagtttcctagaaaaccaacgtttaactcccccttgtgtaccaggttggtcagtacacgttaacgttctatttctttaatta

SEQ ID NO: 227660 - DNA, 2326 bp, Cannabis indica
tattttgtatttttggggtaaaaatttcaaaatataatatgttgtgatagtattaatcactgctaattgtcaattaggcaaatacgaattaatgtgtcgattaactcttaactagggtgattaacttgtttgacacatcttcattaatatattttgtcaccacatcattgtaacaagtcttattatagaattatttgttattaagcatttctattaaagtgcctaatactatactatatgttgtgaattgtaaagtatatataattttataaatagattttttttccttgtctcatgagccaaaaaaccaagtaagttttccattaatgctgttctattttcttacaaatttacaattaagaaactgaacttcaaagacgtaaaaatttagaacaaaaactctacttacactaaaaaaaatgggtaactacacaaactgttcgacgaaatgcctcaaagaaacttttcttcaaaaaaacatcaacaatctcatctcacagattaatagtcacacctctggctccattaatataaggagaaggagcaatcaactcctcaccataaggcgccgccgacgacgacatggcattgttattattccacccactgtgtctggtaggatcgtacttttcgccgtcaccccatagagcataagcttcttctccgtggaccgcatcgtctccgatcatcagctcattatccggcattcttagtggtatgaatacccttatggctagaagtatgagggttgtagaaacaaggttccatcctatcacaaaaagggctgctactaattgtttaacgaactgtaatccaccggttccgccgtagaaagcaccccgggagcttgataccggtagtattaaccggcagagctctggctcggcgaataggccggtcagaagaccgcctagtagccccgccaccgcgtgggtgtggaacactgccaaggcatcgtccacctatataaatatattgaagataatttattagcaaaattgatcatctagagtgatttaggcatcacaaggtagtgccttgatgataataaaatatacttatataataattattaaattaaaatatataaaattaaatatttaatgacaccaataatattataatatattgtgatagtgtttgcttggcataaattagttaggcttgcgcttagggcacacttagcttagaactcaatttttaatttcttttaaaagtatatatatttattttattaactttaaaaatactattttttttttctaattatgggtctaaattttatttttttcttataacacgctaaaatttagatctagccatatgtaatccacctataacaattacattgtactaattttctatatagaatgattaatccaataagtattgtttctccaagcaagttttgctgtcaattaatgttcttaaaacagaaaaactctaatttactaatcttggtataaaaaaagaagaaatacacaaagacgtgttaagattaatcatgaaaaagagatatttggggaatttttgtggtcaattcattatcacttattgacaaaagataatatattatatattcttagcacatgattaattgtttgaaaatgatcgttatggtatgatcattaatttctgagtttgaaaaagggtataccaacaaataaattgaatccttataggcttaaaagatatttactaaataaaattgaaaattagagaaagtaattattaggtacatcagacaaaaataatggcggctaatattgaatatccatctagaaatgcaataattttaaaggaaacgtaataagactttgaaaaaataattctctaaaagtggaataattaatatagagaagaagttgtagtaattattgatacatatatatatacatacagatcaagtgcacatgcagtacagttaaaaacaattggaaaaagaataaaaattaaagttaattgaataattttctaaaataatttggttcaatttaggtagtcttgagtgtatattattgactttattttttttttactttctttctttctttctaattattaaaattatcaaacaaataataataataaataaagtgtgtggagactactaagatccaattaataatacggagtttattgtattgaattggattattttatatatcatatttttatataatattatgttaagttttaatttatactaaaatattatatatttaggtatttataaaaattaatactatgcatatataattttacataaaaatattgtataaaataaaatttaatataatactatataatataatacggtgtaata

SEQ ID NO: 227661 - DNA, 1572 bp, Cannabis indica
atttaagctgaaatggatggtctagatgactcaaattagctatgtactagttagaaatgaggaatgatggttgctaggtattattttagtattttattgacttattaaatctatctatttggtgattacataactgtggggatattattgttctttaatattgatgagtggtcctgattttgttactaatatttcttattaatatcggagttaatccattacttttaaatttgtattttgtgatataaattaaatgatcatttattagctttatctatctgcaagggtcaaagtgtgacctttgaccacccaagttatggatattacatatctgccacggcctagagctcgagtcgtgacaaagaggattttcatagtaacatcaatgtataaatttttctgtgtgctttttttttttcttgtatttttattgttcactaatgtatactgtagttatagtcttatagaatcttaatttgtagctacggaatattagttttagtattatctttattattctatttaatcaattgatcattatttaaataaaaatttagcaatattaaaatagggaataatttcatttgtttgattgtaaacagtataaagacttttgtccagattatttgattcaattgaacaatatagatttctttgagcaatttctctatcaattcatttcctaattaatttttattaatttatttagtttttcaaagagtcttaagttaacacaagctctctcatttgtctccaatatataatgacactagtttagatattgtgaaacaacctcctttgatatatagcactgatcatctcagccccaaaatataatggtcaatggttcttgaactttctaagatttggaaagttgtttatttatttagaaagttaattatcccctccaatcgatatttggtgtgtcgaagacttgaaaatttttcctttattttccgtacttcagccaaaaagaaaattgttgaaaaggttttgatactgtgttgaaaatgacaagtacataagaagagagaagactttggaggctatgatcatcatctctcctcatattaatttttgtttgggtttttaggcaatattatttaaaggacttgtcagctgtgacaacacaataaattgttaaagaggccttgtaaagtgttgaagctgccaggatatcagacaaagcataatgctccaaactcttctgattactcgatgcttattttgattgacacctttacaataattatttatcactatttctctacataaataatattggatatacatatacttttgacacaaagatatatatactatacagtatttaaagatatttaacttcacatgatgtgagtcacattaattatccggaatttttatcattatcgtaaatatctgtaaacaaaactactgtactaacacaaatttaattaaaaataaaaagcacaaaaacaaaactagtactgttcaataaatacatatatgccaataataaagttaataaaatagatattaaaaaaaatggagtttgtaatttcatttgatttgattcgttctgaatagacc

SEQ ID NO: 227662 - DNA, 1822 bp, Cannabis indica
attagttagtgatattttttaaaatttattcttttaatagtatggtattaagaaagatgctagacagtaataatattttttgttttgacttcttaattaataaatgataaaatgtttgaaaggatttaaggtttgaaatgtagtaagtcctaaatcaattgaattgtattacacttaagctaccaagccttaagacaaaaataagattttaataattaaataaatgctattttattatgattaaaatctataaaaaaaaaaattaataggttaaacttataaaacttaagaggactaatttgtcattaaatttctttgtaagaaaaagttgttacatgtacactctctaaaatgtaaatatacatgatttcataattaaagaaaatgtatttaaaaattaataaaaaaaatattacactatacatttaaatacatgatttccatccctaatgagagggggttaagactagaattggggtgatacattgcgccatgtccttactccctatccaaatttataattattatttatttaaattatgatgcatattataataatagatatttcatcttatttttatttttatataaaattttaaacatataaatatatacatgatgatgtgtaaatagtgtgtatattttgaatgtgtgataatctttatttatgattttttatgaataaatgagtttttattgagatttttaaccttgatgaaaattccgaataccaccctcatttgtgactcagtgaggcaaataagagggcttaaatgggagcgggtatggggataggagagacatttcctacctcatctccatccctatttgtgaggtaggaagcattttcataattctttcattgggattcatttattgtactttcttttctttttttctaatgatgctattttcttcctctaataatctaataatgctagattttatgaagtgttggaatgttattttcaaatgcaaattgtatacattttctatttttagaatttataatgtaagaaaaagatgttgtgttagttggctatgatgttgatgttggatataatgtgtgtgtggtagtggtaccataaatgtatttaatatataatatatattatacaaaagtattgtgcatagttgaagatgaattaattatgaacatgcaatgtttcaatttcaaagactagtagtataaggcaattttgataattattatgatgttaattatatgtgaacaaatattatttcccctttcttatatgaatttgtttgaatttgtctaaatgtgtaatatatctttcatgtagtcatatataatctatcaaatttataaataaagccttaagagaaattctttagtagaagacttagattacacagttaggtcatcagtgctaattaagtaattgtttcaaatgttttgactctaaatctctttagactctcatttttcttctaattatgaattttgatctctctttttttttaaaaaaaagatatatatttatatatatatataaatttttgaatattaatattaaaagatggtcataaatcttttgaccaaactaccaaatacaaattttattacaaccattatcatcaagctaaaaatactagtgttggaaataaattaacattaaaacaactatgtttagggctattggtcattaaaatttaccattttttttctactgtttttttttttttccaattagttggtcctcaaagttttagtttaaaagattataagtgtttatatttgtatttttttttaataaaaaattaagagcaaaataaaatttatatacatatatacaaaaat

SEQ ID NO: 227663 - DNA, 2198 bp, Cannabis indica
tttccattaataagtactccatctggcattcccagatctttccctgcatccagggtctgcctcaaagcctacatttcataatgtagctaacattataacacttaatatcgataaattgcagtttcttaattcacaagtaagtttgagaaatctaccgtgtggttttttgtgtaccaatcgccaatcataatggttatatccccatctggggtgtcaaaaggaatcggaattacagctcggttgttaataataaagccgccgaaacctccagaagctctctgaaaatggagggaggggaagtagaagaaactaccaatctggtctttgacctgaaagttatatgtccagttccactttgggggaattgggcaattggtgcccaaaactccgtcttgccatgaactccttctttgttgaattccagccctgtttaaaagtgtgtccaatccataaactaactcactaaaagctataacatgtctatactatacatactacaagttctagttcataaacagtacttaataataggggaaaatcctaccatgttatgagaagactctcatccaatttgttccgaacattgacaacaacattattgtttgtagtcacgttaatggtaggaccaggaaattttccattaatggcaatgacctgcaatgtaatgaagatatagacatgaatactttgccacaaatcctcaactaattatcacattcaatcagtacaactctaaagctcaggcagtgaaaaagataagcacatttagtagatctggagctaaaagtgaaaactttatcgaatttaaaggcaacccaagtgagaaacttagctcagcattgtaaagtaaagtgtaaagagaaagaaaaaagacatggatagatccaaagaacaaacctgttgaggaacaccgagaggagaagcagtgatgtaagagacctcaaagtcatggaaaacggtgggatccgcagcaaaacacaagcttacaaataagcaagcattgatgaccacaagagctgggattaagctccctgctaaagccatttctcagactttacaagcttctgtaacaacagattcaaagcacaaagctttcttctttttagttttcacaaaaaaattctcaatatttttcttacataatcactagaaagaaagaaagaagccaagacagagagtgagagatgaagcaagtttgaaagaacggtcttttttattgttattgtttatttttaagcttaaattccacaactttatcactgtgggggcaaaagggtattgcagggtttttgttttagctaaattaataagaaaaacaaaacatcattgtgcaatttacaaacgttggttggccttcaatatctcaaacttcaactctcatctcgtcttttaaaaaattgaaaaaaaacaacttttgtcggtgacaagtcataatgcatagatatatagcacacatagagatagaaagtaaggagagagagagaaagaggatgccaggcaatagccagttcacactttctcaactccaatatcttacacacatgcaagatactcacttatggcccctcatcgtcccacccacacacgcctagtcttttaatttgactcttatctatgctctctctacatatggagcaatgcgatttcctattatgcacgttgaggtactcctctaaatgtgagcggatttttttgacaagcatgaaactggcacgaattattagagttagttccacattattaatgtgtggaaataaattgtgatatataagatgaatgtgctactcctcccataatcaattggttttgagatggaaccccattcatcttattcccaattccaacatggtatcagagctacttgtaatccgttgtgagcctaattgtcactcgtccaaaaagtcgtttgtgatccgttatgagctcaaattgccaccggtccaacaagctgtttgtgatccgttgagagtcaaagtgctgccggtccaaacaaatacttctgttgtctccctgttaacttcaatttgggatatttcggctaatgtgtgacagttttcaatattggggtctttgacctatttcaaaatctacaaatttcccgacgtgtatacccacaaatttcccaatatttggccttgtgggattctttcaaatgtcacgttcggtcatgtagtttcttaaaggtcattcgttatacc

SEQ ID NO: 227664 - DNA, 2462 bp, Cannabis indica
acagttagttagttaacatagtaaaggtttcgtttcatacattaaaaacaagttacataattttatataaaatttgttccactaataaaattttgtaggtcctccattgtatatataaacatgttggcgattacgtgtgttaaagaggaccacgtacgtacacctataaatatataaattaatagaagaaaacaagaaaagagcaatataataattatagggccaatggtcatctttgatactcggtctcatcgtgccaacacaaaaagattttgtgtgcatttcccaccaatacaaattaaaatgcaatgcctgtggttgctctctctcctttcctacgtggtcaatcaacttcattgctctccacatctatccaatatcataatattcattgctatgaagcaacaataatagtatacttaatatattttataggtaacttgttaagattagttaacaattttatttaaaagttatttttttagaaattttatgagatagatacttaattatattaataataatattataatattgatgagtatattaaacaccaataatactttttagtaattttaatagaaaaatgctaaagggcatcagtggtgcctagcaccttcctacgtgtcaatatcgctattggtccaactaagtatcaggtcccatataatttaatataatagcttttagggagtatcgctaaccaatcgtaatgtgacatatcgagaaagtactaggcaccactagtgcctaataatagcaatgctcattttaatattactactttttctttcttttcttttaaatataatttgcagaaatattatagagaaacttaaaggcgctgtgtagtattttgatattatattattattggtacaattaagtattgagtctgatataatttaagataataatttttaagaatatcgctaaccaatcgtaagacgtcacctcaagagtactaaataccactagtgttcaataacaatgttctataatttactttactcttgactttgtctattcttgttggacgttcatgtcatcaacctaatccataaatattttctctttccataaatccacttcactctatggatatattgtagtgtatttccacgtccatcaatgccacgactcatatacatggaaagtagtactatatatttaattataatgaaactattggtctacatataatacaagagtctgaaacaattattctccattctattttcttttatttataaggaatattaagagaaaatacaaatttatattatatattggtaggattttatgaaggtacgtatgcctgaaaagtgaaaaatcatatgtggtagaggtagcaggactaattaaggacaatatatatttaggattgaaagcaaataaagaccattacttatagctaaccacagtacgggcccataagttggtggctcttacctgagctatcaccaccaaggtccatttggcctttctgtgcttatctttctataatatatatagtcagcttaatagtattctctctctcttttatttttttactctttatttttttcatccaaatattgttataattttgttaagacagataaagagttagagatagctatcatcttttaattattttaattataaggcatagaattaattgcctccaaaatttttgaagatggtcaatttcgtttataccaaagaattatacaacatagaaatactaattacaatctactattataatctcttagttaacctctacgtctaaaatcacatgccgaaattattttttttcaaattttttttcataacgatattcgttataattatagtattatccctgtaaattttaaaaaatttcgaatagtaaattacttgccaaataatatgttaagtttgtgtgtaatttattataaatttcatagtgaaattgtagtcgaggcattttttttttatatatataaaaaatttcatacaaagttcaatatattcaaagatagttaaaatatcattcttgtatcaaaaattttatttttgcttatgcctctattaataatatttttagtccttagcccatttatagctctctgctgtactttttatctgaaaaaatgtggttaacttatattttcgtttaaaaaaacaaacatgtctattctcatattattttcttaacaacgaaacaagcataccacaatttaagaaaaatgtgatagaggttgaagatataaatagtcagaaattatatgtgatgtttggtaatatttttgtttttaaattttttaattacaaaaataaaagtaaaattttttgtttttgaaaaataaaaatgtgttctataactacttttgttttttaattttaaaaataaaaaacaaaagtgtattctgtaaatttcattttcatttgttgattttatttaattagtcaagtccgatggattcgaaattgggact

SEQ ID NO: 227665 - DNA, 3264 bp, Cannabis indica
atatatatatatgaataaaaaattaaattttggtataagtaaatagaaaatgattattttaattaggtacaaatttatattattgtaatatttgactcatttaaaaataatttatatttttaataacttttattataaataatttcatctcaaatgtacttttatttttattagattatggttactatttgtcctaatcacatataaaaataaaattttaaataaatatattatataaagaacatatatgaaattaatttttttaatataaattttaaaaattactaaaaccgccgaagacaaaatttattccctaataaataaataaagagcatatttattaggtaacactacagtgctacggtattacatctcataaaaggcaattgtctgttaagtaaaaaagtgcattgaactcagcattgaattaaatatctaattaatcaaaaactagcaaaaggtagttgctgaattttaatcttagagaatgatatcataaaatcttaataattacatatcaaaatactacacttaaattagttagtcaaattagaaaaagccaaatcttcttaattagtatctgtaacctattggcattccaagcttgtccaatcgaccagatcctggataagccttgttcataaaattggcttgcaaagttgacatcttctgtgttccaacaccctgatgaacagtagagtttctcttagttgaacttgatcgttcatactgagtaggcctctgtcttggagcactaagagacctcactttcgccttagaagactcggtaaacgacatgtagttcgggtaatccgagtacccattaaggaagtttctacacccgtcgctttttgttggagtgaagggacttttcctcgagcttattccaccgccctttgatgaggtggctgaatagaattgtgggctgttgttggccgtgcagaaggagctctcttcttcttccatgttattattgtcgttttgaagcttcaacgggtttagacattgaactacttcgtaggaggaaggacttggaactgtgaagtgagatgttgagtcttttgaggttgtaaaactgtgactgttttgatctgaaaagaggtttcttctcttgattgttgtgtaaggtttaccattgtctatttcgacaactctatcgctcctttcgtcgtcagttgttactgagtttcttactgaataacttcttaggtctcctgatctttcatcactaacagctgctcttgcatttgatttacagctgtttttctgtattattaaatagcatagttgtaataagataacactaacaaatacaaaaattcacctagcacattgttaagcacaattttattaatgttacaagatattcatatagatattataccctgaggagtgatgaagattgctcatgttttctactctttgttctgatatgatgttcaaatttttcaggggtagctggtccctgcaacaagaaattttttacgcatatttagcaactactttagaacccaaattaatggaaactcaagactagatttttatgtcattacattagaacccaaattgatggactttgttattaaaagcaaattaatagatagaaagaggtgaattcagaatgctttatttcacttttgtttcttggaaaaagataaaggtaaaatcagagagttgaaaagtgaggtgaaacagacatggggcatgggagaaatgttaccatttttgtagtattaaaataataaaaaacaagtagggttccttgtattcagatacataagttatgtaaatatggatagacctttacagtcataaacaaccaatctgtgtacctttaaaagtcataaatttttcacactgaaaagttttctagagtcataaagtaaaagggagccccacaagtccattagaaaactctcacttttctgtttgtctatgaagatatataagtttccaaaactatatgaatttcaaaaatcaaatattggaggcaaaagttgaaattgacttaccggatgatgaaaatgagaggacttgcaacttgaatgttggaattccaaagcttgaacggatcgactaccgatggctcgtgcctgcgcttgcatcaaagtttgcatccggttcagccattccgcggttcttttcctctcaatgtgacctcttaccaaagcttgcaacttcaccaatccttttagtgctcgtaatgcttttcttgcctaaacaaacatttgtcaccgaccaaagttagtgcattttcaaaccacgtaatgtgaaaactgttatcaagtctaaacatgatgatatgtgtgactaaaataaaagaaatggaaatggtcaatgaaccacaccctaccataacaaaatttcagctttaaatttaaagcaatgtaaccaaacatgatgatatgtatgtatgtatgtatgtatgactcaaatgaaagaaatagaaatggtcaatggaccacatcatcatcatcatgattcatcaccatatttcaactttaaatttaaaccaatgtaaccaaacatgatgatatgtatgtatgactagaatgaagtagaaattgcaaatggaccacatcatcatcatcatcattcatcacaatatttcagctttaaattaaaaccaatgaaaccaaaccatagtcatacaattaagattgacattaaagaatttattttcttgctaaaagacattaaagaaatttgaacagtaccaggcgcctaaaagatagcatttctgaacaagcatgaattgaaagcctgacatagatatcaagaagaaaatgacatttcactagttacccccgcaaggcagaagaaaattaaaatcttagaaattaaagtttcctctacatactttgaagggttgatctgaaattttaatggaacatttaagtgctcaactaacccaaatttattcttcaataaagtcaagttcacattctttttttaagaaaacaaaacccaaccctgtggctgagatgggaccactctcaagctcagctgccctcaacagggatttctaaaaacgacatggtcaaacttgcatggagtttcaaccattacaaaaaattctatagtggttgaaaatatgactcaattctcatatcatcaagtcccacgtgattagaagaaaaaaaaagtatttgttaaatactattggtacaaatttttgttgggatagtttaactcaatatgctgagaagtaaagatactatcaaaaaatggtatttttcagaatcttctaaaatcaggtgtaag

SEQ ID NO: 227666 - DNA, 5365 bp, Cannabis indica
tctctctctctctctctctctctctctctctctctctctctctctctctctagattgcacctcttttctctaaaatgggacattgagctttatatagcacaactcatacacaaggaaaggcactattttttaacagttaggatttgagctgtctaaacttaatacaaccggtattataacttaccaaatagttagttatgtttgttaactttttggagaataaacttccacaaattccacctttatccttaacaaaataacagtcctaagtcttgatatttgatgaaggtaatctccctaaatagttcagcaagtaccaatatttagtaagctaagacaatactttagcttactgaaagtgataaccttaggtcccatatcagcagagttgtcacttgtgtacaccatttccaagtttagaaccttgtcttctatcgtctcccttatccaatacaaccatatgtcattatgcttgcttttctcacggtgaactggatttttgcacatgtgtatagaagacgttgtccgagtacacaactcctttgtctttgagcagttccagcttttgtgaaataccttacagtcagattgcttccttaaaagcctcagtagttgccataaactctaactctgtagtagactaaacaactacttgttgttgctgtgatttccagctgatgcagctcttatttacggaaaaaatgtacgttgttgtagaccttctagtgtctgtattggacgcatagcctgcatcaacatatccagttaagaaaactttcccttgattactctcataaatcaaaccataattggatgtcccctttaggtatctcagaagccattctagagctttctaatgctcaagccctagatttgacatgtatctattcagcacactcaaggaatgtgcaatatttggtcttgtactcatcattgtgtacattaaacaccccacaacatctgcataaggaaccttttgcatttccttcctttcagctttagttttaggacaatgttcattagagagcttgaagtgaccatccattggaactgttgtaacctttgcagtgtccaaattgaacttcttgatcattttatcaatgtaacgtctttgtgttagcatcaactttcccttctttctgtctcttagaaattcaatgcctaggattttcctcacatgtcctaggtctttcatttcaaactcaaaattgagtttttctttgatggttctgacctttggtttgtccttgcttatgatcatcatgtcatcaacatacagcaataggaaaattatgttaggagtgtccagatccttgtagtacaaacaagctgaatcaaattttgatctgatgaacccaatctcttgtgcaaaagtgttgaatctcttgttccattgccttagagattatttcaaaccatacaaagacctcttgagcaagcataccatttctatcttgttattttccacctgaaaactaggtggttgttccatgtaaatttgttcatctaggaacccacttaagaaagcaattttaacatctaattactcaacttccagatcaacatcattctaattgtcttgtatttcaccacaggagagaaaatatcaacataatctattccctctacctatgtgaagcctttagctaccaacctagccttgtatctaggtggttctccctctaacatgccttcttttaccttgaacaaccatatgcaagagattatctttttgccttgtggtcttagggaccacaacccaagtcctattctttttcaaagaatgcatctcatcctccatagcatctaaccacttcttccctgacatgcttgctattgcttcttcataagttgttgattctagttcttcttcagattgcattgtagctagagaatatgttataaggtcagcttaagcatatctcttgggtggtttaatcacccttttagtcctatctcaagccaactgatagttctcaagacctgtctgatcagcttgttgatgtcccacctcaattttaggtacaggaaccgatcttgaaccatatcaggtagttgttcctctatgtcagtttcaactggttcagtagggtgttggccagcttgtgtttgacatgccaagcttaatgtcaaactcagataggtctggtctacttttgttgttccctgcataattagaaaacacacatttcttggctctagggtctaacttatcttccttttggtgagcataagttgtgcagccaaaaattttcaagtgcctaagacttggtgccttatcatgcaacatttcatatggtgtttcagtgtaaaaattctgtaggactcttattaatcaaataacatgcagtgactaaagcttctcccagaaactcttccccaaaccaaaactaatcaataaacacctaactttgtttaacaaagtcatattcattctctcaacaacaccattctattaaggtgtgtgcttaacagttttgtatctaacaatgtcatattcagaacatagcaaattaagttcagtgttaataaattctaacccattgtcagtcctcaacagtttcaattttctatcatattgtttctcaactttaattttccattcattaaatttcaacaatcacttattctttgttttaagcaagtaaatccaaatatgtctactgtaatcatctacaattgacaagaattaatgtttacctgaatgagtttctactttgtgagcccccacatgtcaacatgtacatattctaatgccctttttgactcttgtactacagtcttgaatttgagcttgtggtgcttccccaatatgcaggcttcacagaatggtaatgagctcgattcgaactttcttagtaaaccttgtttattcaattccttgataccttgttcactcatgtgctccattctcttgtgctacacctccttttctgattcttgatgtcttactgtgtcagcttcagaggtagagaatagtctcaacttacagtatgtataatccatttatcttctcacctttcatcacagtaagtgactcccttatagatcttcatgtggtctattttttgatttgtaattgaagccttcttcttccagcacaccaagggacaccaaattccttctcaagtttggtatgtgcttgccattgtttagtgtcctcactgagccatcaaagtgcttgattgcctccttgcctatgccaatgaccttgcaagaatttcccattacccattagaatagtaccacaagcaacctttcgatagtcaatacaatttttaagggttggacacatgtgaaatgtgcaaccaaaatcaacaatccactccctagtgattctttgatcagaaaccatgtacaaatccccatctgatgagcaacgatttgtgtcttctgtaatggatgcaaaatcatgctgctgttttttatcttacttctacttattcttgaatttattgcaaaatctcctaatgtgaccaatcttgtcacagaagtatcacttcctatccttgtggtattttcccttagattttgatcttgattgaggtctgtaataacccttgaaatgatcctcgagtttaacccacaacttcctagttgtcttcaagccttgaatctttcttcttactgtatttgatagataaattataatcgtgtaagatgccaacttttccatatccccaatctcttccttcttcagtttctcagtcaactcttcattgggcttgagtgcctttgctaccttctagtgaaccagaattcctttcaaactttctctccacaatccaaagccccctgttccattgaccttcttaagttcaaatctagccgagctactcatctttgaatcacgatcaatcttggatgagtcttggtctcttctttaggatcacaaacactagctctaatttgttggaaattttatgttaacaacaacgtcaagactcatctaaaacacacacaaattgatcaaaaataaaaacaaatcaaacaccaaaatagaattgaaattaatcaataatgaacaaaaaataaaatagaagaggtagacaagatttatcctggttctggtcctagaaatcaaatcaattcctggccatactccagttgaaagccatcatcattaatccactataaataagtttgagtaagtacaacacaaatggcagagttcttagcagaccctctgaaatcacactagaagaatagtaacagtctttcaaccccatgtgtttcccctttgagttcttagtcacaaagaactctatcactctctcactaatactctctgcctctctctcactagattgcacgtcttttctttgaaatgggacattgagctatatatagcacaacgcatacacaaggaaaggcaaattgtttgtaacaggataaacagttaggatttgagttgtctaaacttaacaaaaccagttttaactaacttaccaaatagttagttatgttagttaatctgttggaggataaacttccatatatatttatatatattctaaatttgtaatagaacaaattaactaatgatacaagttaaaaatcaggtctgaatctttttatccatgctgataattccttacttcttgcataaagcaattcagattttctcgcaaattttagactatccttgattaatttaatctcattaatgtatatgtccaattttaatttcagagtatccttggtttatttagagcatattgtaaggttttttaaaagatgatatgatccacgattgttgggtgcgtttgcattggcatgatcggtttaccttcttatgccctttatgttgggtggcgtttggttagaggtaatgaaatggaagggaatggaaatgaaacaattttcatttcattcttttgtttggttgcattttaaagtattggaatgtcattccaatggaatgccatttccaacattttggtggaatgactattctattttgaaatggaagaaaataccattctaatgtaacatgagaaaatatttgatgatttttttatcaattatttatgcattttaaaatttattccattccattcctattccttttcccattcccattcctcttcctatgttttcattcctcctaactaaacgtcagtgtttaccaatattagaataactttgttcttgaatttaattgttttacatgttcgagtgaggagttctttccactacccgattgacttttggtttagttgttgaaagaataagaagaatcataactacgtgctaacattgtggtgtgaaaaaaaaaagtgttgaggtgactacagagtacagatagacagaaatctcatattgagacaaaaaaaattctcaatccacatttagttcatttact

SEQ ID NO: 227667 - DNA, 1840 bp, Cannabis indica
tgcatatccaaacacacacatatatatataagcacatatgatacataagaacaaaatatttaaagctgcctcataattaattagaaatgattaacttaattatataaatggtgatatgaaaaattacaacgtggcaacatattaattaacttccatttgtagcttcttcctttttcatgaagatcatatcatataagattgtgagctacgtttcttcatgtaaatggtatatatgtatatatatatacgtacgatgatgacatgcaatattattaattatatctcattcattcatactgtaaaaggacgttatgcaatgattaacatcatccgcttttttggtctttctttctattcttacattgtcctattcctatatatatatacatatatatatacatatatatatatatattaagtctaatatatatatgccctgagctcttcgagccaaaaacttttactttgtgatttaccaaaacaacgagcatctaacagtactgctgttattttgcactttaagctgtccaaaatcacaggttgacacttgtacaatattagccccaatataatttaagaaataaatttcttaattagacagcaactcaagagtacttggccacataataataatagagattgtcattggatactagtggtactcatatgagttgttagcgatatttcttctttttttagtaaatatattagcaatatttcttaaaaataatttacttaaattatatatgagacttaatacttaattacaccaataataatataataccaaaaaaatagaaactaataaatatattaaagcaattctcatataaataattatatcaacaaggttttcatgacattattttagtttgattagtatttgtttgtgagtttcacttaaaatatgatactgtatataacatatacgatctatttttcactgtgaataattagttttgaaatgaaattcgtatatcttactatacgtatctacactagatcgatctcatcaaatataacttaatccactacctttctccattttaacaatattcaggtaaatctccttataaaattcgttcgtataaatgacacaaaacttaacacacttatatgttgttaggtcttttttttagcaatttagttatcaaaatatttttattaagtatttgaattgattttattacattaattttgtaactctaattactcttttttttctaagaaaagattctttctcagttgatcttttttcatttaggaaacttattctaattaggaaaggttgttgatgggtggttgaccgaagattgcattagatggtggttctctttctggttggatttcatttcggttgtgctgggttgttgggtggttgaccgaaggttgcatcaaacgaaagtttattaaattccaagaatcatggatcgtgggttgaaggtttttgtaaaaggtatttgtttaatttttttatttgggttgtacatttgtttatttggctggctgaaagttttttgtaatattgacttcgattttgctccctcgtggctaaaagtggttgttgtccagtgaagaataagaagtcgaaggtgtctttgcctgaataaaatttcaattttgacggccagaagggaaataagaagtcaacttcaagacaactgtgatgaaactgtaataaaatagttatatttattccgagccaactaatataaaaccacaaaacaactaataattacacatatttgatacaaacaatattacaacaatcgtgttttatttgttcacgtcgcgtatttaataattttgagcctttttttttataatattatgatattgt

SEQ ID NO: 227668 - DNA, 1245 bp, Cannabis indica
tagggtgtttaaacaacatacttctgagtagatctaagatcctggtaaaataaatattcccaacagatgtttactaaactctcattatccaccaaaatttgagctactatcttgttggcaatgggagtttcaattaccagcgggtcatggtgcagaaaatgcactgtccaaatatcctccttggtaaatgttattggtcggtccatgagatgaggtctctaagccgttagctggcatacttcacatatctcttcatcatggtctatggccttggcgtaccattactcattacgagtcgaacctcttatatgagggccttcggagatcatagcgactctcccattcggtctgggtgactggataggtagggcccgttgattttgaggaagtgctccctgaggggcctggacatctggagcttacaccatgcctccgggtggtacttgagttctggcttatccttcccttatgtgcgacaacgattccttatccactcatatatgtggcctatccgtattaggttctcaatctcatcctttagattcttgcattcattggtgatatgctcaaatgtcattatgttactcacatactttcctgggatccctccgtgagctgtcttggtataaaggtggtggcatccggtagtgaacattttaccttgtggccaaatatatgtgttcttgtgtatccaccagatcagtatactgagtatacttggggttatacccacacctttttggcttcttactttcactctaggtacttcttttggatgacttactcctagaagctttgggagttgcaacttcactcgctgaaagtgaaacggattgagcaagatactctgtacatgctccgaaagtggaaccacttaatggaagcccataatcagaatgggttggtgccatgaagaattgggtaagtacacaggtgttgcttgaaattgcacactaggcatgccactcgtttggggagcagtaagaagtgtgatacctgggaattgcactttagaagcatacctagagccttcggtaggatagtaccccctgaaggccattatttaggcttcttccaagttgatatacttttgggctatcttctaaaaatattgaaggctagctgcacctttctctagtaattcattccagaacggagttcctgcccatattccagcttgcaacagagctaattgttaggggagttcatcaaaccgcttaaaccgctcaaaccgcctgcaccgta

SEQ ID NO: 227669 - DNA, 2518 bp, Cannabis indica
aaccaaggttgttctgcctggttgagacaaagattttgctttccacccctccaaacaggcaaaaattttttccctaaggaaatggaaatcccttctctttttagcagtctaaaagatagggttcccaaggtacttttcattgtaaccaagtggattcatctccaacatattctttatttcttccttactcctcagctgaatatttggagaaaaaaccagcccgcttttctgtttattaaccatttgacctaaccattttttcgtatttagtaatacaatccgtaaaagccacaacattttgaaaattagctttacagaagaagatggcgatgtcagcatgaaacacatgtgtaataggaattgcattccaagaaaccttcacaccagtcaaatcccccctactttctacttttataataagtttcggcaacacttcgctccatagaataaataggcacggcgatagcggatcaccttgcctcaagccacgcttaagattgaagggagataacggagtcccattaagaagtatagaataggagaccgaagtgacacaattcataataagagtataagcatgttcattgaagccatttgccttcagaacccgaaccaaaaagctccactccaaacgatcatatgatttacttatatctgtcttaatcgccataactccttgtttccccttcttactcttgaaacaatgcaacacttcttgagccaaaatagagcattccgagatccatcgactaggtatgaaagcggactgaaaaggagataccaatttgtcgataatacctttgagtcgatccgtcaagatacgggaaaagattttgtaatagaaattgcataagcttataggccaaaactgatcaaggccaaaactgatcaaatcgactagcattagagattttaggaattaaacacagaaaagtatggtttagttttgtgcttaaagtcctcttctcaaagaaattctgaaccatatcacaaacttgagctccaacaatctgccaatatttcctataaaaaatccccgaaaagccatctgggccaggtgattttaggggatgtaattcaaaaacaacctttcggattttctcactcgagggtctcctacacaggaaagcattctcatcctccgtaaccacctccgtaaacagggtttcaagctcactgtcgattttagagtcttgagattcgtacaccttgacaaatttttccatgaagaattccccactttcttcccgactgtgtaaccatctcccatcatcctcaatgctcacaatctgattccttctccttcttatcactgtggaagcatgaattaaattcatatttttgtcgccttttcggacccaattctcccgagacttttgtttccaaatacgttccatattaaattccatttctaaaatttccaattgcaggctcgcttcatgttctaggtttttcaggagaaggagttgcattctgaattttagccaacttctctttgagcttccaaagtttagtattgcagaaaccaaaagagtttttgttccaaacttttggttccttttttgtatttgccagcttctttatcaagatctcgtcaccatttccagtgaagatgagtctccaagacctatccactaccttctcactgtctgggctagacgtccaaacttccaggaatctgaatgggtagctcaattttctcgcttcactccaaactgtcaacaaaatgggagaatgatcggaccccaaaatgggtaagtttgtcacctttgcattaggaaaatccatacaccaagaagcatccgctaatgtaatgaccgctttagtaatttggattagtaaaggcaattagcactaatttctaatattttttataattttttatggatttaattaattgtgggcccatttgtagaaatggacattagagttataatttctcaagttctgggattttatcaaactctaggggtattatttgacttatctgtgaattgtgtaatttttgctcggtgacaacggaaaatgcgatggatgactagtttaataacatgggtaagtttagaaccttatttcttagtgggatatattctggagaaaataaaatactgaggttgtgcggggttatggtttttgaccattttacccctaggtttgaaataggctaaaattaggcatcaagggtattttagtcttttccaagggagtgtcttggtggctgccctagagcttcacacctgccctttcctttttcagcaaaggattaattaggaaaatccttaaatcatttagagaaaataaggagaaaaggcaaaaagtgaaagaactcatcctttcactctctctttgttcggccaacccaaaaaaccagaggaggctcaacaatttcagtttattttcttgaaattcagcaagatctttgtgagtttgaagcaaaggtaaaccctagaatctttgattatgtgtatttaaagctttgagttggtttgagcatttgattttgaaaattaggggctgt

SEQ ID NO: 227670 - DNA, 1277 bp, Cannabis indica
acaaaaaattagtttaaggtcctgtatgtaccattctggaaaatatagtgtctattttgtcatttaacaaaacaaaaagtttaaatagtaactttacaaaacacatgatctaaaaaaaatttttaccaaaaaaaaaaaattatataaaaatgcatgcattttacaaattctaaccattaatacaaatattctacagtaattattacaatcataactatctaaaatgctttcaattattaatattataaaaataaaagtataataacaatatgggtcttaattgcactaataacaatctcataattattctaaacatcaataaaagcttttatctttgtatcttgagagagatctattttctcatccacatctatctctgtattgcccaacatgacaacctaaccaacccaccaatcaaagcattctctctctctctatcacatgaccaccttaccaaataaaaccatacactctctctccttctcttttcttggtcgaactaccaaactcatatccaacttttacataaatatcttacaaaaacaaatataattcatagcaaaatattatttttcctattagtctatttttcgtggtctaacattttagtttattttttgtttatctttttagggaatgcagcataaggtttcatttaattgatgaaataaaagatcttcaagctttcattaaaagaagaagaagaagcttgatatttttttagtacatattttctatgaaaagtattgtttattagatatgaaatgatactttacgaataattaatgatattttataaaaaattatattaaattttgtaagatacaatacttttttaaatatatatatatcatttttaataaaactaaaaatcactcataagaatgacaactaacttgggaataaaagattttcctgtatgacctagaaaaaataagaatctcgcgtaatacaataagcaaccttgtaagcagatcacttcaaaaacataaagaaacactattaaaaaagaagaatatttccagactaattatgatagttaggtaaaagtgttaatattagatcttaaaactgacatctatgccaccaatgtaaaactgagtagaataggtgtcagtggaaaaaattcgagaacgaactttctcgatcttttataactaatggctaaagtagaaacattcaggaaaaaccattttcctgtcagttttggacagtcacaagagtaaaaaaaagatacaaatttagtaaaactaaatatcaccaaaatctctgtagat

SEQ ID NO: 227671 - DNA, 4477 bp, Cannabis indica
tccatctcaaaactaattagtggaagtagtctattcattttatatatggtaatttattttcacacattaactatgtagaactaactctaataaactgaaagagcgaggaatgtgaagtgcactacccaatccccttttgtgattaaaacgaacacaccaaaaaaagtaaaaaacagtttgtgatttaaacttgaaatactaattcatagtgaagctgacagaatagtagcatcatcagttatttaattatgagcagaaatgtcataaggtgtgtacttgtgaaagaaaagacatggaaatggatttcctgaggaattcatttatatatttcaagaaatacaataattattgttctattactactttaatttggcatggaaaggtgatatgaaacggtaccatttaaagagcattgtgagttgagtggtttggggtctaatttaaaggagagatttttgtttttttcatcttatttttcagaaactaatcctcaatttctcttatctcaaaagcaaaagaagtgctgcagcataaactggtaataataaggagtgccattgagaccagcttcgagctcgaatatcctgtaaatcggaaaagacataaaaacgcctaattagcaaatgaagcaaattaaggttccaagcacatcatgaataaaccaaaaacaaaaatgaaaattttcctgaatcccaactcgagtgaaaaaacattgttaggttaaaaagaaaatacttaattttacttattaccaccatcactcattgagacaaatatggttggtcaggttcatcatgcataaaaaaaggtttcatcatatgaaagctttcgaatgttcgtacccattataccatagtacatcaaaagcataaaagacatgtctaattagtgaaacagtttaggtcaccaaggtcaagactttggatgtgcatggcaacatctgtgattggctattgttagtattggttggcattctttgaataatcaaaggacttgttggttatcatcacgaattatgatagcttacagcatatttgttctaagatttggtcgtttcaactcatttatacgtgcttacttatgtatcaagatctttcattcattattgcactgataaagctataaaattttgtcatggttccaatacattattcaaaggagatgtatataagattttacctttggagataaacgcaatgaactcgccgatgaagaatgaagcccatgaaacccaatgtcatatgaaatggtaccatcagccttgaatagtccataatttttctcagatgttggtccagtcttcaaattttcattaaatattgcaaaaatgtatgccttcacaacattcttcgggcggaagggtgttcctttcttctttgcaagtctttttcgcagattataattatatgttcttgcattaattggtgtggcaccagattcattgtcatctccatgtgaagcccaccctgtctctgttattataacttccatctttttgaatccagcatcctctaaagctgcataagcagcatcaatctgagcatcaagcatgttatcataatgaagattggtttttggatcataaattccctgtgttgactgaaaaagggcataattaatatcaatattctctgggtcacccttataggcaataaatgggtatgcattcaaacagaaaggagatccaatctcggagaagaactccagtaggggctttatgaattgaactacattgtctctgaatatacatgaagaaggagggtaagaattatcaaaaacagcctgtgaatgagcagtggtaatctgtactacatcagctaagtgaagattgtttacagctttatgtatatttttcacagcacccaaaagagctccccacattctaaatcacccccacccaagacttcatttcccacagcaattccaacaatgtgtgtctctggtaagaaagactgcacattttctttaacccaagtcaacgcgtgatcctcattcgcactcatatctttaaggaatccatttggaagtccaattactaattcaagtccagtcccactaaaggccttgagaacactgtgatctgcatcgtatattctaacattctttatcttagctgctctgagaagagtagcaacttcatccggagaagggatgttatctgcaattctcccgtaatttattccatacgttccagtaaatgcttgtgctctgtgagagactggaaaaccaaacacaaacagaaacttcaaccacaaaacaccaaaaacaacatagtattcaataacactttttctacactacaccatataaccatgggaaaattatcaaacagagattttctagaatttggtacaaccttcatcaattctctgattcaagtttattatacaaatcaatgagggacattacagtatagctaagccattaatactgaaggaatttctatttaagtaaataatccttgcatatatataaatatttatatgttagtatgcaaaactattatgacattcaacagagaaccagagaaactttggtcttgtccaccagaacctataaatatgttgagatcatttattctgtatttggtgtatacaagcatgctgacataaattagtaacttgcatttaaaactatgcagatagacatgaaaaatatatagtatacacatttaactagagcagttccattagaaaacaagttgacttcgtaggaaagcaacacagaccacaaatatttctaaactataatcattaaaatggaatagaggcaataccatgtaacccagaaaggaaattgaagaattacaaatcctatatggaagagacccagaaaggcaattacagaatcataaaaacgtatgtcgcagtaattcaaatttctcactcaacaaagaactattattcaaaaaataaaaaatccaaaagaaagtaaaccagaaagaactctaattaaaaaactaaagaaaaatataaatttaaacaacaagacccacttttcaagatagagtaaaatatcagtataatcaattactacaaacggaaaattaaaattaatatagcaacaactaaagacaaaaacccagaaagaaagttaaaaatcgtctggaaaatatcccaaacttgactactattaaccaccacaaaaacatatgatgataattaaaaataatattactcaaaacacttgaaaatcaaaatcaccataatcaatttcagtcaaagagatttagagggaaaggaagtaccaattggagtgaaaaaaagcatgaacagttgagcaatctgagcaaaaatcctcaaactattcatggctgtgaagtacaaaccagtaaaggatgataatttttggtaaagatgggaatatgggttggtgaggtggaccaaaatcaaaggggtataacggacaaataacaacaccttcaatgaataccactgttcttcttcttcaggtgtaccaccattaaacaacgaatatacaatacttttacacttttactccctctctctctttacaactcaaacctctgctctccatctccatctcttctttcttctctctctattattatatatatatatatatgctgatgctctctttcgaaagttggaaacttttctcttgcaaaagagattgtctttctgttaaaatagtatgcaagaaaactaattcaagaagaagaagaaagcaagagagtggggtttgggatttgatcgaaaatgattaatgggtcttgtataaaagagtatctgttgtaactcgtttggtgaaagctttgtcttcattggtttccttcatttatatatgtggatggagtttcgcttttctttctttttctatttttctgtgtcgactggtgttgttttttgagttcgtatacttagaccaataaatttcaactgcataaaatacaaaaaatattaaaataaaggttttaaattaaagaaactgcaataagtgatggtgcaatccccactcgcaaccttttcttcctctcgtttcaagaaaatgcataatgagtatgttttttttttaaccattttcttttacagttgttttttaataatttacagtatttatatgcttaagtttaacttttaattacaaaaaatatttaaatttaatttttagccctagaattaagatcacctgtgaaaaattggtattccataatatattaaaccaatccaaatgtaccaactcaactaattatttttcttaaatactattaaccatgtagacaatttattttttccttaaaatactctcaaataaattgatgtgtcatatttaaattgatttaatacactatgatataccatttttttaacgagagattttttattcttagtcgtaataatacattattaagtattatgtaaattgtcacttgtcaattcctgattggtccaagtcattaaatttttaatattttttaaaaaataatttaaatataccaataagaaaatcacacgtg

SEQ ID NO: 227672 - DNA, 2228 bp, Cannabis indica
accttaattaaaatgtccaacactacatttaaagtgataatttgtattcgtgagttatattcttgtcctgtcgagtgttaggtcttaccaataatatgtcaaatttaaatctcactcatttattaattatttcaaaaactaaaatctaaactcaacccgtttctaaatgggttgacttaacccgacccgtttaacttatttatataaaaaatcatttttaatttttgttaacttatcaattcattgacatatttataataagttaaacatgtttatactcttattgtatgacacatttatgaataaatatttaacatgtttgtgtcctattttactaaacaaatataatttacgtttaataaatactataaatttaagagtgtatattcttacatgtcattattgtgtcattttcaggttaaacgtgtcaacccaaaaataatccatttaataaacgagttaattgtgtcaatccaaaaatgacccaactcatttactctatgcagacattgagtcgtgttatcgtgtgtatgacccaaaattgtgttgttttataattaattagcactttctcatattatttattaaattaaaatgcgtgggactcgatattgaaatgcatcaataataatatgtcaccttttgtggtacttagcaccttaaggtgcctcttagcatttttcaaaaaatgaaaaataaataaaggacaaaattaaaatgcgtgaaagttagtgtattgcaaaataataataataataataataataatttatttctataataataatgtttaccgagattttcaaaagcaaagtattaagaacataagaaatagtaaaatgcaataataaaggagatggagatttttatgtgattcaggcgttaacaagttagtctattagcctcaaatgatatatttgatgtttttacagtgtctatgcaagaaaccctaactttgtactctttgtttctcttgaagaagaggaaagcttcgagtgattttagcagagctttggctatcttggtcgtgacccccccttcgtatggaatataagtgtatttatagtctaaaggataggtatggacatgcccatgacccgcctagggtttctgtaataagcccacaaatggggtaaaatacatgcaagagctgactgttgggccccttaaaatgatttgtgctcatgcattgaagcagctgcacaaaaggggaccaccatacgtacatggcgcgtgtcaccaaaagacttaatcttgaaaagtaaatgtctagaatagttgtctggtaaaagggtgtatggggttcgcgcactactatgttttggcacaagagacaagatctattcctatgtttgaaaaagcataatcgtcgctgggtgatccgtgtttatatccaaggtagacgtccgcattctttttggaaggtcaacatccgtgataggccattcgcttactgatctgggtatcaattggataagttttgagctagggccactcaagttcctagagtggtggtaagtccgtttctcgaaagttgaaacaatacagtatggatctccttatatccctctgtcttgacctattcccagatacgtgaagcttctccatgactcaatttaattgagggaatttaattaattagtgagatcttgagattgtatcttatgccacgtgtcacacatccatagtatgcatgtttattattttgtagcattctcaaatactttccataattagtgctttcaattcgcgatgaggtactgaggttgatagtgtaggctcttttgaacaaggttgtgttggcaaagttgttgacccttgctcctgctccacttgttttttcttacttaaattagcttgtttagctaattgtgttataagatattcaacttcaacatctttctttgcaactcttcaacttattcctccaaactcttcaactgacatactatcagatccaatgttgttacatttcactaactttcttgggaatgtcctctcattatttatagatggaacattgcgatatgagtcattggaacatttatcaaagcttttggattgaactgttaagaaattggggcactcataagcctaacattttcgcacaggctatagttttgagcatactacttgtctcatgtactattttggcttatttcttaatgcctcagttatagcagtggtggttcttatggtatttaaaccattatacatcaagaacgcaa

SEQ ID NO: 227673 - DNA, 2041 bp, Cannabis indica
ccttttcctaccaagatttaagcagcagcaagcaaaaaaaatggtagaatattttattttatttttggttgaagagtcaagggaatatgtggaatacaagttatgggcaaagaaaatcgtcaaaatgataatgcatgagcatgagagtaaagataatgatgtggagctatatattgtagtatttattaatttattagattaatctaaaatagatatttgatggtccaaagtccaaactatacattgtttccttgcatatccacatccacgtccctaccctacctttaaaccaccgtcgtagtagtgactgtggatataaatagtaatacaattatacaactcgcagtcgaagttgactcatttatttgttaactatatttattaactatttgttgggggaaaacaaatatattttaacttctttttataacatgtttttagttaaaattattgattctaaaccaacttctactaaaatataagctaaaataaaaacatttcaatctttataaccaacttagccagcgtttataaaattatccatatatacgcaaaataagagccaaattttcatatccaatactcaagagacaaataataaattcacttgattaatataataaattataaagattattatcatataactttaatatacattatgtttaatacatacatgtatcattaatttatacatatttctttttgaaaagaagttgattaagagcaaatggggaatcattaatcaacaattacaaaaaggcctaaaagtgtgcagaaataccaggccaccagacacaattcttatccttaataaataaaactagttgaggaagctcattacttaattctattagcactcttagcaccttttttttatgagaaataatcagaaatgtaaatatatacaagagttaaaaatgacactattgccatagcacactttgattcaagaataacatttgcgtaaccgagttatcattaaaaataaataaataaataaataaaacaaacaaacaaaccagcataaccgaattgcttgtagagatggctatataaatagaaccatttaacttttgtgaccttccaattaacaaaatttaaaatactgaattttcattaaaaaatgtatctcgtgattgagcatataatgacaatcccaaagttggaattggattacgcttatagcctaagctaagctgactgatagcaacaccaacatgtgactatttcatttctttttttttttaattttttttttctttaaatacaatatagaatttatgaaatgtttgtacctttaagaatattgtagtagacacctctatttattttggaattaagaaaaaaaaaataagttcaattttttgaaaaaaatcacatagtaactatttaaaattatttgtaaattttttaaaaaattaaaataatttatattactaaaaataaaatataatattataattataaactaaaaagtttttttaaagaccaaaatatatatctctatccaattaattttttaaaaaattacacagtatgcttattttttattatttattttaatttttatgttttttattactttttaatttatacttaatattataaattatatttctataatgttattgaagactctaattttaataaattatataaaattatatttaataatttaattataaaaaaatatatatctatcaattaaaattattttaatattaatatgtaataaaaaataataattctcatgtaatataaacttaagagtaatttgcggaaaaaccccttaactatcaatttacttgcaaaaaactatcgaaccttatattttggtgggaaaaccctccaaagtactgttccgtttacatttttaaggtgtcgtctgttcagcttcgttaagtcttaattttgcccacgtggcaatgacaggttactaaaaaaattttctacgtggccatattttacaaaataaaaataaaaatttaagagtaatttgcggcaaaactacccccaacctatcaatttacttgcaaaa

SEQ ID NO: 227674 - DNA, 1669 bp, Cannabis indica
aaatgaaataagataagaataatcacaggagcagatgagatcaaacccaacaaactcgtcctcacaaaacccgaactcttgtatggaagtaccaaccgagccatcaaacgcaaactcctagagtgagctacaaataagactaccatataaaaaggatcaaactttaatgaaataaacgtacccagattaccaaaccaaagataaaccataagatcagagagacccagaagctgaaaacagagtgagaccagaagatgaaagatatatggataaatcaaattatggacaagaaaattcaataaaaataatttatcgcaaaattactacttgaattaaattcataaacacaatctacaaagagtagtaatttttcgcgcggccttctcaatatgcttaaaggtttgtgttgggtaccataatgattgtagtaattgttatacataaagaattcgattatccctggaattggaaatggtcattttttaaaatttcaatgctagatccataaacccagtaagaatataacgtatcaagaaaatagttcagtgataggaatagactaggcaattggtagtttgagacccaaaaccccatacacagtccatgctcattcaaatgaatctactaagagatgcaagaaatagtaatcaaataatagctaagtaaataatcaaataagttcaagaaatcatctaagaagaagaagatgataaagaaaatactacctacagaagaagagtgcggagatagtgttcgaaagaatgaaaacaaacggaacaaagataggaatagacacgagacggaggttgctgtggcgcctgtgatggatacaaggtaacgtaaggtcgtgtaaggaagtgagtcggtttttctttaacgccggagttggccgtacgaaaaagagagaaccagagagtgagaggctcgggatagggaagggaatatggaaggaaaaagatatatataaaatttgagaaatgataaaaccaatatgtcaccatgctcaaattaagtatcaaatttttataatttattcccggtaattataatttttgccctaaattttaacatgtatcaaattatgttcttagacttttttaattgttaaaagtttctctgaactattgagattgttatatttaaggacttttatcaaatttcattcaattttactatttcagtgattgtttatgtactaaactatgctccccagactttaatatctcctaaatcatgttactcgaactttgacatgtactaaaacatgtccctcaactttcattcatgttagactttttttactaaaattggacaaaagtacttaaatccaacaatctcaataattcaggaggtatttttagcatgaggtcataacttctttgcgcaagacccttaaaattgccctttgtaagtagatcccaatcgctggacttaaaggttcgataatgtcgccagtcgtttgtagcatgtaatgagtagagttgtgaaccttcagtcccagcttcgaggggcaaaaggcaagaggactcgagaagaaccatcttcgggcgagaactagagaattttagttgatgtacagacccggtaggttgttcacatgcgctcgccatggtaggtgcagccttctctggagatttcgctagctcaaggtctttttcttgttgatagt

SEQ ID NO: 227675 - DNA, 4818 bp, Cannabis indica
tttgttagggttttataagggtttcttatgggtttgaagcccatctaaaagctcacaacccctttagaggcgaaaagaatttcaagaattttttttagtgtttgtaaaaaatcgactctaaattttgtagtagtgaaatatgatagctatatatacatcaataatgcaggcacaattttctacattttactatacaaggatgacatgttgattgctagtaagaatccataagtgatcaataaattaaagaagcttttgagcaaagaatttaaaatgaaatatcttagcaaagctagaagaattctgaagattgaaatcaccatagacagagctagaagaacgttgaagttgactaatagcaactacattaccaagatattagacatggttggtttctcaaactctaaacttgtctcaacaccaattgcacaacaattctgattatctaatgtatataatggtatgtatcaggccagccttgtgctatggggtatctttgtatgagaagatacatggggaaactagggacagaacactcgaaggcagtgaaatggatggtgagatatctccaggcaacaatcagtgttggactgatttatggattagacaatgaaagatcaagagtaaagggttatgtggattcagattgtgctggtgacctagacttgacaaggttacaataatctagttatgtttttcaacttaatggatgtacaataagttagaaagcaaacctacagtttattatagctctatccaccgtagacgttgagtacatttcatgtattgaatctgtcaaagaaacactatggcttaaagaaatttcaagagagctaggagttgaccaaagatagctcctaatctactgtgatagccaaagtgttctccacttgagtagaaatcaaatgttacatgtctaagcatttgatgtaaggctccattttattagagacatcataattaataaatgcaaagttcaattccgcaagatataatagaattagaaaatataatattctcaccaaatcactagctacaacaaagtttagtaactgtctattttgttgacaatatcgatataattgtgtttccattcattgtatttgtacaccttaattatttgtgaaaggtgaagaattgttagcttttagtttactagtaattcggtaatgttagctagtgtgcactgttagttaggggttagttaaaaccgattttggctaattaattgctttgtaaggggtcttgaccaaactcatttgacttatacatttgccagattaataaacaattgtctaagagcctcaagatttcccaagtgtgaagcacaatttgagtgctttgtgtgtgcgttctgtaagtgcatagtgagtgcagtgttctcgagtgtgttcttgtgaatatgtccctagcatgtgaagatcgagaattatcaacataccacttacaacctattctatcagtatgatgttagacaccttaaagtatctaataatactttaaaaaacaataacaagaatcattaatcttaggatagataaaaggtgacaaatacatgattattataacctaaaacatgactaacaccaatgaaaaacataacaaaaaacacattatttaataaccatatatataggacaacatcaagtgagatctaatggaaaaattacaacaccaaaggtagagacaagcttgaaaaatattaatttggaaaaatattcttcccctctctgaaccataacaacacaataacaacaacaattggagaaacttcagctatgacaaggagaaaaggttatgaaaagggagactttagggttacttctagagctagagagattgaaaatggttaggtagataaatttttagagggaaattgtaatatttaaatttatataaaattaatattagacatcatgatgatccaaatatataagacttagcaatgcgaccattaccacccttgggatagaaaccaccaggcacatgttcattaccacttccataaacaattctaagtatctccatcggtgtccttccataagaaagcgagtcttggtttgcagagagcacatttccagaaactcttccctcagcgcctagagatgttggtaccataagcccttcatctttcaaacctgcttttcccaacttgttccttagcttagaaatttgatttgtgaactctgccacatttatgttatatggcttcactatcatcttcctacgctcatatagcattgctctaatcacagcatcttggcctgattccacacccaaaagacctgctacaagctaaatcataatttcaccaattaattataaatatcaaaaatgtatgaatatatagggtaactttataatacactccctaaaatgatcgttttggtacatgctctatctgtttcagcattgaacagagctttttagtctaatttctttctatgatttgtatgttgtagttatttagagccacctatatataaattttaagaaaattctaaaatgttttagtatagaaaataagtttcaaatattttgttgcactcgttattattttttttatatgtgtattaagtaactgtttgaacttttatttcagcactgtaaactaattaaaattttctaaaaatttataagtggtcttaaaaaactacaatgtatgttatcgtgaaaaaaataaaataaactaaaaatctctcatgaatgccaacacttatagaaaatataccaaaacaatctttcaagaaatttactacaaatattttcatattatataaatacatatgaaaaaaagaaacaagtttgaaagcttactcttttggaagtagttccattgagatttgggtttgttccaacatagccagtgagtccaacataaggaatcacatatgatgctataagaaaattaatgctatttttgtaaggattaaagggaggtcttagctttctcccaaatgcactatctattacatttgcaaatgatgatgaacttaaattcaatagtggtcttgggaaccctttaactgttttttgaatagccctgcatgcataaacaaaattaacaccaacatatatatatacacaataaacacaagtaaaaaaaataacaaaaattagaacctcaagtgtcctacttcttgcaatccaaattgcaagatgacatctttagtgagagtatctaaattggcctttgtagcaccaatgggtggtgggccccctttggttaattgtggagcaactttgtccaaaccataacccaatgctccatacaagaagaattcagcttcaaaaaactcaagatttaaaggaaattccaagagatcaacatcagattttgggacagaggtcccataattattctttgatagagattttgggaggaggaggaggaagaatagcataagagcaaaaattggagtagtggccctcattgactctctgtgtatattactactcctactcatcaatataatgtattaatttggtgacaacactacggactactcatatttatatatgttttttattatcaattagtagggtttcttttttttttttttggtattgagttattgaataattgggtatatagcttaggttatactatagaagagcatctaggggtcggcaaatagtgtcactagaatttttcactttttctttgttttgtagtgattaattactttcttttatgttgctttttgtaatcctctaaagtttaagaaatgatttatataaatgtgttatatcgttgttagtacaattaaacttgatatgtaattgttattcaaaaatattcaagaaaatttactgaaaaatatgcttaacactactacaaatttttgtatataggtgtacaactaaagtcctacattagttaaaaattgtaagaatcataagtatatgaagatggacaatctctccattagtatggggtcttttggaaaagtgtctaaaaacaaattgaagagggctttgatccaaattaacagattaatgtgataccaatgtggaaataaatggtgtccaatgttctaacaattctaaatataattaagcggttgatggtccatcatatcgttttgcaactacaataaatcctagtactttggagagcttgtggctagaatatattcttacctaagaagtttgttcagagagagtaattattccaaggatcatcttcttatttactaactatattactagctcccttttatatcatttttctatgactacctgttcctttttctactatttatttattattttttgagtaacatagagttcatttttagaaggcaaaggcaatttaaaaagtagacaatggtaagccaaactatggccaaacacaagtgggtaatttaggctaccaaacttggtagcatgcatagacaatagctacaatattgagacttgttttgtactatggataatgatatgtttaattttgtgttgttgtggcttgttttgtatcatgtagatggtagttttgtttaagacatattttgggttcatcctacgtatagtgtgtaaggtagcaataacactctcagttgtaagaatatcaaatataagtttaataaaaataataatttagaatattttcctaacattgaaataaaaattctattctaatttaatattacttttatcattgaataatgtgttaattgaattttatatatataactcataagtgtggttttgcttcactttgttttgtgccttcaaaaagaactagagaccaccataactagatctcaaatttttcagaattcatcagtttgtcacaatcgtcctcctcctctaagg

SEQ ID NO: 227676 - DNA, 2794 bp, Cannabis indica
tcatgacatttctgaccactccgtcgagtttctgcggtcgccgagcctgaaaacattttatttcaaaaatagtatccacaatacccacatcatctaaataaatctccgtaattaataaattacactttaattaatcacatattaaatttacactaattatcacacaattagtttaggtaagatcataatctcaccccagtatcaacataatcacatatttaataaaatatatccaattaaatattataatatttttcgaaatattacaaaaaaaagtccctccaaatcaaacatttttttggaaggtttgccgctcttggtttccgataaatttgactctatctcaacgtggaagggccatcaatccatcttgcaggagttgttccagttgtaaagatgtaactaatttttacgggttgtggagctgtctagtgagtatggaggtgtgaaaacgttgtagcttatgggaggatattaaaaaattttgggtgcctaatacgatatttttttggaaaaattactaacaatttggacaaaggacaattttcagttcttgaatagtataaaccattgtgggtgtaaacccaaggcaggagacatctagaatggtgtagtaaattcttgaaagactatctcgacagcaatattaaagggaaagacaacaatcaacttcaaactgaagaaaattagtagccacttgtacaaggaatgcatacttttaatattgatgcaggtgcatgggcaaagcatcaaaggtatgtaggggcatagctgtgcgtgatcacagaggtattgtgagtattgcatcatctcaagtaagaactggttgaccctcaccattggcagcaaaactcgaagccattagagacagtctgcagactagaatacaacgaaggttggagagattcaaggtggaaactgattgttcggtggctgtacaactattattgaaggaggatgaaggctgctatgatacaaataatcttgttcagaaggtccgacagctgttgcgacaaaaagtgttacttgtctaatgtatattcgcaaaaatgctaatcaagtggcccattgtttagtcaattatgcattgtttatcaatgctagtactttgtggattagagttgaacttcttgtactcgtcatttactgaggcatgacttgctattttcttgtaatgatgtttagttgaatgcatgcattccattagaaaaatatatattcttcgtaattaatttttgtcaaatatttaccatgataattatacatatgcattattttaaataaattgtgattaagataaaatgataattattttagatgtcggtaaaatataaaagatgggaaatcccaattaataatcttttttcttaaacttttgaatttaggtcaggaatcatagctcattgttgtcgtgatttaggcctcatatgggcttgtgaatgcatatcatggaacatacaaaaaactccaaaatctaacttgagcatgttttgttaatagaatttaatgactacacttatcaaataataaattttataattaaaaattaggagcttgaaattatattaacatattcttagaaaatattcttctatatgaattaaggatgcaaatataacccctagaagtgtaaccctagatcatgtagacatatccataacgaaaccgattttacaaggcgaagggctgtaagatcagtcgtccatgggcgaacaatgactggttttcgattaaattggggaactccttattccaaagctaagtcttgagtcactacattattaaatttcacaatagtgaatcccccattcattctaacaatctgctgaatcccaagttttccccatttgcgtttgataaatccctcaaagatagtaaatggaggttttgcttctaggaccatacacactacaacaacactccagatcgcagcttggtccttaacctcctccaaatcaacctgtgctatttttttcctatttttctggatcagttcagtgtaggttagtttaggttcagagaacgaaagcttaccttcagtgaatttcttctacttttattgggaatttgagagcaaatcctccatgccaacctcatccactgagttcgctttctcctcgagagcctcctcagtatctgaaggtagactttgaactgcctctataatgtcttcagattgcaacgccttctctaccaaatcaacaccattcaagtcagccaattccattgaatcattcacattgtcttggattgaagggggattcacgctattcagtttgatagcaggctttcgtatcactctcttctttttcgccatggaaaagaagagctgaaaacgaacactttaataattatgtgaatttttaataataactaatttattagtttttttatgtttataatttagaattattttacttgaaaatacaaactatttatcttatataaaagatatacttaatttattaaaaaattatacaaaaatattttttatatctataaaaaaattatataattgtaaatatatttataaaagaaagaaaaaataaacactcaactcaacccttctcgccttaaagaaaaagaactgggctattccgtgtgcctaattatagtagtagcccaaacaataattagttgtgatgtagtaaaattatcatgttgcttaacaatctaagaaaaaagtcactctaattgcaaataatacattatatgtatttgcttttgaaattacctcatatactatttttttaatttttttttcaaatttacagtttgagtttttaaagtggtt

SEQ ID NO: 227677 - DNA, 2898 bp, Cannabis indica
taaaaaataaaaaacaacattttaatgtattttgtctagtttttttaaaattcaatttttaaaaaactgttttttaaaaaatttgccaaacaactttaaaacaaaaaataatttttaagttacaaagccaaagcccctaaaaattaaatatatttgcaagaaagttggtaattttttagaccaaattaccaaaaacgtgtagagttaatcaaacatatgtatatattttttttaaaaaataaataaataaaaatttactcaacttaataaatttataaaatttcttaataaatactatatacaccatcataaaaaaactagaattaaaactatttttataaaaaacatgatgatgggagtgtacaaacacaatttctatttaaatgatatacatttattatgtaatcaaagtttcatgtatagtatatgtccatattttatatgactcttatagattaaacaaaaataaaacttgcatggcatcacaaaaaatcagtcattaaacaagaatatttcaaaaactcagttaaacttcatgaatttctcaatgtcatcatgagtcaagccaatataagttaacatcatccttggccaacctaagctcaatattggcatcagcaggcaaataaaattcccatacttgttttaacacctcatcacacaccacatctttaagctgttgaaagtccagaactgatgaaggcaactccaccaatctccaacagtttttcatgtttaaattccttaaactgcgtagctgaccgatgttttcaggcaagtttcgaatgctgatgcagtctgatatgtcaagaaatgttagcttggatagggtgcagatggagtctggtaacttttctaactcaatacaagatcttagcctcaacacttgtagattgaccaagttccccatttcatcaggcagtgaagacagatcatgacaatgtgttatgctcagcttcttcagcttgattagatcacagaacccatcagacagtgtctccaaatcattgcaatagtcaaagttaatttcttctagatttggaaacacttctgatatcttgatacaactgaaggcttgcccgatttcacacatgaagagagataatttctgcagtttcttcagtacaatgtgagtttctttcagggatggaatcgaaatgcgctctagtctgattcgagtcagattggttaaggtgtcaagtatctcaaagttggttaattgagctggtaagaagctgtagtttgtgattattagaacctttagtttgctcatgtgtttcacaaactctggcaaggcatgagtcttggtttgaaaattcagaactagaacttttgcttcaggtactttgatgtcacaccaattcgatgtaaatgattcatctgcaaagataaagggaatctcaattagaccaaaccaaaaatttatattatgtcttttttgaatgagagggagagagaaagagagatcaaccagttgaaaaagctactaagtgggcattgaaaggctgatcaatttgttttttccaccactgaggaagattttctccagctatttctacaatcattcttttcctcttttctaatggatcttgcttgctttggtgtaaagctagctctctaagcataccatgctgagtaacaaagtgttcactgtagtaatcatctatttcatctgcatcttttctgaatatatattaaaaaagtaaagttagccatgagcaaataactatgctgttttgaaaatggacagtttttgaaccaagaaaagtcatgctgcatcataccttgtcacaacaatatttgcaagatttcgatcacgaagctcataaaggttagtgatggcatcatcttctgttactccatacaattctgcaaaaatatcaatgagagcagttgcagggattcttctgagttcagggaacaaaccaatatccatgaaacattccttgagaatagcatgcttctcatccaagacatctaagatggtttgcaaacaagaaagaagatcactctcagaactgagaatagatgagtcatctgtggaccatttcttaagctgtctatgccaaaatcgggggtcctgcccccttagtgatgagccaatcagtttaagtgcaataggaactctcttacaataatccactgcctgaaattcaactcacacttattaaaatcaatttgtttcttctttaatcttgtttatgcagatattgcagactgatataataatgtatgtaccttttgcagtagatcatttggaatggctgcatttccatcttcgaacgtggcataatgcaagaaaatagcctttgcatcttcatcactcagttgtttcatttcacattgatgcttaaatcttggaaatggaaccttgatgtcaccaaaatcttgtaatcaggtatttggaaaacaaacttttcaacaagggactctgatccagaccaaacatcatcaagtactaacaatacaggctcttttccaatttctctcaagagctcttccaatttgagttctgaatctttgttgtctttgaaattagatacagaatagcctttgtgctgataaagttcttgaacaataagacccaagttgggattctttgctactgttacaaacaagatgttggtcttgaatttctctacacaacaaaaaacacaagaagaaactgatcagtaaaaatcggcaaatcatataagcatactattaggatgaaacaatttatagagttagcaaggggacctagcaaaaaaactctagttagactggacttcttcatcaaaagtttcaattaactagaaaagaacacatttttgcttcaactggacttcacacagatgctgaggccattaactataaatcactaactatatgggataaatgacaaaaatgttaatgtaa

SEQ ID NO: 227678 - DNA, 2791 bp, Cannabis indica
agatattgtaaaaattatgcatcatataaggataatatttcctatctttttaatctacaaagcgacgattgaaatgaaattcacataaaaatatgcaaagcctgtaacattaatcaaaaacacaaaaaatttactcaaaaatgaagaagccataccaacaaatgagaactctctgtctccagctcgtctagcacagcttcccactcttctataaaagtagccatttcatctgcaacagccgtttccaactatatacaagtaaaaatatataagtggtgcgtaatggtcattgaatgagcaggcaagaattcaaacacagaaactaacatcatcaccatgaagagtctgtgctagttcatccctgacttcactctctactttggcaagagactccttctcgagtgtttcttgagcctctgcagcctattttaagtattaaaataatggagttagaacattcataaatatcagtatatattaaaaaaaaaaaaaacaagtatattatacatctaagcatagtagcatacatacaagcgcaaaactaaacccacaagaatatagcataccttactctcaacctccaaaaactcagcaaagagatcatctatttcttcctcagctaatggttcctgtagtggcattgcaagaaaaaataatacacgcgcacgtatcttaatcgaactctataaaaagaatgaatagtttaaccaaaaacaagtttctcctctaaaacagaaaaccaaaacagctgttttaatttttctctaaattcaaaccagttagtgagagacattcaaattataatttaatcaatcttttaaaagcataaacagatacagtaaaatggactgatttgtttcacttctctattcagggaaaaaaatgctttaatataataccaaacatgccccattgcaaatgaaacaattagtgataaacatatacgagacacttgcctcgggatgcaattcatcatcatttctcccagacgtagagggcccatcatcttccgagtcgtcaatgaaagaatcactagccgaagactcaacatcttctacctcctcatgattttcttccatctttgtattctaacattaaactcaagccacgaattcgatacctaacaatccacgtgcaagaaaagatcactaaaagcatgtcatttcaatattatctataggcgaaaactaatcgaaacaactcacatcaaattgaaataacagttagtagccaaggtaaagcaatgaaattatcaaacttttttttaaaaatatatatatttaaaataaggccacaaccaatcaaccgttgactagagctaaataaatgaattttcaagatgagagaaccaacaaagaataaattcaatatacattttcaacatactagaatgatttcaggtcctaaaatgatccacattaccagtttaactcaatccgagatagccaaaacgaagaccatccccaaaccaaattgagaatccaatgaaaaacaaggcttagcgttgcgtgacagaacgtcaatgtcacaaaaggaaattctagggtttagagacgaagtagaaggagagaattgagtgacttatagtatgagcaaaatagctaatgcatcagatacgcggagtgaagaaaagcaaaagcccccgtctgtggtctttctggtttccctcttgtgagttctccctccattttcgttttatttatttttttctgaagcagagaaatactgtggctggtatttgaatgggctcgggcatctactgttttttcccaaattctaaatccacaattactgtcgttagttgtgatcagccgcgtgtgcttactcaatttattagggcataagtaatggtatacataggtgctcacatttagtatcaatataaaggtgaagtatgatattttaacttcaaaattatttttctctttctattatctcaacaaattgatattttattattattttaataatttttctataaaaaaatataaatttacaaattaatattttactattattaagggcgcgttataataattaatttaaaattaaatagtttaattatagacaattgttattaattttatgaaggaatattatgataaaatataatttaaataaattttgaaatacttctttgaaaaaatattttttatgaaagttctatcttccatctcatcatcatcgtttagtatgatcaatccttctcttgtagtgactcgagagacagcaatatataattaaccatgggtaaatacttgcttagggaaatataatccaacatgtttaagagattgtccttgacttttatttattgtcatagcaaaacatagtgcttaataaagttgttgtctattaagcttgaatggccgttttgattcgttgggagacataataattcttggattgtgacgttttgaccgatatttgctccagaaataatgtcagctctaatggaccatttcccaagatgtgtaacaatcaatcgtgtgccattgcataagccttctgtttgacttagatttctaaggagcattactggaacaccttccttaagtcgaatatcgtaatttggtatgccattaaatttcaaactatgcaaaaattcaggtggatacaaaagatcatcatcacttgtccttacacttgctttacatacagtgtctaagctacaatatattctcccttcacctggtataacattaacaatcatttcattcaattcatggaccatatcatttttgggtgttaatattgctctttctttcaaatatgcaggatcgttgtagtt

SEQ ID NO: 227679 - DNA, 1878 bp, Cannabis indica
aatttcttctcattggtcaaggctgcttaaataaaatactgtttgtttgcgcatgcaaataaataaataatcaattaattttatatgtttacagatttaactttgtatgggtggcagagcaagtgttttatttcattaattattttatattttatttttaaaggggccagcaaaaatgatttaaatgggaaagggatttgtgtaacaaagtttaaaaagtctcaaaaataccttactgagagagggctgaactgatcttatattccatgcccaattaggccgattccacattattaaataaataatccaactattaatattcttttatttatcaaaataataataaagctaaccgcccaatttgataacatcttcgtgattgaaatgtttatctactgtatttttaataaagatttgtacttattttttttaatgtatgattaagaaccttttcagtgattagttattgagtttactttattacaaaaacaaaaatgggaacactaaatgctgacttggacgtattgatccagcaacgcatcgcccataacgaataactcgctctttagtgctaagggcaatataaatttcaataataaaaatattgaaaaaaaagtttggtacaaattttttcttaaataaaataaaataaacccttaatgccattagatacagaatcagttgagctaaagttgctttaaacaaatgaaatttaattttgaataatcaatatcatatgagaagtaggtgaagaagatgaactgaatttaatggaaattttagattgaaatggtttgtcacaattggaattggtcccgcaatttataacatcgctcagaaataattaatggctaaagctggtgaagttcttttttacggttcattctagagaaataaaaggaaaaataataatggacacaacgaagcaaataaaatgaaatattaaccagtagattgacatggaaaatcatcgtcaaatacaatataaaacatacaaaaaacacgttatttgtaaagctttggcaaccaatttcagtagcttttttaatgttgggctcgtggcccaacctaattaaggaataagggcctacagaactcctcatttgaagtccaattacaccatcgaagcaaggtcatcagaaccttcgcttagagttagagatgcctccaccatcgaatctttatctctttggttacaattctcttcaggcgtttggatggtaaaggttttacttacccattttcccccttttctcttcttattcttgattcgaagttcgctgaattttaaaatttatgtaattcacagggcaattgctgtctttagaatcctaaccaatttcatctccactggcttcttatatgggggatacgcttccgcaggagacctaatctgtcagttttattgttttttttttttttttcttttttgctgggaatttgtttggatgccaagaaattatttttctattattatttatttgcaggtttgctgcaaagtgtagcgttcttggaagttatccatggagcaattggtgggctatttatttaacttttttttatataattatttattttatcagataaagaaaaagagattaaaattagtggcattatatggtcaggtttggtgccaagtggagtggtgcttcccttgatgcaatggggagggaggactcactttctattggccattgttcgacaaatcgatgaggttcgttcatttacctcacttaatcctacgagctttggtagaggtggcgattattggttagctatattttataaagttaataataaattaaattatattagaccgactctgaattttaattatgttagaagctactacacactattattattttttagtttttt

SEQ ID NO: 227680 - DNA, 2984 bp, Cannabis indica
atgaaatttcttttataatttcatcactgattttcctttgacaataaacatgctgctttgttctatttacttttatagctagacttcgatgcttctatgctaagtaaatagaacaaagcagcatgtttatgaacaatactggttttcacattctgttttcaaaaaggctatactaaaatgatgtaccaaaatagcaaatgacgataacttatgtgtaatatagtatctgagtttgatttagacctgcataaattttctttgtaatggcaccttaatagatagataaactgtatccattatgctgcaaatgctagacttattaaatttctttttcttaccattttcctactgctttggaaggatactaaagtttatttttttagcttcaatatcagaaagtcttttttatatgtatataaaaatattcttttttagctttagtatcagaaagttcatcgtgaaatctttatgtttaacggaagcctaaaatgttaggtgctttatgcatatttggagaaatgctaaagctggctggttggaataaagacttgcgaccgaagcctcatctttttctttcaatgatgcgttcctttgctgtcaaaggagattatgatattgtaagaagtctacataagcgcatttggccagatactgccggaagaatttatccttccttccaggaagaagctgatcatcttcttatggaagcagctttaaattatggccaggtagttttcctttagctatcgtattaaattttatttttggattgtgatgaattttctcaatttctaccatgctgatttcaacaatgttggttagtttggtgcaaaaaaattgtaatttgcatgtgtgatgaagatacaatttgttggccaagctcctatgtgtgatgctgatgcatttttcacccttctcttccaggtagatcaggcaatgggtttcctttcaaaaataattagaaaatggaaaacaatatcatggacaagtagaggagggatggtatgtggtctctctttacccttcttttatgaaatgataaaatgtttaacagcaaggcaacatttttttctttaaagaataatggaatgacgttttataaaaacataacattttcacctgactcatcttcaattgtggccaaattaaaatcttgaatgcattaaaaatattccgttgatatcctgccaagcatttgtctgcaattttgtttttgagttcacaagaaaatgaattcgatattagtaatggtcattctttactaattgcacaagtatcccttcaattgtaatgcagattgcattacgaatagaagcactgtcgggagctactaaatctatgttgagtccatatctacttcctcaggtatttaaagtatcaaaaaggtttgcaagtatactcattgtgtttgtcactgctagatttgtaacatcattggttctgtttattaatatattctgtttaggtgatgctggaggacccaatcagtactttcatgataccatttgaagcagtaaaaccacttcatgagaccctgcacttgaggaaagttatcatgcgtttcttcaaggatccaatcgtacctatcattgacgacaggggtagctgcattggtctcctgcacagagaagactgcacaaaggtaattttcattttgttttcctgacacttcaaagttactttgaaacgttttatgatatgaaaatgtgctttatccaatccaaccctatgatcttgtatgtatgagtcttttcgtttttgtcattgttttggcagttagatgcaccactttggactatgatgagaagccaaccaccatttgttacaagttcgacatcaattggacgtgtcctagagttactaatagaaaagggacataaaatggttgttgttgtaaaccccaatgatttgaacaggggcaccaccaataacacctcaagtttgagggcaataggtgtttttgcatctacccaactgagtaacttgatcacaacagaatctagctctccaatggaaaaaccatccatctgtcgaagattgtaatatcatagtgactagattgtatatatgaaaatcaataatgcaggtgctccacggccgttcttttgttcctagtttgcttttagttttcttcctccataaccaccatcttcttctctacacttccctgaaacttacaatcttttccgtactggtttgatccttcatgggcaatacaggtggaaaactttcctacttggattgaggatcaacaggtctgacaccctcaatttcagactctgaatttgatattggaaatccaaagtctacctctcaaatgttttacttgcaagagttcttcagctgtactgcatacattatgggctagcaaataaccacgtggcctggtagttttgttgttgaacttgaaatatcaaatctccattctgaattgtatcttatccatgaatgttgtgtagggatcaaccttgccaaattcttttgttttgacaaactttagctttcaccaaataattttgcactcgataaccactgtacaaaatgttacacccaattctgagacaagaatcttgccaaattcttttcttttgttttgacaaactttagctttcccaattctgaatcgtattatttctaaattcccgggcctcggttagaaataatacgattaaattttatggatgcctaaaacatttttggaggaaatcagatgccacaattgaagctttggggttgtattgaaccctacttgagaaaaatttctaaagcagaaaatatgacgtaacaaggcacattgtaatctttattactggatttgttctcaagtcaaccacggtcactatgcagccaacattttcccctcgtgcaaatcttaatgatagtgggctttagaacccatgaaatattatgtgcaaatcttaatcaccaactttattttgccaaattgaatttatcattaagaaccttttgttcatgtcactttt

SEQ ID NO: 227681 - DNA, 3093 bp, Cannabis indica
gaaaattctcatctcttctctattttctttctctaaattataatattacataatactaatattttataacataaataaatatataaaaaaaaatgattaaaaagtgtttagctcactctcacttttctttgttaaatgttaaatgtagctataatttttcttagactaagaacttagctattataactaaattatacattatctattggaattcattttttacaattagctaaattgtctttatttttaacaatttacctttttttttttgagtgctctattagctaaatcattaacaatttgaagaagggagttaactccaccctccagatgatctaaatgtcattttcattttagccaactatgccttctttacatctagtcactaattatgggtgttcaaaaatattttcaaccctcaacccaaataaatcgcccaaactaaaccaataaattgatataaaacataactcgaaataacctaataaaaattcaaatcgccaatatattgggtggattaattaataatatttctaaaccgctcaattaattcaaataaacagagtaaactgatttatatatattttaaaagatgttcatagtgttagcacattacataaattacgtttattagttaacagactttatagttaataatttttgttgtatttggatattaaagttaaaatttaaaatttacaccatatcattattttttttcctatttttagatgaatatttattcaattagtatttgtcttatgttaaagttctttaaattaattcactataaattttgtaaacttgacatataaataatatacttgatttggtttgcataaatactaaaaactaacaataataattatatatataaagtgaaaatcagtttggacaggttaaaccaaccaaaccaattattggtaaattaaactttttctaatattttattgggcagctacaaataaaaattttcaacccaatatttacattgagttggtgaaaatatgctataatctgatcaaaccgactgatatacatccatactaatgacatctttatggtgcttcaagcatttttttttttttatcttgttttagtcttcttcctttgtttctctcccaaaattattttttttatctcttcctttatggtgaaaccccattgtttgagagagttggtgagttggtcaaaccagggtgcggggggggggggggctgttttaagccatatatggccttttgtaatttgcatacatggttaggaaattgttgatcaataaaacctttaggttgatgcatatagacatcttcttgtaactctccattcaagaatgcattattgatgtcgatttgctgaatttgccaaccatttgttacagcaagtgtaaagattatctgaatggtacatgttttgacaactaggctgtaagtttcaaaaaagtctacccctaacacttgttgaaaacctttagccattaatcgagctttgagtctctcaaaagatccatctttgttgtatttcactttgaatatccatttgttgtgaattattttcatgtcagatgtgggggggctaagaatccatgttttcttgttcttgagagcaacatattcagtattcatggccttattccaatgagggttagctaaagcttctttgacactctttggttcattagtatccaattgtgttgcaagatatactttaggtttatatatgctaagtttagacctagtcaccataggatgattattttgagtgatgctatgatgtgaagagctactgtcagtagtagcaggggtgtgctgaggactattattagaggcactttcaggtgagtgagatgagttggtgttggactcattgaatgaagcttgtggagagttttgaatgtgaatatctggggaggaatcactagagaccgagggggtgtgatggaatatttggattgggaaatttgtagtacgggggataggaaaagtaacaggcctgactatagttggactggtttgttgtgtttgggatttattagggaagagtttattgaaaggaaattcttcttcattaaaggttacacttctagcaacataaatccgtccacttgggtgcatacatctatatccttttgaggacatagtatagccaatgaaaagacattttgcggacttgaataatactttgtgagattcatatggtcatagcaaaggaaaacaagaacagtcaaatattttgagcatgttgtaatcgggtggatgttgaaaaagtgtttcatatggggatttgttttgaagtatctggtttggcagtcggttaattaaatatgcaacagaagagaatgcttcccactaaaaagttagaggcatttcagcttgtgcaagaagggttaagcctatgtcaacaacatgtctgtgttttcgctcaacacggccttgttgttgatgagtgtgagggcatgaatttcttttgagaacaccaagatcttgatagactttatttaagggtttatactctttccctagatctgattgtatgcttttgattttggtgttaaaaaacctttcagcaaaagtattgaactgtttgaaaatgtttgttacttcatatttagttttcatgggaacaaccaggtgaatcttgtgtagtcataaaaaaaaatgacataatatttatagccatcattagagcaataaaaagatggaccccaaacatctttaagaactaattcaaaaggcatcttggttgtattactggtacatttgaagctaaactaatgtagtttgcctatttgacaggcattacaaaaaaaaaaaaattattacatgtagagttgggaacaactatagaaagaactttatttaggacagagtgaacaggctgcccgagcctatgatgctaagtagtagaaatggtagacttatcgtggacatgattgcttgtggtagtatgattgttggcactaggttgaggattgagtgaagaggcaggttgagttggagttttggtaggatggacttgaagcttgtacagaccttcacaaaggtcagccgaagaagtacttgcctcattttcttgtccttgatgagacaacaa

SEQ ID NO: 227682 - DNA, 1159 bp, Cannabis indica
agatatagagagagtaaccggacagctaagacgtggtgtggtgtttgtggtgccggctgggcatccagtcacaaccattgcctctggaaacagcaaccttcagattgtgtgttttgaagtaaatgcagaaggcaatgttagataccctcttgcaggtatatatatatacacaattctaattagggataatgtttcggtttgtgtcgttcaatgcatgttaatgtcgtttttgattgatgcaggaaaaagaaatattgtgactgaaatggaaaacgtggctaaagagttggcgtttagtgtgccagcaagagaagtggacagagtgtttaagagccaaaatgaggaatactttttcccggggccaaggtcaacacaacaagaggaaggtggggaacgtgcttatgcatgagagatcatatcagagagttagttattgcgtactgcggagagagtatacccagtcatgaagtcatcacttcgatcgttttcagccaagccaacatataccatgtctatatatgtatatgtgtatattatggaacttagaatgtatagccgagctcgaatccagtggatatataaaagttgatgtaatgtcaactccactggatatgtctttaaataagaatatatcaatgtctttaaataagaatatataataagtttttgtcgagataaacataaaagcagactttttttttagcgtttataaatttacatttttaactacccataatttgggtttcattcaggatcacacgtatctcttatggtctaacttcagaagtaaaattaataaaaggaaattaaataagaaatatttgaagccatttaaataaaaatagagagctgttataaatattgataattatgtggatgtctaaattttttatttattactattaattgtaatcaacatttatctttttcttagcttctctttttttttgttttttaatatctcactcccctatttttataaataggggttcaccccattgaaataaacaatccagaaatttcttcttctcatctattttatattattttataacacgttatcagcacgagtctttgcccaaacttcaagcatgagtctctgcttaagacccaatgtaagtattttgttaaaattcttgaattgtttcaaagtcacgat

SEQ ID NO: 227683 - DNA, 3979 bp, Cannabis indica
ataattatctaattagagttttgctaatccatttcttaattccgaggtattacaactaccttttgcagattagacttctaactaacaaagccaccataacctgtaaacacaaaccatgtcaatggttttttggtgtccaaacaacctgcataatctgaatccacatatccagttaccacttctttgaatttactagcatcatcatgtgttagaccagtgctcaatgtgccttttatgtatctcactacccattttaatgttgtccaatgagcattccctggatttgcaacaaacctacttgccatgctcatgtcatgtgctaaatcaagcctagtacagatcatagagtacatcaagcttcctacacaactagcataaggaatcttattcattttctctttctcagcatctgttgttggtgcttgtgtgcttaacagtgtaaaatgctgagctagaggtgttgaaacaaccttggaactgtccattccaaatttgtttaaaactttctgcaaataacccttttgggacaaaataatgacatttggttttggtctttgaatatcaattctaagaatcttcttggcaacaccaaggtctttcattttaaactcttgactgagtttcaatttctacctgtttatatcagatttttatttgtcaaatgttagaatgtcatcaacatagagcaacagataaatttgatcattgtggtagatacatggatcatatttacttttagcatatctaatttgcttcatgtattcatcaaatcttaaattccattaccttgggacttgttttaaaccataaagagatttctttagtaaacaaacctgattaggatctttgctttcaaaatcttctagtagttgcatgtaaatctcttcatctaggtttccatgtaggaaggcagtcctcacatatatttgttctatatgaagctcttcctttgttgccttagccatcatgactctgatggaaatttgtttaacaactggggaaaagatctcattgaaatccacttcttcttgctgagtgaatcatttagctactagtcttgctttaaacttaattgattcagcactaggtatgccttttttctttgaaaatccatttgcatcctactaatttctttccttctggtttcttgacctcaatccaagtctttcttcttaagagatgccatttcctcatctattgcccttaaccattttagtttatttctgtcaataacaacttcataataactggttggttatgaggattctaattcttctgcaatgatcaatgcatatgctataaaatttgcataaccaaatttccttggaggtttgatttcccttcttattatgtctctagcaagctgatatgtgctcaggtcagtttgatcttcatgactttcagtttctgatctggtttcatgactttgttttgcaatttgaggatttggttgctaatccacctcaatttgcatgccccgaacagaaattgcttgttgaatatcataaagagccttggttttcatttccatctcatccttagtgaagattacatctctgcttattatacgtttcttgaaatccaagttctaaacaccatagtttataacctttaacaccatctggatagcctagaaacatgcattttaatactcttggttgcaacttatcctattttatgtgtgcataggcaataaattaaccaaagactttgagatgatctatcttagggacatgccctgtcaacatttcttgtggtgttttgaacttgtatgtaatagatggacatctgttaattaggtagcaaatacttttgagtgcctcacccccaacattttctttctaaaccaattacaagtataataggcatcttactctttcaagtaaagtcatattcatcctctcagctaagctatatttgttgtggtgttttgatcactgttctgtgtcttttaattccctccttggcatagaaatctttgaacagatttgagcaatattccaagccattatctgttccctttaatttctttccagttttattttccagcaaagttctccaattaacaaaagttttaaatgatttgtctttagttttgagtaggtacacccataccttcctactataatcatctatgatgtttatgaagtacctagctccaccaattgtctccaccttagaaaggccccacaaatttgagtgcacataagccagtttctcagttgtatgatgttccctttttctaaatttaattctacaactcttcccaaggacacactctttacaaaattcaagtttactctttaagcctcccttgaatatagccttcctattgagttcttccagtcctttttgactgacatgccctaacctcaagtgtcatatctttgtactgatctcagaattttgactcactgtaggtgaagcttttccaatcacagtcttaccatctaggtagtagagtccattgttcaacagccccttgatcacaacttttgaacctttgaaaattctgagcatttcatcttcaatcttaactgtatatctattcttgtcaaacacttcaatggacaacagatttctcttcaattctggcacatacctcacatgttgcacaactcttgaaacaccatcatgcttcaacatttcaactgagcctattcccttaacttcacacgctctgttattccctaataacacagtaccaccatgatcatatgagaaagaactacatagttctttattggggtgtcatatggaaagaatatcctgaatccaagatccaagctccatcagaagtacaactagtaattcagctaattcatagccatcttttatatcagcttctctattctttcctcaatttttctctcttcttatttttgccttaagtgccaaacaatcatcacgtaaatgaccttctttcttacaataataacattgcttacctattgtggcctttgtcttgaatctgtcacctttgtctttattattattgtaagaattcttgtgtcccttgtattctttattctagaatctaccttttgcagtccataagccatcaccattgttgtctacatgatcatctttcctttgaatctcttttgaacatagtccagtcttgacttctgtcattgtcaagatgtttttacattctacaagatggtattcacaaaatgttcatacatctttggcagtgaacttagaagaataatggcttgatcctcttcttcaatctttactccaagattattcaaatcaacaataatgttgttataatcatcaagatgctttcgaagctccttagattcatccattcgaaaagtgtataatttcttcttgagatacagtttattagccatatactttttcatgtaaattgtagccaacttattccataatcccagtgctttttcttcactcaaaacctccctcaaaactttatctccaaggctgagtagaatagcactgtgtgcttttgtttcagtctcagatttcttctttttgtcatcgatttccttcatggcttcttcatccaaagcttcagaaattccctgatgaacaagaaaggctttcattttaattctccacaagctgaagtcatttgagcttgagaatttgtccgtttcaaatctggttgatgtcatcttgtgataatcttgatttcttgcacttgattcttgaaactttttcccgatctccctagtgctttgataccatttgttgtgcacttaagcactaataaggatgcaagaacaagatagaattcagtctagaaacataaaccagtaaactagtaaaccagaaatgaaaaatgaacaacaattaacgaggttcaatcacaagttttggataaaacttggacctaatcccaggcccggccttgcagggcataggtgggctaggcctatgcttagggtccacctagcccaggggcccaaaaaaatatttctctgttgaaattatacaatttttttac

SEQ ID NO: 227684 - DNA, 2070 bp, Cannabis indica
ctgttgtgttttttgttaatgtaaataataaaattatggctcctttttcaccaatttattgtatagtttggtcaagcattttttttttctggttgagtaatacataattctttttgataaatttgtcacatggtgcatggtgttgtcactggtgtgtattttactgaacatatgtaaaaagataaaatgaagatattcttgcatctgcgtggttcaaaatgaattcggcttgtatttttaatggctgtctcactagaaagttatttgatgtttcactatgaagttgttgtacttgtagataggatttcaataagtatagctggtattgttctttaagacaggaatttccaatatttcattttttggaaaaagaagggaattgtgggtagtggctagcacaatacagttcttatagattctagggttttttacatctgcctttttgaattatcgtagtaaatgaacttctgtatttcagttacagtatctattgaggatttagtttctacccatattgatttttgtcaattttagacaatccagagtcctatattttcctctctgtaccagttgaagacttttgacattattaaacttaaatttacataacaatattcttattcgcttctatatcttgtggatggtcttatttgactagaatttggtgttttgttttagtgtaatttaacattttattcttaacaatatatatgatgagatgatttgtattgacttttatctttacctgtttgctctgcttataataggaatattagcatcggtaacatagccaaaccttttccatactaaatttgtagtgcactcatttattatttatttatgttttggaattattttcattgttgtcatcaatgtatgtgtagcctgatagggacattctatcctccttaggtgaaatttcttatcttaaaagattagatttgacagttgtttatcatgatattgctgcgttactttcacacaattggagtttcattaatttcagttgcagttttttggtgtttgcatgatgagtaacagtctcagcacttttagcaattttataagaattcatgcatgtcatatgttgcgaaaatatagactatagtcaattatctatcttcacaaggaagtgattctaaggtttcttctgtattacagtgtgatggggatggaagttacagatatttgcatggacaaggagtcagaatgtgtcatcatttatccaaaggatgcttccccagattcagatcatgaatcaattccagctgataatgctattacagagtcatgtgtggacataaatggagaacatgaactcaagaatttggaagagaaaaccgaagtgaaggaatatgaagtgaaggagtgtactaacgaaaataattctgaattatgtgacaatgaaagctctaatgaggaaccaaatatagtaagctctgatctaggaaatgaccaacctgtggagaaagctcatctggacagtgagaaaacgaaagatcaaaataaatcaagattatctgtaaattgtgcatctaaaactgttgctggaaatgttaaaacaaaacatactattcctcaaccatttgctctagcaactgaaaaacgtgcttcaagcggacctcgtcctgttggtgctgtacctgatgctggcaatggagtgaataaatcttcaaacacaaataatcttcatcttaatactgtaaagaagaatcaggtaaaaacaaaaacgaggcctttgctttagacttgtgatatggtttttttttctttaaaattataattttgccactcaattacactcactcggcacagcatgacagtctttaatcagggctgcatcgctcttcattttagctgttttataaacctggggtccttcaaaaaataaataaataaacctgggattgaacatctaaccaaaataataatagtaatctggattctggggtggaagtcgttcgtaataatctttgatacatgagattttcttatcttgaggcagataaggtatcattgactgacttttcctttgacatgattacatggatttatccaccacaaatattt

SEQ ID NO: 227685 - DNA, 1920 bp, Cannabis indica
ataaataaaaattaaaagacataattttggctgtaaatagctggaaagagatgtttatcttctctcattaccataatattaatacatatttaattaataataataattaataactattcttactctctcaacaaaaatttacatttcccgaaaataaaattaccaaaaacccctccaaaacccaaaaacaacaacaaaatgagctaaaagaaagaaaagcccttgatgatcagttagttcactcacttcacctgatcacgtgatcaaaaagaaaggtgaaaagacataaatgccctttctcttgaaaaagaaagaaaaaactcactcttcttctctgttttcatcatcatcatgatcatggtgatcatccaaagcttgatgatgatcatgatcttgtttaactttctcatcagaattttctttctcttccattttctcagttttttcttcattaaaaatcgaaactttagcaaaaactggagtagccaaaaaacttggtttttcatcaccagccataatcaccaaaaacttttcttcataaaccttaacccctttaacggaatctttctctccgtcaccggaaccgttctccaagtctctgttatcatcacgttcgccgtcattattgttttgaccgttaagtctccaataagaacaagccaatatcaataacgcaaaagcaatcaatcccaacatcgctgccaatcctccgaacaggtacggaaccggcgagtgccacggtgatctctgaccctccacggtggccgtcgccggagaaggtgataaaccagtggaactgattgttctcatttttttccgttttgaaaacgggtctttgtttagttatggcgtttttgaaaacggttttgggaaaggagaaaatgagaggagatggagaacaaaaaatggtgttgaagtttaatttatagtgagattttatggggtctgtttgtttgtttgtttggttaattgaattcacgtgtttggctctgttttatggttgtgagatataataatcctctgtttgttttgggactgtttggttacggccaataggggttcgttgcgtggttataaagaaaaacccgacccggttgtgtttggattttttgaccatgtatcacgttaaaggctatattataggttaaagattttatttttggctaattaatatttttacctctaagactttgacatgtatcaaatcatgttttttgagcttttaaagtcgttaaaaatgtcctctgaactattgtgatttttggaattaaaattttttgtccaattttagtaaaaaaaagtctaatatagatgaggtatgatttagtacatgtcaaagttcgagagacatgatttggtagatatcaaagtttggggagcatgatttagtatataaacaattactgaaatagtaaaattaaataaaatgagacaaaagtccttaaatttaacaatctcaatagttcagggagaatttttaacggccagaaaagtttagggggcatgatttagtacatgttaaagtttagggaataaaaatgttaattatcctttaattttattttttttgtaaaaacttttttagactttgtgttttgtaaaaattattgattggactatttattttgttaaatgataatttagccattgtattttttaaaatgtgtacaaaatagactctgaactcaatttttggtaatttatatttccagtataattaacctgaagccaatatctagtacgaacaaatgtgaaaattgcaatcaatctagtactaacacctccagttcagattactattaagttttaattttacgaaaaattaaactcagggtctattttgtaccatttgtataaacacatggttgtaattgtcaaatttacaaaatagcagagggtctaatcagtaattttttacaa

SEQ ID NO: 227686 - DNA, 2755 bp, Cannabis indica
gtcgaaaaaacatccagagaccaacggtttgttgatgtcaagatcaactaaaatcttgaagaacgtagaccaggtggctggcttgtcctccaccatttctagattcagtactttccccaccagccccccaagaagaagcccattgtctttggagtaaaattcatgaggaagattatgaacttggacccaaactctaagagagttaaataaaatcgggccatccactctcggagaccaatcttgcagagcaagagtataccctcggatacaccaggggccgttagagatagcccagtttctatcttctatgttatcaaatccaaacttgaacacattggatgtcttcaagtcatcttccaatactataacactcaccggtcttttccaagttttcgccacaaattcgagcacggtggggatatccacggacatgggagcaataactttcccatacagcgaagaagcagctaaagctcgaaccgaggagggacacggagagagtttgatagatgtttcaaggcatgaaaaattcttacccttgagaggagagctggcgacagtaaaagactccataatgatcagcagacaggggacaaaaggtccaagaaacagagcaataaatgaactgcaacaggaacaaatggacactcaccaacccaaacttacctaacacttaacagaaaataacaaactcctagaggcaacttatcaagggaaaacttaaaactaacactcaagaccacacacgcacacagtagccaaagggacacacaaaaactcctgaaagaaaaagcaaaagcaacgaaacaaaactcagaagaaaaggggacagggatgacacgaaggtaggcaagcaaaaacaggctgactcaggaagaaggagactcaggaagaagagaagggcggttgactctagagagaaaatagaagaccttctctcatctaccgtttttgtaatacaaattcttgaactaactaagaaaatacttttattttaaagatatgagatattaaacattaaatcacatggagatgtgatcaagattaacgttgatgagacgctcttctctgcggctaacacttacagttttgttggtgtcgcacagacttctacagggctggttttttgaggatgttagcctgttacatgctgcagagaaggctttgtatcgcttgaaatcgaagaggctatgggtgtacaggaagcgttaagttggatcaaaaagaaaagatagagtcgagtgattatcgaaacagattatcataccgtggttcaagcattaagaagtttaatttggatggtgtcctattttgaaaccgtaattgatgattgtaagatattgttgaattgtgttaatgatgtgtctattttatttgttaaacagtctgcaaatagcattttttattttctagctagaactaaatatttggttgctgatcgtgtttttaagagtgaagatttctctcctaattttttttatgcaatcataaagaatatttgctaataaagcttctacttttttttttttttttttttgtaaatcagtatttaaatttaatttttattagtgttatattttagaaaactatgcatagataaccgtaaaaatattaaagctaccgcaccatattattggctaaatatttttcattagctagctcgtctttttcttttaataacatgtatataatttctaattaaaaaaattagtttaattagttaattcccttattatgtgtttatgtttgattaattttactttccactccattttattaattttagaattatgattttttagttcctgacctttttttttttttcgctaaacaagaagacaaaaaacgtacaatttcattagtatttatttattaattattaatttataattaaagtgattagtaatttattattattatggtaattattaattaattaatctaaaccagcaatatacctggaagaaataggtgccgtagctacggggttcctcaatttcacagtaccaaaaaattgtcgtttactgtgcctgttaatatgaaattaccaaactacccctgaaaacacaaactattctctcatagtcgtcgtgtccgtttcagtaaattccacaacagtacggaggtaaagctacgtagtaaaaaaaatatctttcccttttaaaaaaataaaataaaaaataaaaaaagcgtgcgaccgcgggatcagtaaaatatccaccaataatattatgccacgtcatcgaattgctgcatgcatcaacattcatggttcatacacataaatatgtttacacattaaataaagatctcttctcttttcttcccctgaattttcttttattacaaaagtttctttaggactattaaaattgttgcaaaatagtcctctttaattatattaaaattatttttttggctagtatatgttactaataagttatgaatataacttgaataatccgactactaaacaatattagaggacgttgtaagatcgattttcgttaaaatatagactataacatcataatcttaaggataatacaaaaaataaacatctttaaattcattgtaaagattatctattggacaacattgttccatatggatcaatgatgaaatattgagctatatgtaagagtatgggctacgctacttattaccaatttgttttgatatgaaaccttatggttctcaacatggtatcagagtcacatctccctgtcaggctgtcgatccaacaatccatttt

SEQ ID NO: 227687 - DNA, 7836 bp, Cannabis indica
tctcttaaggcaagctaacgcagccaccacttgctttacccttttgaagattcgaattctcaagctgcacaaaaaacacatcttttgaaaaaagttaacaaagaaactctagtttaacccttgatatttttctccattgataagaactataattggtgattccatttttgtttaaaactcaattttttctatgttaccttttaattccatatcaagaaaattatgattagatcaaactaaaaaaaaattctagcagctatattcagtattctatatgaagttcatgaaaattgttaattacaaagctctgcattacttttgttggaaaagtaaaaattagtgtccatcatcagaatcgttttctgcagcattagaccatgttggaatgaaccaacctatgaaattaaaagcaattgttaaagataaatataaacgaatacaaaaatattggaattttaacactatttaaagtcaatgcctcgatctcactttttgatcgggcttctgggcagtatcgacttcttttgagatttggaaaaaggaattatagataaaaataaattggaaatttaaccccgttaacttcaaaaaaaaaaaactattattttttgaataaaaaactttttttaaaaaaaagtcacccactaatagtaattaatttaaggaggaatgtgatttatattagtttttttttttaatagaacatattggaaaatagtaaattaataattaaaaaaataaatagtaaagctttacactcttcaaaattgtatttgaaagtttttaataataaataattaagaaaaataataaaataaaactttatttttaacaaacattaacataaaattttgtttaattagtatttatgatttagtatatgtgattttaatatatattttaaaagtatatgttttttttttttgaatttatataaatatttttttaattaactaattaataatatttataaataataaaaattaaaaaaatagaaaaataaagtacagaccgtctcgtatctcttttttatataaatatacaaataattaaatatatagatagactattgtgtggatatttaaaattttattttagagtaattaaaaaattttaaataaactaattataatcaaattaattgttatgttttacttttattggatttttttttttaatgaaagtacttaataagatcttacaaaattaacaaaaaaaaattaaatcgaaatatataaggttagtattgaaccacggaaacatttttgaaaaaagaaaagggtattaaaagtttggtaggaaggaagagacatggtgagagagagagagagagtagttataaatagtgaaaatataaagatgaaaatcaatggaggaggaagggggaaagggctcgaattttactgggattgtctcccaattgtgaacccaatcattctcagctcaaagcagcttacagaagaaaggtatgggagtctcatcctgaccttttcccacctcatctcaagcctcttgctgagtctaacttcaaatcggtacaaaatacaaaaccctttttctctttcttcttctctcttcacaattattacatattatcaatctttaatttcattgattctgcttcatctagatttcagaggcttactctttcttgctctcaccctcaccaggtatacatacatacacacacgcatatatgtatataatattgtatgtttggagattacaactgctttagtttgtcagttgatggtagttattatgtatatataaatttatttataatcttaatataattctttttgaggtcagacacataataattttattagacaagctacatagtatgatatttttatgtggaagagagaaattatttgttttttaagcaaaaaaaaaaagttgggttcagaatctgtgttcaactaagctgtatgaactatgtatatagttgggttgtgttgttactaggtaggttggaaaagttcttgattcgaggatttccattgatattctgttctgattagttttcttagtgaaagggtttgatcattgatgagggggagtttatatgaactatggtcattaaaggttgtcttgagttttcttggttctaaagttgagttgtaaaatatttttatagtatataaatgtaatattattatgtttgtggtttttatattggtacataaatataacatgtactagtttgtgttgataagagtttgtaggtaaaaggggaagaagaagatatgataggggggttccaattccaagggggacacaagggagacatcatgctttattagttcaattcccattcctatttcttgtactgggaacacttgcactaggaggcttcattggcagcaggtgagtggagtgaccatactgtttgtcttgttattttctttttgtttcttactaactgtcaattcccccattgcattgtattgcaatgtttgtttaccagggcttacacaaagcaaaaacaatcctacccctctcacaatccatttcttccttgatacacatctttacaaactcaagtaatccaatgattttaattgccaaagctttagtataatttctgaagctaataatgtaattgatcttatgttattatgtctggagcattgttatggcacagttcaacactacgtgatgtaaattggtgcaatttaaaatcaattatgtacaatctgatattaaattatatcaatcgctgtttgtcacataaaatggtaatagataccatgctgcctggtatgtgttataagtttgttgcatatcataatattattctttgttttagtttctttttctaagacatcgttgagaaaagaaaagaaactagtgtttgtttggttggagtttttctcatagattttgaaatacccaagctaaacttgggagttgtttgtttagttggaccctatttggtaatccaatttttctccaacttaccatctattttaaggtatccaattcaatcttaagtaatatgagcttgggtatttcgattcactctctacatatgtatgtaataattaagaatttaaagatctaaaatgatagtctgatagtatataataagtgtgagtgactttcatttttcatcctctattttgtggttactctctttcaatatcaatcagacctatattctctcgcacttttggatttgacttaatcttttttattttcactttttattcctttttcattttctctctatttttacctctttttttttctttttcttctttggttactttctctctatggatgtatgggttgtcaagtagttagtttatggttagtgttagttaggatttatgttgtccaactgtcacatttaactaattattgttataggttagttaaagtttgtgcagtctgtatcttgtatttttagaactactgtttatttatatcagtataatgagattcatttcaatcatttcttctctttcatcctctatttttatattcaacatggtatcacgagcaacttttttgcttctgccattttaccatctgtgattgtgttttgcaacttttcctctttgtttgtttgttctttgcttcttcgttgcatcgatgactgctcaacctactcaagcattcaatccatttgtttttgctcacaaagtctctgtgaaactcgatgacaataactttctactttgacgtcctaaaatcttgtctgctattcgaggtcatcgtctggaagatttcatctctgattccttacaaccaccacgaaagaaatctcactaaagaatattaagtacggtgtcaagtcaatcctcgcttcactgactgggaagtccaggaccagctcctttattcatggctactttcatctatgtcagatgttactctcactcgaatgttggagctgaaacctctgctcaagtatggaagacgttggaggtatattttgtaactcaaacttctgcaaaaattgatttctatactactcagttgcaaaattataagaaaggttctttatcagttaatgaatatcttcttcaaattaaaactcttgttgacaaacttgggtcttttggtcatagagtttctatcaaagaacatgtagctgaaatcttcaaaggattgcctttaatctatgatacatttgttatctctgtcaattctagaaatgatcaatatttgattgttgagatagagacattgttattgtctcaagaacataaaatggaaagtcataacaaggatcttgattcagttaatttggctactcaatgtggttttataccaaaaccacaatgtgctccacaattttctcataatgcaaacaacaacattcctaatcaaggtcatggattgtggaatccttatgctgtctcctcgaggtcagtagtctaactcttcttttcaaagtaataattctggtcaagtctgtggatcttcccttcctcctcaagttgcttcttcaaacatgcctatcagatcaaatctagtttgtcaactatgttcaagaacttgtcaccttgctgctttttgttatcaacgattcattttgattttcctagagtaggtgctgcaaatgtaaacaagaaatcaatcaatgtggccactgcagacaaagtcacagatgaagcctagtacccagactcaagagcaacctctcattgcacccctaattctgccaatttctccctaaaacaaccatactttggtcaagaatcggtgcacatgggtgatggtgatggcttccccattcaaaacataggtaatacactctttcacatttcaaactcaatcaaacctttgtttcttaattgaatgctacatatgcttcatttcacaaaaaatctaatttctgtatgtcaatttgctgctaacaacaatgctttttttgtgttttatcctaagcattgtttcatcaaatagtaggtttcgaaggagacatttgttgaaggtcatcttaaacaatgtctctatttcatagatctcactcaactcaaaaagtccaacaatgtctctatttcatagatctcactcaactcaaaaagtccaactttgtttcctctttcaattctaataaagtgtacactattgccaatacaaatgttccatccacttctcattctcaatgtaatttcttttctttgtggcacaaaaagcttgaacatccttctgctaaagtcgtaattgtcataatggtcaaatgtaatacctcaaagaaataaaagtgtcactgatttttgtgatgcatgttgtaaaggcaaaatacacaagttcccttttcctaatttttaaactatattcactcaaccacttcaatttgggcacatagatatttggggtccttccccaatgttgtcctcttgtggatataggtattatattcactttgttgatgccttttctaggtacacttgggtgttccttctcaaagctaaatatgaggcattagaaactttcataaatttcaaaactcaaattgaaaaagaacttaaccttccataatatctttccaattagactaggggtgaatttcaatcttcagagccttacttaattcaaaatggcatctctcatagatttttatgtccaactacccaccagtaaaatggtgtagtagaaagaaaacatagacatttaatagaatctgctttcactttgcttgcccaagtttccatgcctctctcttattgggatgaagttgttagaagagcttgctacatcattaataggctccccactcctgtcgtatccaaagatactcctcttaacaaattatttcataagcaacctgactactccaccctcaaagttttcggttgtgcctgtttttctaacactagaccatataataaacacaaatcggagtttagatatgaaaaatgtactttcattggctatagtttataacacaacgtctataagtgtttggcttcttcaagaagaatttgcatttttagagatgttttgtttgatgagtatactttttccattgctaatatctctaataatgactgttccatgctcatatgtttcaaatggtacttcatttataataccaacttctcgtcaagcaccaccatcaccacctattttccagaatcagtaacctgctcctttcgatactagtgtagatgaatttatcacttgcaaatttatcatctatctgtagacataactaatcttgttggttcataagatctctcatctacatttgttactgagccaaatgagcacaacacatttgtttttgcatctaattctaaggagtagcctgctccaatcataacataacctgcacctgtcaccaacaatcacccaatggtgactcgagccaaagtagctacttataagccaaaagttctcctggcttctcaaacagctcttacagtggctactactctcaaatctcataagtggaattcaactatgaatattaaaatagttgctctgaaatagaacaaaacttaggttcttttgttatcggttacaaatgggtgtttagggaaaaagagaattcagatagcatagtaactcaatacaaagtaagacttgttgctaaaggttttctccaacaatatgactataattttatagaaacctttagtcctctcatcaaaccaacaataatcagagtcatagtaaccattgctttgacaaatggttggttaataaggaaacttgatgtaaataatgtctttctaattggagagttaactgaagaggtgtatatatgactcagtctctcggattcattaatcaatactctccacatttggtatgcaaactagaaaaggctatttatggtttgaagcaagctccaatgacttggtttgataaattcaaaatatctttgcttaccttttgctcacttcaacaaaagttgatcaaatctctttttatgagaatcacagggtgtcatgtcactttcatccttgtttatgtggatgaaattcttgtcacaggaagctccttacttgtgttatcagctcttataatagatcaatgcagcttttgcattaaaagaccttggctctattgactatctccttgaaattcaagtgcatcatctcccaaatggcctacatttatgtcaaaagaagtatatcatagatctgttacatagagcgaaagtggaccgtgccaattctctgccaaatctaatgtccaacacagaaaaattatctagtcttactggagaacctgttgctgatccacatttgtacagaaatctagtcagagccctagaatatacaataattacaagaccaaaaatagcatatgcagtcaacaaagtttcacagtttatgcacaatcatcttgagcctcatttcaaagtactcaagaaaattctaaggtatctcaagggcacacttaactatggtctaaacctaaaacgatgctcaaaactggctcatacaggattttgtgatgttgattgggcatttgaccctgataataaaagattaacttcaggcttttgcatctatctaaggtccaacctggtctccaggagctataaaatgcacaagacaatgtccagatccaacagtgaagctgaatacagaagtcttgccaatgccactactgaaattgttaacccaagatatgattccaaaaggggagtgaattgaaaatttgaactaatttcaataaattaaaactttcaatacaaaattatgaaattgatcaaattaatcaagtaatgcaaatagtatggcaagcaaatatattgagcaaataaacaagcttgtaaagtaaagattttaagggtaagaaattgcaaactctcgatttttacaagttttggtagacaaagccacctacatcattggtctt

SEQ ID NO: 227688 - DNA, 2041 bp, Cannabis indica
cgaagacgcttattttgctttttttacattttttaatttaattacctttcatatataatatatttaatgatttatctaatctaacctagcaattaaatatacatactagtacttaattaatatatatatatccatgtatattatgaagatattaatatatatataactaatttattactttttttttaagtaccgaagaaatttttgattaatattggttatatatactaaatcattattataatcttcattgacattctttgaatattattaagtaataatcatattattaatttgctcctatttaattaataatatctttatttgcactcttaattagaaagaatcctgtgaaattaaatttttcttaaagaaagaaaggaaattgtatacagccgtacacattgaatttaaatatttattatttttaaatgtatataagacccttattttggacgacaaaacctatcaattaattaattgggagagattccttggagaagagtattagtagtagtgtagtagtagtactactcgatcgatctatgtgcatggtagcagtatatatattagcattctcaatctgagtttccaagattatatatatatataatagaatctgagaatacatatacatagataataatgaggattaatatgaatatgagaatgcatatgtggtgtttattaaagatgatgttggtattattagtattggaatatttagggggggcagagggtgcgtcgtcgtcttcgtacaacatcaacgtggtgagctttggtggaagatcagatggcaaaacagattcgaccaaagcattcgcaaaggcatggtcatgggcatgctcagcaagggccaacaccgtcacactctacgttcccaggggtactttcgtcattaagagcctggtgttcagtgggccctgcaggagtagaatcgtgttccagatcgatggcactctcctggctccttccaactactgggacttgggctcctctggccattggatcttgttcagcaaggtcaacaggatgtcaatccacggccgtggcactcttgatgccagaggacatgctttctgggcttgccgcagatcttcccacgctaaatgtccaccaggagcaagggtacatatataattactcatgatttcatttcttcttttttattttagaaaacattatataatatatatgtatatatgcagtcgatttctctttcgtggtgcagtaacattgtggtgaatgggataacatccctaaacagccaaaccatacacatatcaatggaccattgcaagaacgtggtgattcgaaaggtgtacataagagccccaagctcaagccccaacacagacggcattctcctgcaggcatcgacgggcatcacggtgagccgatcaaccatcatgacaggggacgactgcgttgcaatcaaatcagggtgcagcaacgtgtggatagaaggaagcaactgcggaccagggcacggcatcagcataggcagccttggggactcatccaacgaaagcggagtacagaatgtgaccgtcacgagctgtaccttcacaaagactcaaaacggggtgcgcataaaaacgtgggccaagcccagcaacggctatgccaccaacatccacttcagaaaccttgtgatgaacaatgtggacaaccccatcatcatcgaccagggctactgccccggcggtggaggtggctgtcctcgccattcctctggtgttaggatcaccaaagtcacttacagtaacataaagggtacttcggctaccaaggttgctgtgaggttggcttgtagcccaaccaatccatgttatgggatcaaacttctcaatgttaagctcctttatctcaagaaatcaccagcttctctttgtgcttatgctcgtggctcttcttccggagtagtcattccaaggagttgtctcactaaataatattatctattattattattataaattataatattacaatttcattattattaattgttctttttcccaattataaagttatatat

SEQ ID NO: 227689 - DNA, 2334 bp, Cannabis indica
attgcttctaaaaatggggaaattctataaagaatttagaacaaagttgtaagaggaggttgtagagattggttgcagggctattagacattcactagagtttctctgagcttttctcggtcaggttttattttttggaaatctaagcaagaacagccaaaagatgaaaaatgtcaaatgggttttctttcacttatttgtatgaaaagtggtgacccgtgtattcatgatccaacaacctgaatcaatcatgagaaagcacagatcccttggagccaaaggtccaggaataccaacgatttccattaaacaaattataaaatcgaggagatgcaaaataatgatgatatttgcctcagatatcacgttgacattacgagttatcaatccattacttgaggcatcacacgcttgcttgagccgtgtgaaagacacggaccaacaaatatctcccatgtgtactccaatcacagaatacaaagggctagggcaaaaaaaattcaacaactctccccttctggaatttcaatgggttccaattgttcatggctctgtatattgttactaatccagatggaggttgaaagcctttgcgactctcaaactttgaaggcttgaggggtaaatattatccgcgttcctgggaacatgactcgtgtaatgctctaacatttcacacttgcttacgtgcctattcacaaggcccgagtaagcaaacaacccaatcaaagagaaaagttgggctgggatctagattcaacccttattctattatgggtaaagccagatagatagatccagaagattgaaacttaccaaaattattgagcaactgaggaagtatagacggataccctcaagggtatcccgaaagagggttttgcaaaacactaatcgtccaggaccaatacaacttggcacgcctttaacatcaaatttcaacgaatcaagggtttatctcctctgccaggccttggacgagtgcacaacaaaaaagccaaccaccttttggccaacgtccattactctaacattcactgttcccaattgacgacgcatgccctcctatcatcatcaagtgttaatgtccagtacggatgacgattatccctcaaattgggcctcacctacttggactaaagtcaatattaaaatattttaccccatttgtgggcttacttttacatgcaaatcctaacgggtttaggtttacccgaaaacctgagtttggcctataaataaggcccaaccgttgtccaaatgattacaatttttagcttaaaaccctggttacaaagtttggaaagaactctcttgtgcaaaatactccatagccaaagatcgctcaataatattgactcatacactaaggctccttaatactacaactacgtaaaaacaaatttcttctctatttttactcatattttctttagctcagtctatttttaattcagcttctaaaaaactcgataaatagtttctattttattataaagaaaggtgtatataatttttgttagatgtggtataattattttaattgtagtatataattttgttagtattatacatttttttaagaatattattttatattcaattattgtgggtatatattttctaatgaatgatatgtgttttatattgtatatagtatattacttatttgaaatgatatttagtctctatttaattatatataatgattatattaaaatagtttagtaatgtatatatgttttaattttgttagcattgtattttttttttgagtattaatataatagttttattttaattagaatatttttgttgtatataatattattactatgatatattaattttttggtgtgcatacaatatctatatttaataatatagtatatttttttatttaaattacaataaattaatatgcaatactaataaatttatataacataattttattattacacaaatctttttttaaaaaattggtataaaataaaaatatttttttattattatcatctaatttattatatttgactattttgataaatttttataagaagagacatttacataattaatttatctatttaaggttagtttttactttattattattttaattggtatataattataaataaatattcataaatattagggaaaaaaacaaaaaaatacaaaaaaggaaaaaaaattacaaaaatactttgggccggcccattaaacatttatacagtccacatacaaatatttacaaaaataccacatgcactaagccttcagctgtacagagcgaaccatgaagatgaaaatacgcactcgtttcaaaac

SEQ ID NO: 227690 - DNA, 951 bp, Cannabis indica
attattaatttttcctattaaaaagtttagtgaacaaatcaattgattctcatttcctttaaataataaaagatacttaaaataataataatattcatcaacaacaacaacaataataataataatttctgggtggattcaattaacaaaaaagattacagggtggtcttttttaactttcagacacacaaattcataagaagaagatatgaaaaccttaagtaaagataaatataaaaggctatatatatgccaagccaagcaaagttataacaatttactcattatagtaacttcactaaaaccacatctctagtatccatactcagtctcctcatactgcttgagaacatcagcacacccagcaagtgcatcagttctagtgaatcccattgcgttgacataacggttcttagttgcaatgccattgttctcggtgagaatcacaagggcgcgatcacggcctggagctgcagtggcgcagtcgaactgaggactgctcactagcacagcattacagatctcatcaccatggtcctctggaatgaccgtcttgtaggttccagatgagtctgttgaggcctctttgctgtagatgaccctgtttgagaccctgtccttgcattctattctcaccttggcgcctatatcacacaagtcaaaaataaatgtaaattttaatgtattaaaatgaagaatatcttttgagtaacggttgtcacacacacacttaaaattatattttttacacttaaactataaataaaagtataattaaagtaacgtaatctccacttgaaactatttataactaaaattaaacacagatcttatataatattgagtatgtatatactggaactactgatatatttttcgaaattaccaattcagtatcctctccaatccaaatctagcagcctatacataataaataagttggttatttaa

SEQ ID NO: 227691 - DNA, 2036 bp, Cannabis indica
tctcaatcaagctccattttaataatatttcttatatttttatctttggagctattttagttaactgctcctataccttgattttttttttcagtgtaaattttcttataactaccattcagatttaattcatatttaatatcaaagtgacaagttcacaaaattgccaaagaatgaaagcaaaaataaaaagaaaaaaaaaaaaagggtaaaaatgtaagttgcagctgcaagacttctaggttattaattattattattattatttaaataaaaaaaaagtggatttcccaagatgcatataatggggggaatggggaatatgcctctgtttgattttggcttttgggtttgggtggctggtcttctattccatttcccatcccttttcttctacttacaactaatcccttttgactagttattcaaattttaggccattaaatacctcaaaataaattaataacgccattaaccacgcgccccttcattactaatactattattattatttaatatttaatgcttaccacaggtgaggagggccctcaattatttatttatttcttttgataaattttgtgggttaattagaataattgtttttttttttaattttaatacgtactaaattatattttttcaacttttaaagttattaaaatttttcttaaattattgagatgattagatttaagaatttttgtctaattttaataaataaagtttaacgtaaatcaaattttgataggacataatttagtacattttaaggtttgaaaaatatgatttggtatatattaaagtcttagaattataatttaatacatagataattactgaattagtaaaattgaataaaattagataaaatctttaaatctaacaatctaaatagtttgaaaaaatcttttaactgttaaaaaagtttaagagacataatttgataatgttaaagtttaaagatgaacatcctaattaatcgattttttatttatttttagttaaattgtcaattttcatttttaatattaaaagtgcaaatatcaaatagaaaaaatgcattaaaatcttactagaaagacattaaaaaattgtaaaccccttaaaacgattttctggtttggcactttatgggacccaaatgtagaaataacctaataaatgtttaaatggtaagagggagaatatcaattttgaccatattatgtttgggaaaatattagttttgactttaagcactatttttttcattctctttttctcatcaagactttaattttagtactattattattctctaaattctctaccaaataccaataataacaaattataattcttgaaaaatgaacaaaaaaaagtccacttcttgaatttttgcccccctaccccttcagaactaaggtcatatttgaaaataagtttcattaaggtcatatttggctcgaaggaaataagtgggaaaatgtttatttctttacttgcctactatctagaatattaataaaatataatgaatgagctttcccatcacattgttatttttttttagttagtgacatcttttgaaagaattaatcacgcaataatatgttaatcattcttattatgacctatcaaatatactcgtggagatattgtagaacctcgatggagccctttttagctatggagccccttgatgaagttattttgatatattttaacttacttgatggaacccatttttaagaacattatttttttcttttgttagtttttctttttgagttattttagctcatgatatgtgagtgctcctatgccttggtattttcagtgtaaattttcttataaaaactatttagatttaattaatatttatatttattgggtatacatctaaagttccacatggattagaaatgagaaggatcttgagtatataaagatgaacactatcttcattggaatgaagctttttgagaaggtgtccaaaaaataaatcagtgagggctattgctagagccatcggagatttggtttgatctaaa

SEQ ID NO: 227692 - DNA, 1878 bp, Cannabis indica
atttaattttttaaaagacaatacttttgttagtgggggctataacccccacattgatagcagtagatccgtcagtgactgtagactaagactcctacatatatatatagggtaatgtttagtgtttaattggagtaatattgtgtgaaaactctactatttttaggattttacaagtcttgttggagaagccctcatacataataggactaaagactacattcatgggaacactacactatgccacaacttctctattttcatttcttataattgcaccaaaacttattttctttaagttagtatcatgcccccaaaacagttctctatttgcaagctgacattggttaccttcgaagttcacatgttcttggacaattttataatcatccaaatatgaaaatagtcaatcataaatattcttagcattatatgtatgcttcccatacaagattctatttctatgatttcaaatagaccaaagtagccctaagactaattcacactcaaaaccaaacattccaacttttgatactcaagaaagaaatggtaatgaggtgaatttttacatgtttagtcaccacaattattgcatgtttaacacacagaaacacttaaacccaaactccacataaatcacatactcaagctttaaaaaccaactcaatgttcaaatatacaaggtttatacaaaaccaactctgcacaaccttattagaaacaacgaaaaaaaattaaacctaaaatttaatttcaaactcacactctatacttcctaaacttttaagcaaggtgataccaccaaaaactaaattcaagaccaacaaaacttcatcataacttgaacatgcaaattcagcttagaaataagattattttcaaagattaaactaagcaataagagaataacactacctcaattgccttcctcaaagtttccacataaaaatccaacaaaatggcttgatttcccttcaaaactcaaaaattaaacttgaaatggtagagagaaagagaggcggtcagtgggaaggcttcagaccaagaaaatgggttttcgtccattaaacacttagccaaaatgacttaattcaatttggtaaaaattaatcaaatgaccattttgcctctaaagctcaaaatcaatgtaaatagcaattaaggacagtttaatcaatttgcatccacatttatatatttattccaaataattatatacacatttcatgttattgcccttagcacataactcataatttctggaccctgaacctagttcgagtcaaaataaagtcaaaatacctgatcgtgactataccgtgctaacttatcaaaaaccacctgtaataagacaatatgaatatactatataataatatagtccactagcacaatatataaaaaaaattacgattttactcttcttgagccaaaattacaaaaatgatcctaactcataaatgaagtcttaaatatgataaatctcaaatagtttcacataattaattatataataatataactacttatttatatctaattaatttaattaggattgctaatacatttactaatcttatgatatgacaagtaatctgagcagtgcttgtatgtgtctatgttcatctccttcaacacaaccacaatatgtccacatgacatttcatcgatttggaatctgttgcacgtgcatgttctctctttgaggtctactatctatgattctttaaatctggttacctcaaataaatattcagtgattgatttaacctatgtaatttgaaaccaacattttattaaacataaagaacaatagtgggacaaccctacaaaactgctagaaaaaccataatatgattatgtttaacaatttgaagt

SEQ ID NO: 227693 - DNA, 4008 bp, Cannabis indica
ttttttttttttttttagaaacgaaaaaatatactttattagcaaaataagttatatagctgcaaatattaccatcaattacactctgactaaagatttatactaagtattcacattacatccaatcctacacaatttgaagtgatatgatctcttttttggtctaatatgatctccacttaaatatgtataatgcacataattcggagtagtgaaagcactatcaacaattaaaatgcattattaaaattttactttatttattttacttcaaatttttagataccttaatttctttatttttttctttatattatttaaatattatatttttaatataatttattcaatatatataatattacacatagaaaaaataaaaaataatataaagtcattacatttagctaaacattatttattgaactaaaaatatgtaaaatagttaaaatttacccttacttattggaagtttaattttgtaatattttcattataatttaaaaattaaattattttaactcatctattaaaaacactctaagtgtacgaaataaatgtatatctaacattcattatttatatattgattaatcaaattatttgatactattactaattttaaacatatctcactactttgataaaattcagattcatgatttctttttgtaattatattcatgatttgttcttattttacaagtcaaaattttcaatcaaaatattaatatattaattaatacatttttcttttaattttgttaagtttttatagaatgtttacacaattaaactcttaaataatatttctcagttgtaaatattaactttacgttacttattaaactgtttgattaatttaatattaaaatataataatagcgtttttttgtatttatttttatgaaaaatatctttcttctcatttgattgttacttactatttttgtatgaataaggataaatactattttacatctgtgttttgtaattaattattttgttaaatgataaaataaatcctatatttttctacaattcttaacacgaacatatacagaaaaaaataaatggtctactttagcatttaacaaaacaaatagtctaatccaatccaaaacaaaaacctcccttacatctctcacgttttcaattattaaattattaaatccagattctaatccaaatgttacaacctttcattctccttatatgtgcatttcttcagtttagggggaaaatgagatcatgagactgagtggagtgaaggttgtcttccttaaacaattcatccaaaactagaaattaaatatataaatagagaaataaatataatttgaaaggaagtataatatgtcatctaaatataaaatacatagtaaagaatcactatccaaatccaacacagaccagtttcattttttaatcaatcttttgttaaaggacaacaaccaatgaagaagcagaaagaaggaaaatggtgtttattattttttttatttttttttttgcagaaaaaaggaaaatggtgttattatttagccatgctcaagtttaaaatcaaaaattggaaaggcacagaactctcatactacaaaaacaaaaaccactttatgcttctatcctaatgagcctgcaatggatttggattgatttattatagtaaattagataatatagtcagaccattcagagatgaacgatgtatggtccatggactctccaggcacatcctcatgcctaaaaggtcgttcttttcctccaaccagcctcgccggattccccaccgccgtcgtcctctccggcacatcgatcagcaccaccgaccctgcccctatctttgacccttcaccgatatgaatgttccccaacacagtggcaccggcgccgatcaaaactccgtcaccaatcttggggtgtctgtcaccacccattttcccagtccctccgagagtgacgtggtggagaattgagacgttgttgccgatcactgccgtctcccctaccaccactcccgtcgcgtggtcgaacagaatcccttttccgatcttcgccgccgggtgtatgtccaccgcgaaaacctcggctatccttgaatgaagcgccagagccaatggcctcctcgattggctccatagcctatgtgacactcgatgagccttaaatcaaatccacaaattaataccgtggattcatgaatacagaacaaaatcataacttctcttgtttagattttgcaaaacattgaacattcaagaaatttagaattaggttttagactgataaatacctgacaagccaagaaacccttgtaatttaggagacagtgagagaaggagacgcaggcggggtctcgttgacgggcagcgcgtaggtcggcaacaacggcggagcggagagatgggtcggagaaggcgttgaggaagagatcgtagaggagggtagagagaagagtggaggagcagagcttattcccgaggtgaaacgagagagatcgctctagtgacgagtgggagagaattgtcgagtaaaggtagctcgccagcgccggctctgactctgcatcgcgccgcgcctctgccttgatctgagtccacacccatccttcgtcctcgttaatatcagtcatcgtagtcgccggagaaggtaactgcgttgagtgtcgtatatcgccggccggcattgaagggtgatgaaagaaagcttttttaatttgttaaagccaagccacagctccttttacttatttattttgaatcttatttactgtaattttgttttatttatttacgaaattagtcttccttccctagtagtactattaaattaaagtacttatttattcttcttctcaaatttattatttgtttttgtttttcattacaaatttagaagcaagtttataacattacaaatctacattaaatttgtttaataataaattattagaattactccacaatgtccacatatatttaagggttctaaccaatgtccaggtattaggtaataaacattattaaattatgaactataattaaggagaatgattatgattctactacccctatgatcaaagaattctaatttctgccatacagatgaataaatcaataattatgtgaagtaattgaacaaaataatccacaacagaaacaagcaccttttttttactcgaacaaagaataataagctgtgattgctccctccttgtgtgagggaatgataaattagtagtctcttattcataactcttgtacaacaaatgggattttgttttgtgtagctgaacttgttggtaaatatgttaccccaaggcctaatctcattcgaatgggtatccagaccagttgttagagctctttgaaaaaaaaaaattctaacttgaactttctcaaatttgcaaatttccctcaaaaatatattaggaaaccactgattgaagaatatggtctattttttcattttggactaagacagaattgggtttacgaattctccttcctttatgctcaatacaccttttgtttcctttaattggctgacttttgcaaggagagccatcagctaagatgaatccacaagtaggagtgaagctctcactggtaagatagttgactgtaacctgtgacactccttttgagtcctcattgctagaacatggtgctgcacaatcgaattgtgggtgaacattgctattcgatatatcaaccttaactgtccctttaaccctcatccctttgtgatcagcacatcttttccttccttcaactggtggccttctacaaatggaatcatgacccaaaactacaccacaaatggtagtcctgtcctctggaggaatggtacttctatccaaaaccaacctgggctgggaccttccgaacttgaaaactcgagaaaggaaattgtggctctcttcatcgacacgaggactgaatttgtcctctgttgaagatgattttcttgcttcgattcttacacctacttgcttttgactgaaag

SEQ ID NO: 227694 - DNA, 2075 bp, Cannabis indica
actcagttggagcgactgctgcaattctgaaggaaaaccaagaaatcaaggacttgaaccacaacattcaggatattgtcatcaagttccacggtttagttgctaaatttgacctctgggaggttagctggatccccaggatgcacaatggtgtggctcaaaggacacttaaatctcgactgtttgggagttttgatgcgtctaattttttcagtttcccacctggtgtgagggtggatggctggcttctatgttctgtttttcttgtttgttattgtcttttcttagttttttgttagtttgttgcgtactgcttgttgtttgtagcttggattctggtttagtttgttgtttgttcttgttgttgctgtgtgactgctttgaaggcctttaaataaaaaaaaaaaaaaaaactaagctttaacaataaatttatcattcctgccaaatcacaaattccctcaaaaatatatttgtttctattacaccacacaaaataagtaacaacagctacaactgctgaaattaaggcttcaataaacccaaaattggtttcttctcgtctatttaatcaggttttaagatttagaggccaatccaagaaacccaaccattttgtatcctcgataattacttgtttttgtgaaaatgtagccgaaaaataagtgagtgtcagattcattatccatacaacaaatcgaacaaagaagagagtccacatgaaagattctagccaataaatctcgggtatgttcccatttagagcttgtcagtagattatattcgagatactcttagtatgtgtaacattatatagaaatgagatttgaaatatgattaccatgtttaattgtctgttaaacgtgttgattttagatttgtgtcacatctcaagttgatcaaatgtgttatggtgtcatgttgggtatcctattaagaaattaggttgtgtttgaagtatagacaccttcaataatcatgtcaaattcgtatttactatatgttgatacaaacataacattgataacataaattgttggtcttaaaaaatatatattgataatatgtattttaaagaagatgacattttacatcaactaccgtgaatggtcttagtggaacactaatactaggtaccttaacaatatttagtgatattctataataataagtggtaccttaacaataattttattttaaaagatctatacgtttataaatagaaagtaaattagacctcacggttcatataattatatttttttgacattaagataacttaaaaatattagttatatatattatgagcaaaaactcacctaaccacattataagcaacatagttacatagatgaaaaatatttaaaaagtgacaatacaaaatagactttgacacaaagctacaatttgaattatcaaaaaaaaaaaacatagctacaatttgaaacataagtagatttttttattataattattaaaatatataagacttaatcattaatcacactaataatattataacatattgtgtattatcttaccacacttctaaattacataaagcattactactagatatcaatagtacttagtgctaccttgtcattataaatagttaataatatttcataataattattcaattaaattacattagaccaacttaataccaccactaatgatttttaatatttctcaattatacagaaatgctaaacggtgcttaacatcattttatgtattaatatcgctattagtccaactaaatagcgagtctcatataatttaatataataatttttagagagtatcactaaccaattgcaaaacaacatatctagagatgttaggcactactggtatctaataacaatgctcatattattaggaagagaaatgctaaagagcaccactagtgcctagcacattcctatgtgtcaatatcgctattggttcaactaactatcatgtctcatatagtttaatataataatttttaaaaagtatcgctaatcagtcgcaaaacgaaatatctaaaagtgctaactaccgctaagactcaaacccaacagcaa

SEQ ID NO: 227695 - DNA, 1861 bp, Cannabis indica
gcaatgtctagccttgtgatgactaaatactgcagtagttttccaattattttccaatacaaggttcggtcagctaaagtatcattttcatcttgcgacaactttagattagctttcataagattgctgactagtttactccttaaatatccaaggccttcaagaagttgtagagggtatggcctttaggatacaaaaatccctttgttggatcatgcaacttcaaggcctaagaaatatttcaaatctcccaaatatttgagtgtgaatctatcattcaacctgagtttcaaaatttataattctttgaggttgttacttgcaagggatacatcatctacataaactagtaagatgatgagactgctagaagaatgtttcacgaacattgaatggtctgttgcggagtgagagaatccttcctctatgagagatgtagagaatttttcaaaccattgtcaaaaagcctagtttaacccatacaatgacttttcatgcttgcaaactgtattttgtggcagtgaattctcccccttaggattgtactctagaggtagagtcatatagacatttatgaagatctccatgacatcgagttgatgtaagaaccaactatgaactgcaactaaggccaaaataagctttacaaagactaattaagtgataggagcaaaagtgtctgatagtctatgccttcaagtttattatagcctttagcaataaatctggctttagatttctctactgatctatttccattgtacttaaccttagaaacctattgctgacctcgcttttagttaacaacaatgaatcagattaaagcgatcaagaataattaaccaataaatatgaattaatattaagtaaggaatatactagaattatagagattcagccccttgataatggtaatagtctagtctcctttagtttgtattgacttaagagtagtacataagcaataaggctttgatctctctcgaaaactcttacaatgatctctgggtattttactcttgaatatttgatatctctcgtgtgtttcttctgaatgaatattgtgtccctgaatagtgagatgaccactatttatagggattaattacatcaactattttcccaaaattaattagaagtaaagtgagaaaattatttgctttctataattacaatgagcaaatagaaaactaggcaggtttccttttcttctttgatactgcatatttatcccatgaaaatagggatattaccgtgtctagcaagtacgaagatatgtgggggaaagatactcaattggtaccttgtgttttttgttaaaatacacacttggtaccctctattttaatataatgatcaattagtaccctctatttgaaaaactagccatgatgaggacactaaggcgaaagataaaagtcaagttctagttggttcggtgacaagggcttgagcaaaaagattcaaagaggaagttaacatcctagtccaaagaattctaaaacaagaggagattgttgtcaacatggaaggagaacataaatttgtgcttctcatcaaagtagactcaacttagactcaatttagaagtatttttgtggttgatcacgttttcaaggctattggcagctttcttttttaattttgtgtcctttattctgtttttttttattattttgaaaattgcctttcttttagtttccctttttcttggttgtaagttggctatataaagccttgtaaacactttgaaaaatcagattgttatgaataaaaattgagaggctttcttcttgagttcttcaaagaactattcaaattcataaaggagtgttccttgtggcattcaacctgacttatc

SEQ ID NO: 227696 - DNA, 2482 bp, Cannabis indica
tgaaaaaataaaaataaaaactcaaaacaaaagggtgggtacaacattgaagggcatttttgtaaaatatcgtagaatattaacgaatccccgcatcacgtcagagccgtagttcaaaacatgggattggggcaaaagcgtcaatcgagtgaccggctaaaaataattaagtgagttggaaattgggcgggcggatcagggaaaaatggatattcgaatatccaaaaggaataattcaaaattctctgcttcagtttaccatcacctgctggagagtagggacccaccgcctccaatttggagtacggagaagctgacgtgacagcatcaacggctgatcttcattcacttgatcgactaatctcagttgaacacgtggcatctccatgcttgaggtctgcatgtccatatctagtcccaggaaaagacaatctatgggcatttttgagaaagaaccaggaagtttcatggtttctggcttttattgatgatttaattctcttggggcctataaacctctctcccaactcttttataccttcttgtttctttgcattcattcattccttcatataaacccaaagccacttgtttttaatatatatttgtttgtttgatgaattattttttcatttttaaatgtgtggtaacaactttcatacaggttttaattctcacaagaaacagacctttgtttttccttttctttttgtgaagagttgtaatctttctatcccattcattattattattattagaaatagtgcttggtggtatatggtatggatagttcaaaatatgtccctttctagttttgaaaatgatttagtaagctagtatatctatacatgtagtaaaagtagtctttttctttttccttatcctttattgtacatgcttattctcattcccactgacatgattatttatttgtacaaaccaaaacatcaccatctcccatgcatccatatgggggattattagagattaagttaaattgccaaaatacaccagtattttccatactcttgttgtgattattgagtacttgctttggaccttttagagcatttgtcagtatgtagtattaatagcaaatgtaacagatttcctaaaaagataaaaaggcgcagttcttctattgtctattttttacagccaggtcccacaaaatatgccaagttggatttctctttttcttatgttcaatgaattttaggacaagaagtcacacctgcccaccaaaattgataatttgtaaaacatgctacatatattatgagttttccactacccactggaatggtgctacaacttgactgaattcttccagtaaaaaaagaaaaaagttagactgaattctcatttcattaatacagactaaggatccaaatagatgaataatgtaatcatgaatagatgaaatttttatttggttttttgtaatgtgacacaaaattttgtacaaaaatgtacagagagctaaataaaacaaacacacaacactctatccccccacccaacaaccttttgttttgtccccctttcactgaaaatctccctctatagcataaagtaaaatcaaggagaaggactaaaaaaaatcctctccatgtacgtaaataacaaattatacttttctttttcttgcatttgacaagaaatcaatcacacaaaaacatacatatttacaattgctcatgtataaacaaatcactgttggctacatcaaacctcttcaattggagaagaagaagatctcgttgtgggtgatcccccttgcgatctagcttcttgaatcttctcagtcacctcactcacaacaagcctagtaagaaacaatcctgcaatcagggctgcccccatcagcattgtaaaaactaagctccaactcctagtagaaatgtagccagttagcaagggcccaattgcagccccaaccgagcctgttccatctatgattgctgttacagttgcaagtgctcgcgaattccctttcaacgaactatgtgtaccaagatcagctgataccgcggttgttataagagcgtaaggcccgttcacaaacattcccgttatgaacataaacacaatgtttagagttaaagacaaatgtccatagctacggtagaagaagagagcaggaatggcgcagtacatgaaactcgctgctgttattgctcttgcgttaaggcgatcagaaatgtgaccggctaggattcctccaactacacctccaacatcaaacaatgtagacaggtttccagaagtctcattggataagtatttgccatctatagctgcaaaatgtaacaatgaaagttagtgatgaacataatttatgagtatgatgaaaagataagcatagaatgataagctgaacagaattagtacctgtgtggctaatgtagaaaggaagccaatagagaaatgtgtaagcgaccaatttggcaaagaacaggcaaagagcaaaaggagcaac

SEQ ID NO: 227697 - DNA, 2872 bp, Cannabis indica
aatctaaccaaaacagaaaaaaaaaaaatggtgtctttaaaaaaagccctaacactgaaaagtcagtctggtacagatcattacaaaaaataagcgacaacccattatgcaattggcttagaaaaagctaaaaatcacaacaggtctctaagaaaacaccaattatgatatcaaagagctaaaaacctttactttacctctcaaaacgcaaccataccaaatggaggagccacgtcctaccctaacatcgccgattacagaggcactgggtgcaacaaaagcctccttatcaaccacaggagctttatcaaacacattcataagcgtccgatgcctcgacactaaaacagaacaaagaacataaatttgatcgaagtcagccccaaattcgtggatctaaaaataggaaaatactcgtcgcattttcaaattcaaaatacgattggaaagcatatgagagatttaagattgagagtagaagaaaaaaaaaggcttacgctgttcttggaagtagtaatttccttgaagacgacaaccgagacgatccatggcttggccggtctcgcggatccagaatccgacggtgtagattgccttacccaaggtccccatctcgttaggccttgtgttctcttctctgtatttggtttggttggatttgaagattaaagaagaacaaagtttctgtgtcgattgagggaagaagaaagaaaagagatggaaaatgcggtagggtttgaagaaaccggttcatggactatccatgatccgacccgacccgaacccatatatatttatatatatatatctctctcattaaatatagttaatatttttgtccatattaagtctcctaaaaatacatgcctttaaaattacatcaaatatgagatttaataataaagttataaaatttccattttaattaagaaagtactatacagcctaatagtaaaggtcttgtcttttgacatgagtgagtggtaaaagtgtatgtttgtcgttgttcgaaagtcctattctgttggttgtttgtgtttgatttttgtcctatggcttcaagcagttctatggctaatgatcttgaggatcattattcgaaaatccagttagaggaggaagatgaaggaactctttgtgtgacattgctgctgatattgggcaaccgattgatgaaaggtggtgtttggttggaaagtttttaacaagtcgggtcattgattttctgtcaatgcatcatacaatggcttctctttggcaacctggaaaaggtatgtttgtgaaagaactacagactaatttgtacttgtttcagttttatcatgagaatgatatacagagggtgatagaaggtagtccatggacttttaacaagttccaattggtgtttgaacgagtgaagaaaggcgatgatcctttcaccatgaaactgaatcagctggacatctgggttcagttacacaaccttcggcctggctttatgtctgatatggtggtgcggaatgttggtaattacatcggtacgtatgtaaaatcagatcctaaaatttttaatggcatttggagagactacttgcgggttagaaccacgatcaatgtggagaaacctctgaaaaggagaatgaaactgaagagaacagatggacagtggttgtggacgaattttaagtatgaatttcttcccacgttctgtttcatatgtggcatcattggccattcggagaggctttgttctagactctatgataccccgctggaattgatagaaaaaccttatggtttgtggatgaaggcccaaccaccacggaaaaacaagttgataggagcacggtggcttcgaacagggacagctgcgaatgcccagttttccgatgaaagtgcaacagccagagatgagtcattgaatactgatgctaatccgatccctacaaatcagggattgacattggagagcaacggtgatagagggatcgacaatttaattgtgctaggagctgattgtggaaagagaattgattctcaaaatggcgaaaatcatggaggaatggattgtgttaatgagggaatcaatcatccaagtattaatactatgagagagaagaatgtattggacaaagtcaacattcagcaaaaagctttattgattattgataccaagcgtagaagaactgaggtggcaggcaaggaagtaatggaagaagatgaggtggaaaattataatgcaattgattctgattcaaaaaatgggtttatggtgggtcatggttctcaggcccaccaaggattatgagtgtccttagttggaattgccgtgggcttgggaacccacgggccttacaattccttaaggaccttgtagtccaaaagaagcccaactttgtatttctttgtgaaactttgagctgaaaagacaacattgagaaaattagagttcaattacagtttgaaggtgcgttctcttgtgatgtccaaggaaggagtggtgggatagctatgctttggaagaataaggatgaggttactctacttgggtatggtcatgattatattgatgtcaagattactaattccgatggagtcatttggaggttaactgggtgctatggggaacaaaataggagcatgaggatacgtacttggaatcttttgaggactctttctgcagataataatctcccttgtgtgtaataggggatttaaataatgtattatcacaagaagacaagaaaggaggcgtgccatatccggaatggttgttggagggatttaatcaagccttggtggatagtaaattatgtgattttaatctctccggttatcctttcacttgggagaaaggaagaggatcgttaaattggattgaagttcgcct

SEQ ID NO: 227698 - DNA, 2531 bp, Cannabis indica
cagatatgagaatgcctggtctagagagcctatgtgtcctcaaattattaaagcaattttgggaaggaaattctaatgaccattacaagagaaaattaaattgtgtagtgtgtagttatcgacttggcataaggagataactgaggattttaagaaaagaattgttggatgtaaaaagagactgagctctttaaagggtcgaatggatgcttcttcagttcaaaatttttagaaagagcaggataatgttttgaagttttggctcaacaagagtctttttggcatcaacaagctaaggtattttggcttcaggatggtgataaaaataccaaatattttcataccatggatagctcttagaaacgtgataatagtattcagaagttgcaagattctaacaggaggtgagtagactggtctggtggtttggaaggggttattacttcctattttcaagatttgtttcatgttggacaagatgggtgggatcacattgttaatggaatttcccttctattgatactaatcaaaatgatgagatattgcgtcctattttttatgagaaaattaagggggctttgttttagatgcatccacataagtctccaggtccagacggaatgggaccggaattttatcaaaagtattgggacattgttggtggagatggtttgagggtagtgaaagatttctttgtgaatggctcttttccaatgagtttgaatgatactaatttagttcttgttctaaaaagaagaaccctattaatatgggtaatgtgagaccaattgccttgtgtagcgtggtgtataaaaaattgcttctaaagttttggcgaattgaatgaaatttgtactatataacgtggtttctgatactcaaagtacattcatccttggtaaacttatttcagataatgtcatagtagcttttgaaggggtgcattacatgaagatgaagaataggggaaaggtgggatttatggctctaaagttggatatgagaaaggcctatgaatgatcttaattgagagccattatgactcgtatgggttttgctactcgttggatcaatctagttttgactcgtgtatccttgattggtctgatattctatggtgcatgatggtcatgttatggaacctatgtttcctacccgtggtataaggcagagagatcttttgtctccttatctttttattatttatgttggaggtctctctactttcattaagagattcgaagtttctcatcttatccggggttgtagagttgctcagggagccgcgctggtgttccacatgtttttcactgatgatagttaccttttttgtcaggctacgttgggctctgctggtagtattagtagcttgctttcttcatttgagaaggctttgggtcaaaagttgaatctgaataattcatctatcttttttaatcctaacataaatcatgatgttcgttctaaattttttagttctttggggatgtctgaggctactgaaggaagtcattatttagggttgcccaatattattgataagaataagtcgaccattttgggctttttgaagaacaagattaagaatcgaattgatacctgggatggtcgattattatctcatccagggaaggaaatcttgttgaagattgttgctcaatctttgcctacatatgttatgagtacctttttgattcttcgtggtacttgtcaatagatccaacaattaatggctaatttttggtgaaagacctcttctagtagaagtcgtggtattgtttggatgagttgggaatgattagcgaaggataagaatcttggtggtttgggctttcattttttgcattattttaatttagctatgttagctaaagaaggctggaggtgttgactaagcctaattctttggattctaaaatttatatggagcttaatttatttgctgaattgtgttctcattgtagctatgtttagcgagtatatggagctctcaagatctggtttgctcaggaatgcgtcgtattgttggtgttgatcaccatgtgaatattcttcatcatccctggctacctaaaaatgtgccttatgttcttactgttgggttccattcttccaccttgttgggccaccaccttaccttaacttccacattagtatgacattgttcgccttggacctaagctctacggttttatttttgggtaccttcccaaaaggtctcgtactaatggagtaggtggaacacttatattttaggcaactcttgcatattcttcctatgtgggacttgggttgataccccaacaatcttccccttaaactaaggaccacatactcgcagcctgccctccagcgaaaccaccttgtgccgccactatcaccaatgaaactcgtctcctaatcatcaactttgtgatcaggaagactttcccctaaacactaatctccatcttctattgttgaaatcattaacgggacatgccacctgaccaccacattatcaggtagacttttgatacaaggcaccatat

SEQ ID NO: 227699 - DNA, 2221 bp, Cannabis indica
ttttgtgtatttgtgaagtaatctctaaaaaaaagttgttcttctgaaatacaaaggcccggcccacacgattaccatcttctggtggctcagtgagttggtctgttatagcttcagactctctctctctgtatcgttttttggaagaagacgaagaagaagaagaagtcagaggcaaattccagaacgatggtggaaaatggaacaacttcaatggtgtcttcattactttttctactattcttttactttccttactctacgatggcttacaggcctggcgacatagtttccatgagcaagatgggtcaataccactctgttcgtaatctcttatcgaaaactcagatttaattgccatttctatactttatcggcaattcatggtgtttagagtttcaattttgtttattctttttgatttatttgtgatttcagtctagaactgtatggcaagacgtgatcggtcgccattgcccaatcttcggcgtcaatcgtgaggtaaatcaacctttacatttgcgattattattactgattatgtctttctgagaataattttttttattatttttctatgtataggttctggttcctatacagaagcccacgggttacactggtgctgatccgtacaaaatgtaagtatagattttactaccatagctgatataattgtgcaatgaattcgaatttgaaggtttctttcttgttttgattcataacgtgttagttgatttagagtttacatgtcaaacttcactaagaaattgaataagaattaggtttaatgatacattatgaacaatttataaccctctttctttcaagttgtagaatgtggatttccggtcctgtaatttgatttcaatttatttaaactgatcacatatgacattatttgcataaagatggaagattttgaattgggagggtgttaatatcatatgaaaatatgaattggtttatgttcagatcatttcaagttggaagagagaagtttttgattccgtggcttcttgtggtaaaccgtaagagttcagaggttccaatgattgatgtgaatttggtaattttttactccaaaatttgtggctttgacagatataatataatttccccctttgttatcagtgccagtgtatgtcaaaagaaaacaaatactgttgctgtaattcaaaattaatgtgttatttcatcgaattttttatgcgatgcagaggtactcaggaggtgatttgcttggtgtcactgctaaagtagtggatatgcctcaccactgtatgtaatttcatgtcactagctgctgctttatattttctttacatgaacaactatggtctattctatctacttgtctaataaatggtagaaaccaaatgatattgcatttaattttttgagaaattataatagacaagtgtcatttaagttagttttgcatggatcgtaatattgtatgtaaccaaatagaactgtgacattatttggcaattacttggaatttcacttctgtaagcttgcccttaaagtttaccctggagagcttgtcttaaagagtaggggttttatcttgtttcctattgtttaaaattttccactgccgtttgaattgggcctatatgaatcatgctgttttggggctctttattactgtaacagtaagtagtaatttcttgtattttataatgaactattggtgttcaggtataaagttgtagttcctttttgttctaaggctgttttcatcatagccttttgtatcatttttccaaacagacactgaggttcatccaaacatccgtcaacaattttgggattctcaacactggcccaagcatgtacttgtcagatatacatggtaaataagatctaatcggtcttgcttcattatgtttgttggttatttcttccaatgttagtatcatttcaattataaaatttttattgttctgaacatataattttagttagaaattgaaattttgttcacatacatatagtgactctagcattagcatcatcaattatatgagacatccggaagcatgaagtttcttttagggtattcttatattacacgccaattctgaacatgctgaagaaaactagactcatagaaataacaaagaagtgaccatgaccatgaccatgcacttgtatttatatatgtgtttaaggcaaccaagattgcttttaattttcactcttgtatttttct

SEQ ID NO: 227700 - DNA, 1680 bp, Cannabis indica
tataaacagcgactccatttttacaagctagcatcaatgggacgaagttttatctctttgatcagtaccaactaaactccaatgtctgagctcctgccaatattcttggaagtcgtatacactttccggtaaggatctctctctctgtaccgtattattctgacaattgtttttcatcaaaagttgcagattgtattgttattccgaatctttcaatttcaattttgttcttgatgctcggtctcttatgttttttatttggttgctgagaatagaaactgaagtaattaggagaatcttgtaaaatatttcagaatttcattttatctctattattgtattttgaatttaaatttgtatttgatcacgctgtagtagaggttgagctttagggttttcctgttgtggattccgtactatcttttctcaaaatcttgaaaggaaaactagggaaatgaaattatgatatagaattttgaaatatgaaagctatgccacgacttttgtgtttattgttttagatagagattacaacttggttttgttggattggtgtaattagtcaaaagggtacattttttttccagttaaattggaagttctttatacaattcagctttatttggtttatatgttgatggtctattttttttttttttttggtagtatatgaagtttcctataatttagttattgggatatgagcttggagtgaccatgagtaaggtatcgaggaataatgtaacgaggaaggtcggtaagtatgaggttggcagaaccgttggtgaaggaacatttgccaaggttaagtttgctagaaatacagagacgggtgagagtgtggccgtgaaaatattggccaaaagtaccattctcaagcatagaatggttgatcaggtattatctctctgttcttaagcaatacaactaacattttagcaaatgtttgtacctctttaagagtttaatatttatatgcacttaaaatgtaaatatattgccacacacacaaaaaatgcaaacgtatgttttcgactaatgatgttaacgaaatcaaccgtaatgaatgtggattgtttcattgtgttttggactccagattaaaagagagatatctataatgaagatcgttaggcacccatacatagttaggttgaatgaggtatatgcttattccttttcagactataactcagtatattgttaatattatttcccaatccttttaatactcctttctgagtttcaggttttatctagtcggacaaagatatatataattcttgagttcgtaactggtggagaattgtatgacaaaattgtaagctatctttattgttatgttgatgtcggctgttaaatatattttcttctgagttcacaaactatcactagttttggacaagggattttaagtatcagcagattacttcatataagttttttctactaaaattttatgaggtgtattggttccaggttcaccaaggaaagcttcctgagagcgaggcaaggcgatacttccaacagcttatagatgctgttgctcattgtcatagtaagggcgtgtaccaccgagacttgaaggtgcacattaatattttttcaccaaataatttgttctaggaaatgtgttttaaccaatgaatcactttgttttttcttggcatacagcctgaa

SEQ ID NO: 227701 - DNA, 1951 bp, Cannabis indica
ttagatgatatttcttttttattttgctatgtataatagtggtatataattttgttaacataatataaatattttaatgtatataaataattttattggcatgctatgtatatttaattattatttttatatattttaattatagatatatatttatttaaaataatatttatttagtttctattttattatatacaatagtgctatataattttattgtcatggtatatatattttaattataggatataatttaattagtgtatacaaatatatattagtaatatgtatttttcactaattttaatgaataagtttttaatatattagtaatttgatggtgtgacaagagaatgaaaactagaataacatgtcactcaaaaaatagtgcaatatagagtgttttcagcgctcctcttgttctattactattatttattagtcaattttagtctttttgagaattgagaaacagacagaaacttgttggtcggcaccatctgtagtacaaaaacaaaaaacaatgggccacggcgaggcgaggggcacaacacaacataaatgcctatgagaataataagatatggacaaaatggaccattacttacttccaaccatcttatttcaatcgtttcataaaccccaaactcaaactctctcaaaagtattttcataaaaatatatctcatctcatgaactaaaaaatctgtccgctaaatatcaacaaaaaggtgcaatcttgactaggaatcatatgtatcacgtggactccacttcgagaacaatcttcatgaactcgtacacaaagtaactaatggcagctgacggtagaacctgcaatttgtaccaagcaaaaataaataaacaactaatatatttggattggaacaacactcaactatcactggaataacatacctgtaataagctggggactaatccagcatagagagcaggaacgcctccctgctcgacaattttcacacaagttgagaatgcacttaaccttgttgcccggctttgcatttgaagttgtctcctcacaacttcaaatgggtaagtagcagcttcggagcaaactccagcaattgctccatacagcaatgttctgacagtacccaattctagttgttccaaagcattcagttcctgaccttcttgtttcatatgttttagtctttccctcccttcaggtgactgaagatatgctgtttttaatatatcataaacaccgtagaacacagcaccagaaggtgccatgcttacaattgaggggcctagacccttgtaaagcgagaagaagccttcagtttgaatcatatggcgaaaagcaccaattacgcctcctaaggcttcgccaccaggagctaccatccttgttctaatctgaaagaattggaagttaattatattgagacttcaaaataatatgataatcaatatcaatagaaaaatcttcagacagcagcattaatggcattcgtcctatttccaagggtgtgtaggggatgacaaatatgtttttgtgaatatgaatttaaacagatcaaattggcctgtcaacaagctttatttcaccaattgaatgagacatttagccacatatatacaaacaaatgaccgtgagaatagcctctacgccaccagtaaagttatcaaagcatgaagtttttcaaaaaacattgttacaaaactcgagtagaagacactagtgatcagcccaacaatcaacgtattcacaacatttgattgctttaacaccataaaattaagaaaacattcacaatttgtttcactactaaaagttgaaaaatacattgagcaagccagtagtttaatttcaagagcttaaagacacttggtaacacatgtaaattttaaagaaaaacatctataccgttgagagaaataaaaaatcatgtgaaaccaaagacaaccagttggtctagct

SEQ ID NO: 227702 - DNA, 2328 bp, Cannabis indica
actaattatagtttgtaactgtttgtagtcatcaaagtaataagattggttgaaaataaaaataaatgtgagaagataatgtgtgtaaaaagccaagtttgaaaaaacccatcctcagtctaacgaagatagtgtgtgggaaagcatggtttgaaatgtcaatttttttttcgcttgagtggttgtgatgtgcgattaaactaattgtttgtttttgagagataatatttgcgttttgcacgatatggacatcactaatacaaaataatatgttattagtgaagtctgaagtgcgcttatcaattagaattataaattccttactgttactgagatgattctttgaaagtaagagtagttaatttgcacaaagtttgtatttttttctttaaagtaatgaaaatttatatatgtatacaaattattattttatttggctgaagaaaatataattatttatttatgcttatatgagttgttgttgttgtcgtctctagctattactaaagtttgtgcttattccctttgtttctttttgtctcatgatgtaacaatcattataatatataatgtaaaattacagtgtttctgatttaatagatattatacaccttatttatgtacaaaattacaaaaataattacaataatattctattttgccaaatgtgatggtccctaatgatggatataatatatatgcagtttattagaaaaaaaaaatgttgaattttactaaattatatagacaaatcatgttcaataatttttcttttaaaccgttctggatgtagtatacagtatactatctctgtcactatgcatattccgtaatgtgcacaaacacttaaaggtctggtgttgaacttaaaccattggtttgctttagcaattaaactaataatgagaattgatcagatttctttggcacgtaacaacagagtagttgattttttttttttcataaaggaacagagtagttgtttaaagtttaaacaatagttattgctaccttaaacatatttcaagtcatctacactgtgtgcacaaatatacaagttacagactttcagtatcaaggaaacaaggcttagaatttcaacagatcatgtcctgttactggtttatgaaagcatgaagccaatttgacatgcggtttgactttttcaagaacagattgccaatctaaccatgcacatatacatgatttctaatccatgtaaatttagtcgagtccgactgatggattcttgaaattactaagagatgtttagcgttctttcgagagacgagatatgaactaaattttctttacatgcaataataagttctttggcattatactcaatactcatcttggcagaaattcggtaattgtcattccattattgacagataaagtattggttgggattaattcttggtgactagtaagtcgacttgaaacgaaagcaggtcgttcaggttgagaaagactgggagcttcacttctgagcgttgaaacaacagatgacatggtaggcctcaagtttgcatcttcttgaacacacaataaagcaatgtgtacgtatctcaaaaattcattaggagtacatgaatccttcaagcacgcatccatcaaatccaacactttcttttctttccataactgccaagcctgtattatatgtatccagagagaggttaatgaattaaagggtaaattgtattttgaagttaagttaaaaatcgatcatgtttaagccacataaaccttacataagctacgagacctggtgcacaattcccaatatgaaagctagagttcttcctaccacttaaaatctcaagcaacagaactccaaagctgaaaacatcggactttatagaatataatccctccatagcatattcaggagccatgtaaccactgtgagagagaaagaagataatgtaaaggaaacgtttatatacatattgttagctatgttcatgccaatgcctctcttttgatctgctttacacattcaccattgtgttcactttgatcacaaccagtaagagaaaactatggaagcttttcggtttgagctcaattgtattgatctgaattatgagttattacaaggcataatcaaagaatgattacaatgactatttataggctatggacactaactaacataaccgaacaaaaggttttattggtcctaacatgagatgaccaataaggacagcaattaacactaacagtacttaactatactatcactaattgtattaactgtcactaagactaacaagttatccttctatttaaagattatatatatatatatatatatgtctc

SEQ ID NO: 227703 - DNA, 4065 bp, Cannabis indica
tacttaatttttacattaagaaaaaaaaaatcaatcaatgacaagtatggattggacagaccttttcacatctcaacaccttttcaccaatgaaaaagttgacatcctcccatttaatcatatctccttcggcgagccataaattgcttgtcatagaatccaaatacaactgaaaatatgaaaattatgatcaaaatgtaggcttcaacaaagtacttaaaagaaagaataaaattaagaattttaccatgcatgtagcgaggtctaagtatatattctatcttcagattaggcacgcatttagttttgggcaaaggataaccacctatggacaccgaagtaagtgtgtggggtagtccttccggtaagcactctagtttttgtaagccaaaaagactcaagttttgaagagatgttagttgttgaaagccttttccatttaaagcttcaaggctttcgaaaaattcgattgctagatatgttaaagttggtggaagcagccattcctctggaaatgaatccaccattccatcataattgtacaatactaactctttcaatgaagagtggctttgtaaattccacttggtgcgattttctatgagcatatgacatgagacaatacacagatttttcaaagcaaagggcaatcccatttctgaaagtgactctagacttgaacaactttctgttatcaacatttcaaggcaagggtatgcagcatcaatgtgtactgtacttgttggaaatatagtcaccaagtcattgcaaccgcgaatgtagatagattccaaagacgggaaattacaatcaggtaaagccacatttaacttctgacattcatttaacttgaataccttcaaacatgggaaaatctcaccattttgatcatctgcattagtaaatgaccaatccaacatagtcattcctttgagatgtaaatgtgttaagaagacaaatgacttatttaaagaaatgccatcattgtggatgtgaaggcaatcttcaatttcaagatttgtgagtgaacttagcagccgaaatgatgacagcagcacgcaacaattcttacaactttctagagcaacatgttccaagttacaataagatggatgtgttacccaatcaggcaagctcgtgccactgtagcccttgattgtgagtctcttcaaatttatgtgtggttttagtgcatcaagaacttccttggcttttgatgaattatcagcttcactatcccaattcaaaacaagcccggtaagatattctttgctcttcaagcttccttccaaaacatcactagcttcttgaacatactcaaggcctgaaatacacaagtctccatgcaaattctccaacttacccaactctttgatcctgggcccatcattttcacacaaaacaaaatcacttagtgtctggagattgaccatattgcaaatcctcggcggcatctcttttaaaggtgttcctttgatcataagatgacgcaagttgattagcttagaaatgttggcaggcaattggatcagctctgagcaacttgacaatatcaatgtttccaaattgtacaaaacacaaattgaagtaggtaattctttgatgtttgtgcctgagacatccacatatcttagatgcttcaaatttccaattgaagcaggcaattctactattttagatctaggtaaagaaagtgttcttaagcattctccaaccttcaaaaccatttcaactgtcgatgtgtccccgaatccattactattatgtgacaataggccgcgcaaatacttcactttggataagctctcaaacaatctcacttgattccccgagtcatgcaaatatgaaaaatggcgaatcttgcttgtaagattaagtaggtcttcagaattgtcatagctacactttcctgatacaaacatagctagatcatgcatgagatcatgcatagtgaaagaaaattcatcacttctagatctttgtaagaatgatcttgacattaaaacattcaagtagtcttctccaacatcttcaattcttttccctttttgaggttgcaaaacaccttctgccatccatattaagattagtttttctctatcgtatctttgaaattcataatccttgggaaatatggagagataagaaaaacataactttaaatatggaggcaaaaaacggtaacttaaccacaaagctggaacaaatccaatattgcaacaattgggaaactcccatacaccactttgcagtacatgtttccactcctcgcgagttgacatagatcgtaacaaaccagccatagattttacagctaaaggaaggcctttgcactttttaacaatttgctttccgatttcctccatctctggatgtaccccacgagagccgccatcaatatagatgtgctctgtaaacaacttccaacaattctcatcacatatttctccaagctcgtaaggttcaacatttgtcatcttcatcattaatgcaatatctttgttacgtgttgtcacaataatcttacttccttgttgaccaaattcaaaagagcttttcaaagagtcccacaacaaataattttcattccatacatcgtcaagaacaataaaaaacttcttaccggttaaagcattttgcaaatcattttgaagttgatgttgctcccttgatccacatgttgttttagtgatagcctccaaaattacttttgtcagtttaaaaacatcaaaatcatcagacactgtcacccatgctttcaagtcaaagtgttcttggacattggtatcatagtatacactttgagcaagtgtagttttaccaataccacccatccctactatagaaacaacagagatcttgtggccaccaaaatcatcatcatcagacaacaatagcttaacaatagcctctttatcaccctcccttccataaatcttggaatcgtgtagcaaaggagctggtgatctatgcagtgctgttgttttatggctaactttcttcaaaccaagacactctttttgagctaaaagatggtctaatgaagcaaggatctcctctagttcagatttcacagcattgtcaaatgaactaaacatggttgggactaagttcaagaacttacttgctatgctttcggattcatctttctccatcttgagtcgcaaagcttcagtactaatcttgtccacgacgtgatctgcttcataaatacttctttaagatcttcaagccacttcttcacattgtcgtctccaagttgcttgtcctcggcatcatccaggagcacattagcagacaacaacgtagtctccaactgtttgagaagctttggaatgtgtttacttcctctaaagtagtcaagaacttctttagaagcaatcctatcgaaaaggacattgatgaaaccagagagaagagctcctcccaccatcaaatcagccatggtttcagtttgatcaaatgaaaaacacaagaaattatgaataggcagagaattaaggaattaagtttgtgttgtagtgaatgaactttactctctcttttttcaagtttagatatcaataataagaagagcttaattaattaattattgtaagaatctttagtggagtaattatataatattatgtctcttaacttttctttaaacttatcttagaccaaataacatgcacgcttgtttaactttttataacttaaaattgtttttgaaagatggtatatgcacatggttctgctttgattttagagtattataatatgtggaatgtacgtattacattggatgctacttcaaaaaaaaataacactaataattataagagtattttacgatataaatactcaagtttaactcccagtagcaaataaattcctaagtttactaaattatgtttttggaactctgtaggtacatgaccattaaatattaaatcattatccacgtgtcattttcttattggtatatttaaattaattttttaaaaatttaatgacttggaccaatcaggaattgtcacgtggcaatttacttaaccactaaaaaaaatcttacttttagtc

SEQ ID NO: 227704 - DNA, 3737 bp, Cannabis indica
gtaatgggttttatttagggcacaaaatccaacagagtataggttgatatatggttaatggtactatcgtacaaacgttctagacttgaagttagaacttgaagtttccttatcgatggatagtattacaataccctaaatattgctaaaacataaaaaactagggttccaaaattactaaaatcggtaaatcaaattcccgaaatgaaaaactagcttctagggttcttcctggggaaatggttaacccgttcactgcaggaaaccctaaaaacttcaccatgaactaaattttaccccaaattttgccaaactctcaagaccacctaattaagctacaacaaatgtaattgaagaaataaaaatataaataagcccctaagataaaattcaccattaaagagcaatgtttgaactcaaaagctcaaatcttgtctaagcccaacaacaaggaacaaaagtgtaagtagataccttagtggggcgtgcgagtgaccctgcttctcccatggcgaagaagaaaagggtcgtctgaaagctagcatcgtcgagcacggtggtcgtcgaagctgatgaggagcctccttcaatcctggatatagtcgctgaaccgtcggcgggtgaagagttccacgactcagtggaaaacctggagaatgagttagggctggagggaggttcgacgatcgcagtccgatcccccaaatctgtaagctgggtagaggaggctgagaaggctgattaccagaccaatgcgagcgagatgtggagtaaattcaagtccaatcaggtaccaaccccttctactagaccttcctatacagaacctatgatagttggggaccaaattgtttctaagctagatttagatgaagttgaaattgaagcttctttctggaaaaatgccattatctgcattgtgctcggagccaaccccccttttagggtgtttgaaggttttgtgaagagaatttggggtaacttaggggttgagaggattgtctgaatgcattcgagatttactctggtcaagtttagggatgagacaactagagatatggtgttagaagctggtgtcatacactttgacaagaaacctgtgattttgagaccttggacaacagagatggatgctgcaaaaatgatcaattcagtgcctatttggatatgtttaaatggtctgggattcaatattgggggaagaagaaccttagtgctttggtcagcactatcgggaagcctattatgatcgataaagtcacccaagatcgatcaatggtgaagtttgctcgaatcttggtagatatggtgatatcagaggatccactgaaattgatttctttcatcaatgaaaggaagcaactaatggagcaactaatagaatatgaatggattccttccaagtgttcggcctgtgggaatttgggacatatagtggcaaattgccacaaggaacaaccagtggtttggagaaagaagcaaactggtgatatcaaggctagtagagaggaaaagaaggagaagcatgaacaaagtgcaatgcatgaaatggcaaaaaaacaaccagggaacaatataagatctgaaggttatggagagggaccgattaggcatgaagctgagatacagaaggaaactgatttagaggtggtaggcacatcaaacacttggatcaccctaaagagaacagttcagaaatctaattcaagcccataagagattgctacaactacaattaacaacaacggttatgcgattttgcaaggagatgtagatgaggtaatggttcccaaccccaactcagattttaatggaagtttgtaacataattggttggaatgtaaggggaatgaataagaaagaaaagcagagagctattcttgagatttgtagagtgaataaagttggttttggtgctttgtttgaaactaaggtgaaacatgaaaaagttcaagagataaagataaataatttccctaactggagctatcattgcagcctggttctctctagtagaatcttactgatttggtaggaaaaatttgttaatcttgagcttatagatgaagataagcagctggtgcactgcagagttaaagtttgtggccaacagggcactttcatggcaacaggggtctatggcagcaactctatggaagaaagaaaaagtctgtggcagaaattagaaagttatggtcagattcaggaaccttggataatttttggcgatttcaatgctatgttctcgtttcatgatagatgtgggggcaatccgattcttcccagggacatttgtgatgctcaatcctgactttccaatggtcaggtggaggaatttaaatgctcaggtgcttactacacttggaataacaaacatgaggtgggagaaagaattttttcgaagcttgacagagtcttctttaacaatgaatggctgagatgttttgctgaaattgatgcttgtttcaaatgggagacagtttaggatcatagcttatgcttcattggaaaccataaggtgaacaaagtaggtatcaagcctttcaggtactgtaatcattgggccacttacccaacttttaagaagactgttcttgcttggtgggataagcatacaggaggcagctgtcttgacaagattgttaaaaagttgcttagagtcaaacatgcgttaaagaagttcagtagacatgaagttggagatatcagggaagagtatcaacaggccagagatgagtactgcagaattcaagaagaaacagttgcaaaccccggagatttaggtcttcaatcggtttctgatctaaagcagcaagagtttctaagagcccaaaatagatataaccagttcgtgggtcaacagagaaaaataaaatggccgaaatttaatgatgaaaattctagcttttttcatgcaactatgagaaagagaaggcttgaaaatagaattactacctttgtgaaggacggtacagtagttgatgattatgaggatgttacgcaccactttgtgagccactttgagaaattcatgggtagtaagagctctgcttcaacctttattgaggaggattgcattaaacaggggatcgcttgaatgtggaacaagaagttaggcttattcggcctttcactatgggggatgttaagaaaggaatgcttagtatccattcttccaaaagcccggggttggatggcttcagatcaagcttcttcaaggacttgtggagtgagatagggaatgacgtctcgaaggccattttagatttctttgacactgagtatcttccaaatgagctgaatgaaacggtgatctccttaattcctatagcctgttgcaatacggtttacaagtgtattttgaagatgatatgctctcggcttactgaggttctcccatcccttatccaaggaaatcaaggagccttcatcaaaaatcgtttgctggcccacaacatcatgatcttccaagacctcctaaagggatacacaaggaagaatgtctcggcgagatgtattttgaagattgatctgagtaaagcttatgatacagttgactggaagtttgtggaagacatgcttaatcagctttgtttcccttctagatttgttaattggataatgacttgtctgaagggaactaccatctcctaatgaatggtagaatacaaggtaaattcagaggtaaaaaaggtctccgacaaggtgatcctatgtccccacttctgtttgtgcta

SEQ ID NO: 227705 - DNA, 4575 bp, Cannabis indica
ttaccacctggtttcaggcgctcgattataagttgtttcctgtcataagtccatggactgccattgatcactcttctaaatcaatttcgtggtaaaattggaaaaggaatcggttctgctctagtatcttcacgtacatgccttttccgggtttccaaagatcggccattatgttttggaagacaaggaagtccgaaactttgcctgtcaatagccttcctatcaaacaccagcggtcgtccaaatcgggttctgtttcatcaccgtcttcttcgtcgaaaatggcctctgtatcttcttcttcgtccagacacatatcagcccatttcttagatagttccccatcgtttctgctactggaagccatggcttaaccaacaacactaagacacaatcacactcactcaaatgtgaacagcaaaagacaatcacactcactcaaatctgaacagcaaaagacaaacatacacgttcaatagagaacgacatacacacgttcaatagagaacgacatataactttttttattagtgtttttccgtttatatttatatttaactctttaccaaatgccaagtagtggctaatatgaagtatgtacttgtaccactttctctctctatatatattcatttatattattatataaatattaatatgttagatgagaagaggtggatgaaatgtctaagcacctttcagattcttctattatataatttttggaagaatcaaacccaaattgtgcttataacattttgtaaacatctaatcaatgattataaaatcattaatttaaaaaaagatgagcaaaatgacaaaagagttaggaattttggtgtttaagaatcaaaacaagaacccgctccctctctaatccctataattatctattcctccactcatgcacattgaaatgatcagaaatgcaaagatttggtcgtctatgtcaagtgttacatagaaaaatatatcccaaaatgggttctttgtcatcatcaacttggaaaattctatgatcaagaatcttataactaatgcctctagaaaatattatcatcctctgtaaccctctttaaaaaatccaacaaaaacgacatttcacgtgaacgattcctatgttttaagaaagagttagaaaattggagaaacatcaactaggtaaaaggaaaatgacaagtcaacttataaattatttgactgggttgccaaatttgatctaaagtaacatcaaagaaataaacaaaacaatatggtcacatttcagtgactaagaaagaaagataaaagagagtaggaaaggaaggaggtaaagaatttctgcacatttcaaatgtctatggtgaatcgtacataacaaataacaatatatgttctaagtagagctctccccatttcaatgggatctttaacaaagcaaaactcagggaactactcctaaatttgcaaaagatgctaagatatcaaataaaaggggggaaagatatggggcactaacaaaaatgaaacaaagaaggaaaaaaaaaattaaagtggtgggaaaaaatttgtggggcaaaaaacataatatatttgagttgagcaaatggaggagcctgtcaaaagaacttaaccttcctcttccttgcacccaatcaatcagcataatggagttgacacaggcaggcagtcttttaatcttcagtatctcacttttattcggaaatatgcgctaaaaaatatcaagcaaaacccccccaatgggaagaccaataatactatatccttctccaaccaaaaaaatagacggatttctatgatacagattgaaagaatgagtctcatatgcctgtgacagaggatgctggtcattgtctgcagatgtggaagggatgacagtacatattgaacaggggaacttatgccctttttgacaattcttgcttggattgtctgtcttgctgcaaaaaactaacatgaaacctgtatcaactgtgatcgtcttccattttccggtatttcgctttagctcttcttccagcttgatgactatgaatccaagatgtggcagttcctgataaaatcattggagtagttgacatactttgtccaaaacggccgaaggtgctcaaaaccaatttgcaaccatggttttgactggccattgtaatggataactgcagccttttttactttctcaatgctggttttattttgatagcccaatccgagcatgtgccaagatgggtctattggatgaacatgacctctaaatgctattaaagccggtggtagcgttccaagcttccacaatgtcaggtttgacttcagattctgctttgaaaaacccacaaagttagaagagggttaaaaaaacagcaatctcaatatttcgctatataaataattaagcaacataaaaaaacaaaaccgaatacagccctaaccaaatttactttgctcagcaaatcttcttatatcttttgttagtgctattctagattaagaccttattcattgtcaactaaaagtgaacaaaactgccagcttgcagaaacatagagtaaccctaacaaagtttacttttgctcagcaaatcttattatatattttcttagtgctaatccagacaaccttattcattgtcaactaaaagtgtacaaaacttccatcttaaagaaacaaaatataaaacaaactttaattgtctgaaagtgaaactgctgccttcaaaattttataatgtccacacaaaaaatatgtttagccctactatgcggaatagagcatgaagctgacttggacagaggcacacacacacaaaaaaaaaagcattacacaattaaaagtttatgttttgcattaaaaactaaaagtaaagtgtcatttctagactctcaatttacttaaatccataaaaatggagcaaagaggaacagtcttccaaatactaaaactaatcatatagtgaaaaaaataaaaaaggaacagtcacaatatactaaaatcatgaaaatggctgattgaatttacctctctgacccagtaatggtatgtctctctaatctttgtcttcctccaagtcttaagatcaaagatattcattccataagcccatgcacattcttcaggatctatattctttgccacaaggggatgggaaaaattaaagtaattcctgaaatgcttagacattacccactcatcttctcctctacaagtttctacagctccattaacctttccttggaggtcgatttcccaaagcggcgataaatcttgctggatcacaatatcgtcatccaaaaacacaaccttgttgaggtttggaaataactgtattgtggacataattagcacttcgatcataaagattttctttttaacaaaaaatatattaaaaataaatacctcaggtaaatagatccgcagatgattgagcaatgatatatactttggacttctagcctgcaatttagaagcaaaagttcgaggagatgtatcactgagattggctcctgctacatgattcccatgataataatctcttatcccattttggttctctacagcttcgagcacaggaacattttctctggttaaccagtcaaactggtggacacctttgacctcaacaatggcaggggatacagggtttagagcaaaccatgagtgcatacccgcatatgttttcttgtcagtaatgacatgaaaaactatcttctcggggactttagatgactggacagcagaagtaacaacaactgaagcagccaaaatgttatcggttgccagtataaaatggtggtaagaattgtcagagagcaaaggtagtaactcaggaggaggcaactgtttgcgtgcgtgagcattggatgaatattcatcagtcaaacgcagagaaagacaatggattcctttaggtatggaacttgcagcaaaatgtttgttcatcagctcagcaaacttggactctctcatctccttttcaagtttctccatctgtgcaataataagcaagcacttgtaagaaacaatttatccctagatttacgacagcaaggaatcctcgcagattacatatattatccaataaaacaaagggaaaatgaaaaactatatttgcttcgaaaaaaataaaaaaataagtgacaaaatgaatctggcacatgtaacataccattgcccttaacataaaagcaaaggtctttgcatcatattggttgtccttcatttcggaaacaagattactaaatgaatctggcaatttcaaatcagttggtatatcttcagcgtttacttggttaagaaccttgtagaagtctctgacaagtttctgctgcaccatcaaaacaaaataaagaattcagcttaaaatatcaccaaagagaatagttaaccaaagatctagacaaaaagagaaagaaaaacgtataaatacaatttgttagtcaaaacaaaataaagaattcagcttaaaaggaaattagaaaaaaaaaaaaactaggactcatagagaaagtgttttaccccggaatcatcaactctaccaagaagccttggtcccaacgtctgcctaacaatctgagcatgaaa

SEQ ID NO: 227706 - DNA, 1582 bp, Cannabis indica
agggtgaggcagcctgtgagaatcaagctggggaaactcaagctttcaaggtcagttctggtgaggtgcaactcgatgtcgatagtctctcccctaataataatattagaattcgtaatagtagctgtaagtttaggttcaggttatagattacattctctctctaatctctgttactattctacacgtctttccttatacacacattaacagagttttctccctaattttttttcttcccatgatatgattatatagcctatatatatatacatttatttttttatttatttgggatatttcccctttacttggattattgttgattgctgtttgcaccttatattatatataccaatacaatatacattatatgtgtttgcgtgttctctttctcttcagcactatatataacgataatcacgccactctaccttggttttcttttttaccatttatgcatagatacaagtgattaacttgattttgggaataggtcaaaaaataacaaaattgattttggatcttggttggtaaccagtcattatgtatatgatgtaaattgacgaaagataatatatgccaaaataatattaaaaaaaatattctgaatcttgcgaaaagcaaagggactaagattatatatataaagtctactataactacaataaggaaatatttaaaatattgcaaaggaaaatattcggttctctaacattgtttattatacctgttgcaaaggaaaatatttaaaaacagaaaggattgtttattaaacaagtacataacatataaatcttgaattccattaaatcattggaatggttctccttgaaagaagaattttttaaaaaaattaacatgatgacaatcgtatacgactgactatccaagttaggtgaccaaccaagataattaaaaaaaaatgttaaaagttatcattagtgtctagtaatttttaaatctaatattattaatgaaattaaataccatatcttatataatttaatgtaacaacttttaaggctctacctctaagttgtgctatgcgatactgatatctagtaagaatgtttataattaaattaccaaatcagtttggttttacttttttaactttaaaattgagggaaaaatgttgtagacccccttgaattggtgtttcaatggacctaaattttttttggtattcagctaagtttatttttattctatttgtttatcgaaatttttagaaacaaaataaaaataataagaattgaagaataaaataatgaatagagaaagtgtatatagaatgagacaaaaaaaatttaatgtggttaaggcgttaattagtcttagtccatgtttcagtattattcaataagctttttcttgtaaatgccttaggaaatacacaagatgtatgttcttaagtttgcctcaataaagtttgcaagagagttcaacccttaatccatgagattaatgggatatttatagtagtttgagaattaccattactacaaaaatagtttttcccgacgtttttaaacagtcgtttaaagtattcctgtcggtttctataactgtcgcctat

SEQ ID NO: 227707 - DNA, 4866 bp, Cannabis indica
agagctatgcaccgtgctgactctgatcacagtggctatgttgatatcaacgatcataaagagttggaagaccttgttgagtatgcttatcaaattgggtataaagttaaagcttattaattaattaattacgtatactacgtagatgtaacatgaatcatgcatatgtattatatacacactatttctctattatattaatataatgaattaagctcaaatgcatatctatatatgctgcccatcgactatatctattttctattttatataaagtgtgcctatataacagaattcttggtttttgagaaattcatgggtgactttttttttaacaattttaaaatatttcaaatatcgcaattatattctttattaattttatgatattattatatatatatttaaaataaaattattttttttatccctcattccctctgccctaggctcatttttagttaaaatcattaaaatcaatcgaaataacaattgtcttctccaccattaccgcacccaacagacttgctacttttcttcatcgtcatggacctcgatcaaaaatcgattcgcaatcgcatcatccaaaacacatctttgatagttaaaaagactctaatcacatggaagagattagatattccatgctctctcatctttatccgcaccactggcaaaagtaaattaaattgtcttacttttgaagtctttgtacaatatatgtattttatttattgcccacgatcaaagacattgtaaagaaacattttgttctggtttagatctttctgttccgacccaattaaaagatacatataaatatatatatatatatatatatatatttcaaactcatttcactctttatttcatttggactaaaaaagtttgatttttatttcatttttcagatttacaaaggtctccattggagctgcatgtgggctttcatggtcgtccgatcgtcgcgtgattcaagtcccttacgattcaactgacccagtaattaagataatacttttttctaaaccacattctaccaaacacggtcttaaagtttggatttttactatttttgataagaattgttggtgaaattgctaataaaaattgtttatttattactgaattagaagaagactgcaacagaaatagaggtagaagaatcgcataattaatcgtactttgactgtgaagaattgtcacctaagcctaacagttatggacaaaattgccatataattataaatttttcaagtgtatatatttatttaataggtttaacgaagttgattcagccatacgtattttgtataatgaccgcaaaatttaattttttttttcagtttctccacagttgtatatttagcgtactccacctctaataactttttttggggtaattttctgaagcaaatggtggaaactgagggggcaatgtagcatcccatctatgttggggtttggtagagaaggccattaccaattctaataccacgtaaactgtagttatatttttgaaggaattaatattgttttacattttacttgtaattaatggatattgttgtcttatgagaatcagcatcacttatatcaatgcctatttttgaaatttgttctcatacccaagtgtagtactgggtttgcatgatgggtacatgtcaggcccacaatgagcagaggcggtttaatattgagtttatgttatagctttgtgtaggtctgggacaggcgttgcttaaatgctaacgggaaaccagtaggagtcttgactggacacctggaaggtattaccttcatcgacactaggggagatggtcgttatctcatttcaaatggtaaagatcaagccattaaactttgggatatcaggtgaatgtcatctaatactactattaggtatgcttatctcttggaatcttcattttgtttaagaaacttctgatacatactatctttgatcttgattgtataatttgtaacttcataaaggaattaatagaatttggatgcaagtctcatagtcatatgttaccatctgcgaagggagttatagcacaaactagcttgggatataggaacagtgaattgtgagaagatattgctatgttatgttatgagttcggtagggatctgtgacaaaggtagtatagatttgccagttatttttcatgtgaacattacatatttaaacattactcgaagctattgacatcaatttgtaattttggtcagttgtgttgatatgagaattgcaaaatcaaacatttgagagagtgcctagagtaaaggattgaaagaccttagttttgttgaactatgtctggagggaatattttaataaggctacaatatactttaagcaagcatatgacgagatttttctcttgccaaatcatatcatcatgtgtctctacaatcatttgtaggtcttatataacatcttatgatatagaattgttttgtagtaataggaactagagaatgaactttatctcaagtctttggaaatggctgctaaggtacgctcaagtgtcatgtacggaaactctttgtgctttttgctgtcatctaaatttttagtctccttaaacatatattcaagtgtaatggttatatttgattcttgatagacatcaattcttgtgaatttaaagtcgtactagaatgtagtttaagagaggtgatgattatgtcttaccatttggcatatagaattagactcctgtggaatggttaatataggtattttcataaagtatagggaaaagttaagatgccttaatgtttacaagtgtggctgtacctttttaaatttctcatctttgtttgtttgtctcacttattttcacccattaagtaagcgtctacctcaatcattatcaatctctaattattgattgctattaatggttttagaattatagctacaccaaaaactcctttcttatttcagtagaacaacacctcttagtattataccttgattgtttgataagaaaaatgaactatcttactgtacattatttgtttgagaggtcaacttgttatggtattggatttgcccactggaggagatgatgatgatgattgtggagtggtgggtggagcgaacagagcagatagaagtagatagattcaaattcaatcatgaatatggataatatttaacagtgtttttatgttttttttccttaatctcttgccaatttaatcatgactctcatgtatttatttatttttcataacagttatatatatttttcataatgtgtataaagtattaatacatgccaataatataagtttttctgtttgattttaatcatagttgtttattcagaaacacttaaaataaaacaaagcataagtgtcttgcacgtagcagatgtccttaaagtcttggaagatagagatctgaaaacactcggcctgccaaattatgacaagtgattgacacattccaaaaataatatttttaattgtatcacttttaaataaagtagaaaatacctagcataaaatttagtatacgtgcctcgcacgtagttttttactagtatataaatatgtgtgtatctttatggagaaatattgttaaaagatactaatggtgcttagtattttttttggtgtcatattattattgatgtaattaaatattgctaactaatcgtaaaacgttatttaagtgttggatactactggtgtccaataataatactcatctttaaataatatgttaagacctgacaaaaaaataataataatatgttaagacaaaaaagaaaaggttaataatgatatatatcttaagaatgattgtcttattcctagcatttgttttgttgtagatgtgttttctttttcttctatatacattttatggctttggttggatgggcttctaaagctgcttttgagctgaaatttcaaaaacacttgtattgcaatttggtaatttgtgaagctgcttttgttgctttcaactcaaaaaggttattttaacaaaagccagaaattcagccaaacaaaacctataaataaattgattttttactaattataaaagactaagtcaacattaattagtcactatttcattgttattttgaacttgatttatattaactttcctagacattgctgtaacaagaaagagaagagaaagatatggaaaacagagagaaacagagagaaagagagggaaagagtgaactgttatattcaatgaataaagagtgccatacatgcttttatacacaggaatcattaacagaaaacaaagagagaagtagacagttaggactctaacaaactaaccaacttctctaacagtaataacagaattgacactcttaacactccccctcaaacttagaattgatgcatcttcaattctaagtttgtgtctaaagttgctgaatctgttgctggaaatggacttagtaagaccatcagctatttgatcaattgctggcacatgtctaatatcaacaacttgctgcagtatcttttctcgaacaaagtacaagtcgagttcgatatgcttcgttctagcatgtagaaccggattagcagtgagtaacactgtactgagattgtcacaccacacgactggagtcctgggaatggagacatgcaattcgaacagcagggaacgaagccaagttatttctgctacaacatttgctagtgatcgaaactctgcttctgtgcttgaccgtgacacggtatgctgtttcttggaagaccaggcaacaagattagaaccaaagtagattgcataccctgaagtggatctcctatcatcaacatctgctgcccagtcagcatcacaaaaggcagctatctctgtatgtg

SEQ ID NO: 227708 - DNA, 5108 bp, Cannabis indica
ttaaacaacatacttgtgagtagatctaagatcctggtaaaataaattccaacatgcagactatgactcgattagagagaaaaaaagtcaaccacttcatatgttttcttgacgaattggaactgtataagctggaaggtttagttacagtccatggtttttctttcaaccacgaaagcagagtttatggaaactatagaagcttttaaggaagcattatggcttcacggaatactttataagttgaaacaaattaaaggaggagtgactattattcagataacaagtaattcatccatctttgtaagaatctaatttatcttgaaaagagtaagcatatagatgtaagactctattagattacggagaagatagaagaagagctagttaatttagaaaaggtcagtactgaagataatcctactgatgttgggactaaggtcttaaccataaacaagttcaagcattgcttgaacttgatcaatctcaaaagtgagtatactgagaatcctagaacaccaaccaatgatgtctacattctttcttcatcatcgtcgttctcttaatttgaagtaacttggtggaagttgttgtacaattcctccaaattaaaagttctgcaaatgcatgtcatttttagaaagttgttcacttgtagttacctctctcgaaaggagtcatgtggaatgatagtcgagtcctgatatgagttcctagaaggctatcatgtcctctccgagtttatctttaggatagctagcctttctttggaatggagttccatttggctagttgtcccttattgaatggtagatttggatagttgactccagtaggctctatcctatctggaagcgtcttcaagtaattattcgtggtttgtgagtccaggagctcatatatgttcccggaggctctaataattaatgctgacgtggagactttgctgaaataggagttggttaagttagttatttctaactaacttcactacctcgtttcttgtagccactgactttaggatcttgatcctaagcctatgaatgctacattctcttatcatttcgatgatgcgcaaaaaagagatgagatttagagatttagagagagaaagattgataggtagagagagaggtgcagagaaaagagagattgagttttgcctaagattcaggtgaaaacttctatagactggtcatggacgatgactactgcacaaatacaaatggcaacatcagctttatatggaaatcgacctacaagtggttatacctttttctgacacaagatcaaatcttgtcccttgtgccagtccatggtagacgcatacgtacttcatgacatgcctcttgccaaacggcttgtctagaaagtaatttgtaaaggaaaaacctttgggcaacacatgtccctaatcccgatggtactagtcactaccgttgtacacagcaggatcaagaaggttctcgatggccgaatagtaagatcaaaagttgtattctcctaaccttgtagcgggttatggtacgaaaccataggtgggtaaagggaattccctgcccacatgtaagcttataaataccccaaccttttatgtacaaagggtgaacaaattttatactagcctaacctttacaaaaactcctacatgctttcttcttcttcaagagaattaaaaggagtttagagttagggttatactgtaaacacacattttattacccaaatacttgctcaaagggccaatacaactaacttatagactaggaattattaacacccaaaccacgtaaaaatcatctgtctattatttttttgtattttctttctttctgaagccctaaatatttagattccaaaaatctcagtaaacattttggtactttccttgagagctaaagaaagtttgatatttgtcgcaccacctcgaccatggtgttcactctaaagaatgttggcaagaaagcttctaaagtgactgttatggtggaggcagactccctcgctcccagtctccaactaggcagtgtaagagagggtgttgctaatgtttaaaaaccgagaaaaagacgttaaaaacttgcacaatggtgttaacaatgaccaaatccctaaagacagagaagagaagaacgatagagatggttatgtgaaggatgggtactaagaagatggttattattatgaccacaacaaaaacttcttcgagtgaccaaggagttataagctatttagataatgttagctgagcaggagaaactcaatgaaaaaatgaagagaatgatggctcgtctacaagataagtttgaggaactagcggagtttgacgatgatccctcggtggaggtaatggcataagagcatgctcttgggaaaacagaggttgaaacctccaatcccgactaggataaaggtaaagtcaaggtaggtgaacttactcaaaagtcctctcctaagaccattttcaatggatggtgtatattttgggttaaatttggccaaaaatataccacaaaattatatttcgcccaatctttgtatttgtgctccaatgcacaaggtgcaaataatctataaaagtcaataataccattcattctcattgaaaatatacaaacatttatagcattaatgagtggcaaataggtaattaaaaaaggttgcatttattgtgaggtaaattttggcacatgccacaatttttagctggaccaaatttggcacacattttacatcaccattggagtttatcgtttagaaaaatgttcttaaaaatggtaatacacaacatttatagctctccatttgagatgctctaaagctccacagaaagacacgaatcaagctgggcagccctttaagacatagaaggccatcagtgttttcgagcgttgatgcacttctgctcccagaggtaaaattgcaccaaaaaggcaaagtaaaccaaaggggcaaaaaaatggccctagtgactctgccaactaggatgaaaggacgactgaactacactctaaacataactggtccaccatagacctcaatgggcgactggatgctatgtaggaaaggtacaaatgtgaaaatacaaggtgatgtggaggcaaccttagatagtacttaagtgacaaaattcgaggacatgatcttcctgaaagtgacatgaaaaggtaggaggagaagatagcagctctaaccaagcttgttaaaaagaaaggtaatgacctctcatatttagaagatgcagacccagaactctgtattaagaggattgtagagaccccactcccaaaaaaaatttaaaatgctacacatcgagtgtatgaaggaaggacaaatctgggaacacacttggaaacatacaacaagatgatgcgtttatcaagattttcgaaaatcgaataattagagcttaagaatgaagtaaaataataaataataaacataaggatttttaaggggttcaagcattaactatcgttagttcacgagtctaatttattagccatatcagcaggtgatgaatatttcatgtagttacattatggacttgaactttacattcctctcatacctcatgatgaagaagaagcgcaataggaatttcagccgagtttttgtgagtaaacaattgtttttttagacactctagtgctgtccctatctcatgaaatgtagaggtatttatatttaatttcttctttcatgtgctttttgagccaatcttgctagaagaaatccaactgtcgatttggtaggtagccattccctcaaatagtgtatagaggtgttagctcgtactgttcgaacatctaatatgtgtcactccagggccttccccttttgaattgcccttataaatggcctttggatcattaaggcatgtacaatggcgcacatgctctatactgtggcttaatgtgggggagaaaacctggtgtcttactagaaaaagcatggctatcacctctgtagtttgacagatacagacagagctttcttgtgacactaaatggggatacatctcattctaagtccttctgtgacttgcataggcctactagagtaaactcccagcctttggtggatgcttggcttctactcttgggatcaggagatatcatgaaataaggatgctccacatgtcctcgccttgcacgaagtatccttcgcaaaagcccctcgcgggagctaggtcctaaggcattatccagctgattattatctcagcttcctcggtgaggttccacgtgtcaagattacaaaaatcttgacaacatttacccccaagcttctggtatgacttgcagtctgaaagcttccagtgtttcctccctttctcatgattggtttcgaacatgtggtgcaacttcagatttctcattatgtcatgcaagtggtcgtcaattgattagtcacaggcagaggatatcatttgtgtcatacactggcagtgctttaaatgtcgactcttactatttgcgcgcgtgctaggcgcatgtctagggagacattgaaatgacagcgaatcgagtgaacgaatccttcacataacaatcactttacttgaagcatgccataatggatgttaaatgtttgagtcgatggcattataaatggactgtggatcattttgggaggtacaatggcgtacatactctatactgtgtcttaacgtgggggagaaaaccttgtgtcatactagcaaaagcatggttgtcacctttgtagcttgacagatacgaacggagctttcttgtgacactaaatggggatacatctcattctaagtccttctattacttgcataggtttactcgtggaagctcacagcctttgttggatgcttggcttctgctccttggattgggagatatcatggaatgcggatgctgcacgtgtcctcgccttgcacggaagtatccttcacaaaagccccttgcgagagctagggcctaaagcatgatccagctgattattatctcaacttcatcggttaggttccacgtgtcaagcttacaaaaatttggacaacatttacccccaaacttccgggatgactagcggtctggaagcttccagtgtttcctccctttctcatgattggtttc

SEQ ID NO: 227709 - DNA, 4264 bp, Cannabis indica
atattagaaaattatgaataatacttaaaaaagttagtataaattgtagtttaatgtactacggttttttttctttttttttttaagtccaattttaaatttgaacgaggtcccaaaatgcttagaccggccctgtgtaacgacctgaatcgtctatcctgaacaacattctatgtaacgaccgtttggtctaatttgctattataaacgttttctttaaaaaaaaaaaatcggagcctcctacagtcctgctaaagtgaaagagaagtagaggccaccgcaccgcaccgactgatgatcaagtcagaatagtaccaaggttcttggaacgaggattttctacttcgttaatcaaatgttgagtacgagagatatgatattaatatgagacctcacttcataatcatatgattcacaacaaccaccatcatattgcttctctctcacgaaaatgcaaaaccttaaaccagctcaagcagatccatgcccatcttctcaaatcgtcttccccggaaaacccttttgcccttgcctctgtgctttctgctgccgctacctccggccacgcttctttcttttcctacgctcgttcaatcttcgaccatcttcgccatcgaagaaacgtctttatgtacaactctatgatcagagggttcgttggaatgcgtgcgccgctggattctgttttatgctatttggacatgttggctcatgggcttgctgctaatcactatacatttccgccattgatgaaagcttgtacgattctcgtagccccgggttcgaagctagttattggtcgtttggttcatgcccatgttgttaaatttggttttcgtgaggatccttttgtgaatagcgctcttattgagttttactcttcggtttatgaaatggaacttgctcggtttttgttcgacaaatgtcctaagaaagatgtcgttttgtggacgacgatgattgatggatatgggagaatgggtgacgttaagaaagcgcgtgagttgtttgatgaaatgcctgagagaaatgctgtatcttggagtgccataatggctgcttattctcgtttgaataacttcaaagaggtcctctgtttatttgggaaaatgcaagaagcagctattaggcctaatgaatctgttcttgttacagttcttactgcttctgctcgtcttggtgctgtaacacaaggactatggatccactcctatgccaagaggaacaagctcagctcgaatcggatcctggccacagctttggttgatttgtattcaaaatgtggcttactagagtcagctttagcagtttttgagggaatttccagtaaggatgcagaagcttggaatgctatgattactggcctctccttaaatgggaatgcaaggaagtcacttgatttttttgaaaaaatgactgtagatgggattcaacctacagagaccacattcattgctgttcttactgcatgtacgcatgcacaaatggttaatgagggccttaaattgttcaacgaaatgagcaccatctatggagtaaaacctcagggggagcactatgcatgtgttgttgaccttctggctagagcaggaatggtagaagaagctgaaaagttcttagaagagaagatggggggactggctgggtgggatgcaaatgtttggggagctttaattggtgcttgcagagtttatgggaaggttgaagttggcaaccgtatttggaaaaagctagctgatatgggaatttctgattatggtactcatgtactttcttataatatgtatagagaagctggttgggatatgcaggcaaagagagtcagaaaagtgatttcaaaagctggaatgttgaagaaaccaggatgcagtgtgatagaggtaaatggtgtggttgaagagttccttgctggtgatctatgccatccccaagcacatgaagtatttaagttacttgattcttttttcaaaataatttatttggaggatgtaatgtcacgcgatttttccttggataatttatagtcacaaagtacaattgtttgctcagcaagcgttttgggttgatactgcacaaaatatttgcataaacagcattttatgccaatttttctgtagccaatagtaagtataaacttgacttataagcacagttgttatgggataactaatatgatatctatttcattcattgtatgaaataaactgaaacaaggaaccaaacgctgcatgagggagaaccaacaaaatcacttctacatccatttaaatcttcaagtttatacctttgtgaatttgtaatctattgtccggtttgagcttaaatcctcagatttatttttggacatcttcccaaaagacctcattccaatagacttaaaatccttctcatttttagctaatgtgaaacttaagttgtacgcccaacaaccttaacccaaccatttctaattttccaagaacatcagtagaacgtctataattcaaaaagtaacttcctaatatttattgtgctcgccaataccccaatgcgagatataagctcaaagcttagcctgagatgcaatggcatcaccagtggggctgctgaagtaacaaagtagaacgcaatggtaagcagatgaagcatgatcttttcacttgtagtaattatgtgaacaaaaaattattcattttacaatttcagcttcaagctacaagaagaatattgtatcctataaaaacttggtaatatttttcttactcactaaatccctatggcttgctatatgtgtagccagggctcatccattattagttgtacgatggcaatgtcctgccctggttactaggtataagtatgatgctctcaagtttcaggagcactgtttcgcatgaaaatcctctgctttttatctaaaccagtgatgagatgtttgagtcttcgagcgccaggacctggcttgagttttgtggtatttgctatgatgtagtctaggacactcacattcgtatttcctttcaaccatccaccaggtacatacccatcagcattgcaacctaaaagctcattatcaattttgtctagaactgtttcgttcctgccaaacttcctcgcaaagggggcgttgctagctaccatcttctgaaagtcattggtagttaggaaatgagggtgttgcttaggtggagtgtcccacgatatgaagtggaggtcatggtttacagtcgtgttccgaaactcctctgcattacagatgactgtgtggaaataaccttcaggtgaagaaagaaagttggcataatacataagaactattcttggaaggttgtcccacccccacacgcaaaaatcaataaaagggcgagagagcatcatccaagcagaacctgaacaaatcatcaagcatgattcaataaacaagaagtatatgaactagcttagttaaagttcatcgaaattcatttccttgtcctaattcagagttggaatactgagcagatgtatcaaagtatttaccagtaaggcagtacaagaaataacatgccgcaaatttaaatgcttctgtaaaaggcattgcaagatacaaaaatgtaaaattacaagcaattgatgtgatcaaagctgaattataatttgtatagaatataggaaaacaccatactttaaaaccaaaaaaaaaaaaaatgtagtgttccactatgttatgctttgttcacccaccatgttctgaactctacccattaaataactatgtctaccttccattgttaccaaaataaagggaaagggaaaaaaggtacattcaaagtgcaggaaacagaaaatgtcacctgtaaacagcttataagcagtcggcacgctcctcttctccggcacccaaaatacatccgacttgtgcaagctatacaagcctggatcaattataacaggtctagctctatgagacctgaaaatagctccaattaatataacacattcatatacagccttgtagtttgaacacatatagtgcaacgtaaaataatacatgattataacttactctttccagccaatatcactggtatgctcaagaaaattaaggtttcttggaattgttgacaatgtatgaagcagatctgcgttacaggaaataaacgcacaaaattatggaattagaagttaaccaattgttcttaatcattgaatttatttacctattcatttattcaaccaaaatctatggaccattacaatgacaaatctactcgggcaaaacaagaatggcatcactaaaataaat

SEQ ID NO: 227710 - DNA, 2571 bp, Cannabis indica
gctttaataaaaatctttgaaacatataaaaatagaactatatcaatttctgaattacaattggtactcgtgagacatgtaatctatcatactagcaatgaagcagaggttctgctaaaatgcaaaatctttaatctattaactaattacctgttcaacaccttcaatgagggacttttcatttttggaagcatcaatatgctcagcttcagcagctaaaccatcatgggtttccacagcatcctatcgaaagtagccaaacatgaaaagtaaaggcagtgagaatatttacaaaagtagttgatacttgatagtacttataatggacgactaatttaaggccaaaaaaaaaaatcaaacctgatccgaaggaggatcatctataagcccaatcttatcatcatctgtatttatggtttcggtttcatggtttggcttctctacaccttcaacatcttcctgcttagcttcaccctcatgtttggttttctcctcggcctctttcttctccttctcttctttttctctctgtaaacgttccttctcctctgccttttcaatctgttctttacgctctgaggtgaaggagagatagttatgtagttcccataagatggaacatgattcagaaatctaaacacaaatatcaaatgactgtgcacaatgatgtgctcacctctcctggatataccaatgtgcttattattataacaacaaaagatactgacccgttttttgcaattagaacaattagcacaaagcatatggatgatgacatttataatgactgaataatatatacatatatacttattaaaaaaaacaagaatgaatagaaacactgagaggattatacccctaagctgctggacaagtcctttaagtgttttttcttcattttgtagctttgatagctctgcctcatccttggctatagctgttattgcttgttcgacttccttttttcgtattgcaacaccctcttgaaaagttgcaatttttttcatcaatttgtcccttgccactttcccagcctcccaacatgtattaggacatttcatgttaccatcatactcatcactcccatcacagcagtctgagattgaggattattttaaagcatatcagagaagacaagtatcagcccgaaactataattcaacaaaagtctcataattcataagctacatgctctctacaagtttatcctaaaatcacaaacctctcccaagaaagcactcaaaactaaaaaatgacataaacaaacaaagggaaagaaaacattaaaggaaaaacaggtttttgtatctcaacagtaaatttaaagttacttaccgcatatgccatcattcactctagaagagaataacactttaggagcatgccctgcgtttcgacaatagaatcttccatttgggcaagcagatgttcctacaacccaccaaacaaaacatattgcatttatcaaaatcattaaatcacatacacacccaacacaaaagtatcaacatttcaccaaagaataccatgaaaacaaagaaagaaaaaaaacccaaataaattctttacctgtaaactgaagcaaaatcagcataacacattctaatcagatttcattaactacttgatactaattcactttccatcattttgtagacgtttttggatggggcgcaaaacacaacccaaagattattttctgatgtaaaagttttattatctagctttccgagggcatctaaacccatgaattgatttagcaatgcccttataatagacaatgatctttttcggatggaaaaaatctttacactttttaccttcaaagcatttcttttatctaaccttatcaaaatcagcataacacaaatgactgctatacattcattcacataaaaaatcagatacatctttcacataatgcaaataaatactcaaattcagtgcaaaagctatgaagacaataccaggctcatcggttccatcgagacaatcgcagtagttatcattgagctgagctttggtgaatttcttcgatccatctctacatttgatggaatcagaagacttgtagtacttctcatctgagtaattaaaacatacacagtcaataatcaatcattcttatgtaagaaaacgaagaaagaaattttgggttttttggcgaaccttggggatcgattccgagatatttgggtggagaagaggttgatctaacaacggaagctgaagttagagaaagacaaagaaggagcgagaaaaccttggggatccttagctccattgttggatagcgaattgagttcaatattcactgaaattcggttatatatataagaatattgtgtagatatagtttatataaatatgtgtgtgattttgaggtggataagagtatgtaatgggtttcttcttcttcttcttcttggagatttaagcgttagatgaaattctccattgttacatcaaaagcatgagaggtttgagtttcagagtgagaagaaggtgttcgattcgaactcttatgatcaaaacgacgtcgtcgttggttgaaatatgagtcaattttta

SEQ ID NO: 227711 - DNA, 1574 bp, Cannabis indica
aaaagattaagtgtggagcatattgaagaggcttgtatggtgtcctgggccatttgaaatgtaacaagaaaatttgatatggaatgacaaagttacagctactgcgactgttgtgacctcgacaggagtggtttttgatcaatagaaatatgctaaaaaatgtaagttttcattgctgttagatcatgttaattctaatggtggtcatgagcattggagaaagctttttttgaacttgatcatgattaatgtaaatggtgtattattttcaaaagaaggtaaacttggtttcacatgtgtgattcgggatagctcaggatccttaagtgaagcttactcttgttgtcatgagtggagtgtgaaaccagagattgcagaagtgttaagtgttaaggaggctctgagttggttaatgaataacagtgttgttcgtgttatggtggaaactgattgtctcatggttgtgcaggcagtgcagagcaaaatttttatgccatctgagtttggatttctggttcaggattgtaagagccgtttggctaatctaaatattccttatttacattttgtaaagtattttgctaacaaagctacccattgtcttgttagggtatcttgttattttgcaaattgttcttttagcttgagtaatgctcttactgagttattgtctattgtaatagatgattctatcttgaaattttttattttaatattactaatttattatttaattaatcaattaactaaacgtagaataataaatatagtattgaaatagttcttcaatagttacagaatgcaactttgtaactacagaataaaaccaagaaaataaataagtagtaaaaaaaataaaaacaacacaaggttttatacgtggtattaacaatctttgcagattgttactagtccacgaggccacacccagagatgatagatatacaaaaaataaaaagtaaattgacgtatgcataaatagaccctcttttattatgtgtcgcaagcttgatgtatcccaccttataaaataaatcctgctgaaacttaagtgttcgaactcccttcaatctacttgaagagtgttttattcctcctaaggcaagacttgaaaagctatctcccgaaagctagtagaacattctcttaaaggtagcactgttgttcttcttatagactcaagacaatacaaaatacataaacacaaaggaagagacgaacactctctcatctacacaataaagactttctttcttcacaatatgagtgcaatacaaagatttgaaagagatcctaaatctagatgttataacgtgtatttatagtcaatatacacattataggcagctcatacatgatctgaacaagaccataactcacaagaaactttcctaaaaaaatatcttgaatcaacctagcaatttctacttcataaatttataaatcttgtaaatcgaatgatcatattatcacatcgataagaagttatgcaataaaaatctaataataactcaacatttctaaatatatatgattaaaatattttcttcaaaaataatttaatatatatttat

SEQ ID NO: 227712 - DNA, 3748 bp, Cannabis indica
tatgccactatttaccttaatttttttcttaagatttctgttttcttttttgattatgcattctcatattaacttactttctaaagtttaggaaattaaaaaacataaaaatttatcaaaaattggatagcacatcttttttgtactgctttgcaaatttcgacagaattttcttctttcttttctcctctcctttctttcttttagtgatataagagtgaagaagtgagtggtggatcgttatcacttagggagagaaaagtgaggatcttttggtattatttttttaaattatcactattattttattaataaaaaaacattcaaaattttgtaagttaaaacacatgttgtgggtcattatggaactgaagcatctccacaacctgcctcatagaaggtcgatcatccttatcttcttcaacacattgcaaagccactttaactaaaaccttaatcttctcaacctcaaactctcccaattccagcaacattggatctattatctcttcaatcctagattctacagtacaataatctccattattattcattttctcctttacccaagtcaccaatctcccatgttgatcagccatttctttcccagtcaccagttcaagaaccaccactccatagctgtacacatcaactttagaggtaataggaagattgtacacccactcaggtgccatgtaaccccttgtccctctaatcctcgagaagcttggatcaccacactctcctctgtttagaagcttcgataacccgaaatccgccactttcgggttataattggagtccaaaagaatgttatgaggcttcacgtcacaatgcaaaacccactccaaacactcttcatgcaaatacgcaagtccctttgaggtccccattgctatgtcaaaccgtttctcccaattcagttggttgtttttcaaattgtcagctaatgatccatgctccatgtactcgtacaccaatagtctatgctttccctccacacaataaccccatatctctatcaagttcatgtggtttaacctcccaattgtgcttacttctgctaggaattcagcttctcctccatttgattcacttaatcttttgatcgccgcgactcgtccgtctgatagcacacctgttagaatgcaagtttagaaagtaagatgcggaaattattaaatgtgtgaaacccgatattaaattgcaccacaataacaatgccatgtgaaatagtgtacctttgtaaacagtgcctccaccaccagctccaaccgcattgcaaaacccaacggtggcttttctcagctctgcataactaaacctttgaaaccgtgtaaccgaggcgagggagtaaccgtgggagtcgagtttgctctcttttcgtgtccaatacaagaaagacaagaccacagaaacacagaaaatctcaactcctgccaatgcaatggcaacccaaaccaaaatcttcaaccctccgttctctttaaccttgatataagttctatccaacaacaccaatttagaagaacagaactgaagacttctcatttctctattgattttctcaaaataagaaatgttagctttagggagtcttacataaacatctccagggaaacttggtgtatgagctccattaactaataaatgcttagtataacatcttgaaccaggattagcaacattgctcatatgatattggatacctttacaatcagaaaagaacaagcatttctcttcacattcttttaaagaaagattctcatagaaattcttgtcgtaaccatagaattctgcattagcaatgcggtgaaaactactctgcttttcgatatgtctccattcgaattcgggttcacaaccaaatgcccaattagaagaatttttcaccttatgtccagctacacaagaacaactcctgcctaaaacatgatcataagaacacatactattaggaccacaaatcccatgaacattgcaaggagaagacatggcttgccaagtaacactccaactcttattctttatatcgaaactatacagccgaagattcccatccgggtcaagtgtcaatcttcgggtgattctagcaccgtgatctaagctcgagaacataagattatccgaagaagcaaagtcgccaatcgagttaaggactgcggatttagaaatgttgtatctaaaccttccggtttgaaagggcccgagccacggggctggccagtaacttgcccggtcgaggccttgaaaacgaagccgaagagtgttgtcatcgtcgaaatagaagtggtaatatccagaagaatagtttgttttgcttactgacgacacaagccttgtgttcatgatgaaattttggttaggaagaagtgtatcagtgggtgattcaaagctttcccagtaaacaacatcaccgaaaacagaactgcgaagaacaaggtttcccgaatctaagagttggagtttaacaggagaaaccggtttcgtttcggtactccaaaattgaactcttcccacatctagcaagacgagattaccatttttggtcaacgagagcttcgaagctcttccgttgaccggttggtctctgttcgccatccaaactaaggtaggaacagaggaccttgtgaaccatatagcaaaagagaaagcgttttctccaactgggaaaaatccagcggagaaatctccatttggagagaccaaaacatcagaggctgcattttctacagatagggatgagccttggtttagtgtatttgagacttttgatgaagaaagagttacttgaaacaagagaagaagagtaagaaaggtttgcttcattattggttgttcatgaatttcttgagaactagtttagtgtgttatatatgttttgtgtttgattatgaactacgaaatttcgcaccttgtggtacgaactacgaagtacctcaaaatataaaatatatgttttcacatgtgaagggtagactttgaattttcggtcacattatggtcaacctacctatatatagctattatctttatttatacaaatatagtattaaattaagctagtgatgatccttaattattacaagatcaatgtccattcaaaaatcaagttggcatatttaaaaaagaaaaagtaattggcaaatagtataaaagatatgcttcattagtgattgttcgttagtttcatgactagtttgttatattatatgcatatttttgacatgttaatcattaactcacaacctaatttcagcgtaatttaaaggagaaaattatactatacaaacaattacaaatacaaccaacgggcaatgacctgttattggagacaaaaataagacagcttacataactcagacttcggaattttcaacccaaagttctagcctgccaaaaatcacggatgattataaacctgtctagccgtttctatttatctttactattggttagtgatattgtctaatacggtagaacatctatataagaatactctattcaagaataatctctaatttattataaaaaaattaagtcccaatttaaaaccgttataaataacaacaggcccgaccctgggcataggcgggctacgcctgtgtctagggctcacctagtctaagggcccaaaaaaaatttctttcaaaattatgtatttttttactaactttgaaaaaaaccacatttttttctaacttaagggtcgaaaaataattttgtttttctgtggcccactttattt

SEQ ID NO: 227713 - DNA, 2244 bp, Cannabis indica
tttacttttcttcactgtttgtttttctgctttcttctagagttacagagttttcttctgtagctacagaaaaattatttcagtatcagtttcattatttcgcatttaattaagtatttaattaaataataaattgggaatattaaaatacggaatttcaataattaataaaatattttctttgctctgttctggtttctctcttctctcttattcaacagggtatcagatgtctaactcggtccttttgttccaccatgaccgatgccagctccaatctttgaggtcaatcctccaattcgttaccaagaacaacaagtatcacattcaatcacttgatatctgttaaactcgatgacaacaactctcttccatggcgtcatcaagtttatgccaccattaaaggccatagtcttctcaaatttctcaatcctaaatatgttccacctaagttcataattgttacagatgaactcgataacaacatatatgatgaattcgttgagaatgacattcaagacattctcctggtttcttggcttctatcatctatttctgaaaagatcccacttgaatggtgggtgcaacatagctgctgctatatggtccaatcttgaagaatactacttagctcaaaatcgtgccaagatcagtcaattttgtactcaacttcgcaaaaccaagcttaccagctcactcaatgactatattctcaagattaagcatcttgttgactcacttgcctcggtcggacatgttctttctactcaagatcacatcgaagcaatattcaatggattgcctcgagagtagtctgttttcattacctctatgtcaacaagaaaagatgcatattcagttacataagttgaatctttattgatggcataagaagtacgaaatgaaatggtagattttgaacttgatatcgccaattctgaagttaatcttgcagctcagtcaaaaacctccatgcccagacctggatctcactatccatcatctgctgcatcaaattctggaagaagtatgcaatcctcgtgctagttatctaatgtttggatcatatcctacacatctatacaatggctatggattacttcctccaccattatatccacccttctctcaaaactttagacccactcaaggtggataccgtgctcctagtcctggtggtcgaggatctactaccacaaaacctcaatgccaactttgccattaacaagatcatactgtcaacaaatgcttctattgatttgataaaacctttacaggtcctgagtgtttcaaaccttcaatgatggatcaaaaaatttggctgaaatgcaagccatggttgctacagctgagactgtaaatgattcgagctagtatcttgactaaggggcaactcatcatctcactcctgatgtcaccaatctacagaatactcaagaattccaaggctctgactagatttacatgggaaatggtttaggttttgacatcaaacaccgttgtttttctactattaattcccatttcagttctcaactcctttatttaaacaatcttcttcatgtacttgctatcactaaaaatctactcagtgtcaatcaatttgctaaagataatcttgtctttttggaattacaccctaaccactgttgtgtcaaagatcaggtcaatatgaagactttgttggttgggaatgttgaaaatggcctttacaagtttgatcaacctactacctcctcctagtcaagccacaactctactgctatgccataccagcaatccattcttcatcctactagcaatagttttcaatattttcattctgtttccaatgtacctatttcaacttcactttgtggcataataggcttggccatccaactaaagccactattatgtctgtaatggaaaattgtaatatctctaatagcaataaaactgtttttgatctttgtgcagcttgttgtcttggtaagcaccacaaacttccctatcctaattctaaaacagtgtacactactcttcttcaaattttatatactgatctacgggggcctgcccctatagagtcctttaatggttataatgttgagaatattttactaggatctagatttactaacaagtctgttgaattaacatcttaaatatgaatatctctaaaacaatgaaattaaacacataagagtttagaaaaccttatattggttgcagcggaatataatgactccttccgctcaaatc

SEQ ID NO: 227714 - DNA, 3255 bp, Cannabis indica
atatttttattgaatttttaaaatataagtttataaatataaataaatttaattttttcttcacaatattttagtttgtttaaattatttattgaatttttttataattttaatttaattttttaaaataagtgtttttaaatataataaaatttgaaaatatttttttaagaacaattaagattttttaagtaaattttgtatttttttaattaaggtttaatactaatatttttatggacaaattttgtattggtcaatatttagaatgtaaaataattaatttttaacgataaaaataagaaatataaaaaaaaaaacaccataattatacaattgttaaagggcatgggaaaagttcataacacaaagctaattattcttttgtaattaaggtcaagtcaacatagtacaacaccacaccgattctttgcatatatgatgcaggaagcacttgaggaaaagaaaacatttctttatggaacaaatctattttacatctccaaatttacttactgctttaaatatccaacacattatttgttttagatatcaggctggctgttaatgtagaattaaacatataagtttttcactaaatttttccataactaatcttttccacaaccttgaaccttcttctctaacatcaaggcaccaaaatgataatatcaaaagttcaaaacctattaattaatgttataagacatgaactcataatataataaaacatttaattacagacacccttctttaaacagataggcataaaaagaaaatttcaaaatgtcattaacatctaattaatttcctatacttaatccctaatgggtacaaaagttggcaaagatgagcactaaaacattttcctacattcttactaatcatcaagtcaaatcccaactcttatatgtaatttgaattcatgaatggcaagcaggtaccaagcatcttgaaaatattccaagcctcctcttctacaaaaataatataaacacaatattagattttaataattatgatcgatccatgaagttaagaagcaaactttgagtaggaaacttcccaagttaaggtcaaaaagggctttgaatttagtggttacaatattataaaataatgtacatgttttcaaactggtttttgaaacttggtgcacactagaagacaatttttctagaactaaatgatcactatactatactaaaataatttgggatggacaggtgttgatataaaatgtcaaaattaaattcaaagaattataattatactgaacgggagaaacaaatcagttaataattttttcttttgataaagataagttaataaattgattccaagtcaaacaaaaatttaataaagtaaaagaaacaatctcttcctccattaattacaaagcatcatcacatattcacatgacacattatgtgtggtggcttacactaaagttttcattttcaatacaaacaaaaaaaataaataaataacacaacatatatcatacatcccattggatggagttggtaaaaaaatcatttctatctcatcattttttaagttttttcaaagggtagttaataatgtcagacaatggtaaaaacccaagaaaatgttagaacaagtaaatgtaaaataaaataagtagaagaagagaaaagggacccacccgcttagaagagtgaaggagttcaggagggatcttgtatagatcttcatcaactggttttggaagcttagctggacggcgtggaacggcgtcgtttaggtggccatggtcggcagctttgtgaggctttgaagatggctttcgtggctgatcagtcacgtcacacaccttagattgctgctgctttttctgctccttaacatgtgggtatcgcttttctctagttcctcttccctaaaattttccattcacactcatcattaatctcaatcactttaaaatatgtaaatcaattttaatttttcaccattgattggtatttgaagtttaatcttagtttattaaatataaaacgtttgtaataatttcactgtgtctcataaaatcaaaaccgtacctttcgaggttggtgagcttgagtttgagtagcagtggctgtgcgagaactgggcttctggggatcataatggtcgacgagggcgtacaagtcatgtggtgtacgagagtgtactggatcactatcaccagaagaagaactgtacctaattagaccagcttgtctagcacactcaaagtactgagttattggtaagtcgttcgcgtaatcccagtctccaaatgttggtatttgcccgctctttctaatataatcctaaacaaaagaacaaaagtagtgaacaaaacaaataaaaccaaggaacatttacaactttgagataaaggatcgagtttcacttacatgatgatgagttgtctccattttcagggaaaagaataattaccaaactacacaaaactgaagaagatatgaaaaggggtgttataacttctatatatatatagattgataaaggagaaagaaagcttgggaaacttctgatggaactttttcagcttggcgtgtgggagggcgtgaattatggggcaagcttttgcaatgagataaaactattttttttgttctctttctttcttttcgagaagagaggggtgcaaaaaggtaaaaagttaagcttaacgagctacctagctatatagctctctggatattcctccaagaagaaatagagagagaaaaagataagagggaatttaagatttttttactagatttatagtgtgcagagggaacagtactgaagaaagacagggtctttgttttagtttttttttttttttttttttttttttttagtgattcaacttttgtttttgtagaaaagtaaaataaaaaatgaaaaagaagaggggggttgctctactttttgggggtggtatggtggtggttgatgatgtatctaatcggaagccatgcctaattaaagaaagggtttttaatttattggcttcacgcgagtatgagtatgaggctggctgaggccaaggctgctaacaccgacccccacctaaattccaagcattcccacacaattataccttttctatttattttttcagatctacagtcaatctgttcacaattgccaatgcaaaatgtgggcttcaaattatacaaccatactcaaatgaaagagaccctttttaagaaataaattatgtatattaaaagaaataattgagtaaag

SEQ ID NO: 227715 - DNA, 2462 bp, Cannabis indica
ttatatataaatatatgttttatttaattgttaatatgtgagtgtgtgttaaattgttaatgtgttaatttatgtaatatgtctgtatatataataattatattgtataattatattattttatagttttttttgttcaaaaagtgatattaaaaaaaaaaaccatagtctaacccgaaacccgacccaacctatctgaacccaaaacttgaaaaccctattttcatatgtgcaagttcggttccaagattccaaaattcgaactcgaaaaacctaaactcaaaaactcaaaatccgttaaaacttacgcgatgtgcacccttattaagtacaaacctagttcgcctatacctaaaactgagcctgttccacgtcatcaccgaattcggcagtcggtttcggtttcggtttttgaaatagaaaatggttaaactaaaaacactgccaaaaaccgcaataaaccgccaaaccgaaaaccgctaaaaaccgtagggtcagttttatacggttataatttctaaacgatcgattacggttttcgcaaaatataaatcgtaacccaccggtcggttataaattgtaaaaacctatcataaccgatcgattttcacccctatttgtatgttagctaaaagatgtactacgaaactggagatgttctaataatattgtaaaaataaattataaaataaacaataataatatataatttttttaaatgataaaagtacataataaatattttaaattatttcattaattttttaaaaagtgcatagttagattttttttcttctttgggatgtataatcctttagtgtgtatgagattattattttatcaataatattaattattgtttttctttggaaaaaaataagtttttaattaatttagaagaattctctaattatttgaatgactcatcaagaaaataatgcagcaatcaaataagccaatagaaagtaatagaataatattatcgtacgaagtttcccgacaactcaaaaactttcttctattctactcaaaaaaagaagaaaaaaaaacttctttccatcaacatcaacggcgcgtgtacagataacattataaatacaaactaaccaaataataactcacttaaaatatttcagtaattttctcttataataacctcactcgattttcctcctccccatcgatctgccaatgtccaactttaacttctcatcgcgagctgtagaaattactgtcttatcaggtgaaagccttcagatcgatcggagaccaatcaagaagaacaccttcgtcgtcgtccgatccattggcggaaatgatttctgttctacggagatcgacaccaatggcgggagtaacccaaaatggaaccagaagctcgtccttgaattgccggttcaagcagctgcactgaccgtcgaagtatactgcaaaatcatgaccgggatcagactcgtcggaacggctacagttccgatatcagacttttccggtggatatttacctgataattacttgcattttctgagttacagactgagggatgaggaaagtgaaaggaatgggattatcaatttgtctgtgaaaacgaaatttgcggcggcggaggtacccgagtatcgatcgtgcgtggcttcgtcttcttcgtcgacggcttcggtggttggagttcctacgagtaaaaagtactcgagtgggatcgtgactggttttcctgtttttggtccactacttgatcataataatggaatgatttagttttgaaggatatatattttctcatatagaaataaaagttgtcacaataagataatgaaagagagtggatatgttggaaaatcaatactgtttatatcactattaatattatacgttagtactattaaagagtggagtgcaacttgtgaaagtgtgtatatattatttcaatgagaaatgtaaagggtattatggttaatgtcacctatcaatatatattaagatatacttatataatttaatattcgattccatttattttattttaataatgattataaaaaattactaactaattatataaggatacatcataagagtactagacaccacaatacttcatgacattcctctatttcaataaattatatattttaacaccttaaggtactcaacattattacattgcaacatttatcgatagagcatctccaatggtagcattctttgaagatgctctatatctccacatcatccaaaatataatattttattttatttttcttccatatcatttttgacaccttcacttctaaaaatactctaatggtataatacctttttaaaatgctataattatgatatcacacattattatatataattttttttctttattaaactattatatatatattgcacttttaagttttattgtataaaaaaacacagcatcaatggcattgtgtggcatcaatgcaaat

SEQ ID NO: 227716 - DNA, 2937 bp, Cannabis indica
agaaatgagcaaacgaagttgacgaaatgcacggggactgcccaagccccgagcattccagctaattagattcatggcgattggcgaggctgagactcagccttcgccaaagaaatatcactttcctcctccactaaagaaatggcagccagttcagaaatgggttctggaagatgatgttgaggtgaatttgtaatatcagccaatgaagtgtctttggtacgacatcttttcagcacttgccgaacattacctccttgattgatcatttgacgcttggtaaaagtacaaggagacttagaatgaatggaagaattctcagtagaaattccttcacccattgcagtcaaaatttttgctagagaactagccgtgggtggttttacattggttgctggttgtgatggaataggcaagtgattagcagaatgtagatgatgtagatacgctggaggggttgccacaggtaatgctattgccttcttgggaagatatccaggagggtattcattaacttccttaatggagatcgttgaagaagaagaagtaacttgtcctctgaaaggagttggcttaaaaatacaaggcataggtactagaacatcatcaactattctctttcctttgatatcagccaatcccatatggtcacattgtagacatggctccttaacaactttgttggaggcatttgttgcattctgctgtatacttgaggaaactggtacaggagggacagaggcaatttctttcgcaccacttgaagatgatgcagaaaaagttttaatctgagagtggtttatgaaatccttgttactggtgtgaacggccaactgttggtgagaatttcctggattgtctggtgtagaaaccacatgattagaacccttctcacgactagtgacagtaggagggagcactggtggctgagacggatgagaaataataggattaatagtattccttgctagtctagtgataaaaggccatggacctgatttagagaaatcttgtcgatagcgatcataacttgatcgtggtaaaggagaacctgccatccatggcccatattcaagtccaggttctataccttcatcaattttctccatatacatcttgcaattatcaaaaacatggccaattataccgcattcgtaacaaaaatctggtagccgttcataacggtagtctatccaaagttcatcacgcatccatggaagtgagaccatttgaccccttaaaagcggttttgaaacatccaagcctacccgaatccttaaaaaaggaccccacccctcattaagagaatcattgtgaacctctagaaattctccaatgagattgccaatgatttttgcaagagcctctgatttactgagaaaaggcaatctatagacttgaacccaaaaatggagtagtagtgtaagaggatagtgaatcagaaaggagaacagtcggaggacacagtattaaatgttgattatggaaatgccaaggttcttttgataataccctttttaaatccccttcacaaccgaaagtgaccatataggattcagagtcataatctgaaatgatgacctcaaaacgtcccaaccaatgcttatgtaagaaatttttgagttgattaggattgaaaccccttttggagtagacacggcagagaagacgagtattagtaatgcccagtggtggggcagaaacattgtcgatagaaaccatagacctttctctttcggtaagagcagtagaaacatcatggagaaaagtatccatagtgaataggtggtaaagtagaaagaagaaagtgataaaaaaacccagaaaaagatgaacaagaccaagggaatttgaaataaactggggcgggaacaggtaaattcaaagaaagggaaatcaaacttacaaatatggttaaaaagaaaaaataactactaactgccacagagcacacgtaaagggcagacaatgctccaaattcccagataagagactacttggttatgtgtatcatggacaaagggtgtaaaaagtggttttactataaatattcaaaaataataaaaaatttagaaaaatacgaatttttgtgtttttatggattatttttattttgactattgttttaccgttgttctttaaaaaatattattttcatattgttactacattatattatatttctacaatgtaaaaataatattatttttcaaaaaataaaatgtacgtaaaaaaacttaaaaaaaaaaaaacaatcagtaaaaatgtaaagaaaccaaatatccattaaaaaaaagagtgtaattttaagttgtttgtgtaaattttcctttacattatcattagaacatatttagtgattagttccatattatattgagttgaaaatgtttggagagttgattatagaagatggtttatttgtagaattcttatgttatggcctaaaaaaaaatttcaaaccaacttattatcacaagagtgaagagtgggtatatttatttctgggggagccattacaatccttgaagctgagtttaaagccattcaactaaacaagagtcaccaaacagcatacttcattccattgtgttattacgccaccttaataatttaaattttttccaaagtttcaattagggctatgtttgttagggcgtaactaaccaccatgtggcagctaatttggtttagtcaatctattttcactctctccaggttcattcaaaaaaaaaaataaaaaaacatatgtgcaaaatacatttggattgggcttggatgagaagactgttcctttcagttctttcaattaagtttaggcccaagtctgtgttcacacaaccaaccaacaggcctaattatccaattcaacaaatgggcctgtgtcttttagcaggcccaaaaggcagttgcaccacccacgttcaagagcctcaa

SEQ ID NO: 227717 - DNA, 2879 bp, Cannabis indica
ctgatgatacattggaaaacttcaacaatacttgcctcaatatcaggtcaatgcaatcttataggttcccattgacccttcctcaaatgattgccttatttgggggtatcatcagtcaggtaatttactattagcactgcctattacctagccaactcacaatctatttccaatctcccatcttcatccacacctagccaactcacaatctatttccaatctcccatctcatccacacccgattgtttcaaactctggtagaaaattgtttggagcaccaaaatctcccctaaaataaaacatttcatctagaaagccttcaatcatgtcttaccatgtgcccttaacctctataacaaaaaggtccttagcagccccaattgttcctcttgtaagagtaaagtggagactataacccatgcccttgtagattgctctaaagctaaatctgtgtggaggaactcttctcccaataaattttacaatagtaaccaatataattgatattaaggaatttcttataagaggctttaatcaacttagtaaagaagattttacttttttttttatcagtttggactggcaaatttgatcccgaaggaatgatgctctttttaacaaaaaaattaactgtttattgaagtggaagattttgttagaaatttgttgcaggactactaggaagctcaatcccttagactggggatcaacgtggagggggacaacagatcaagttccaactgacaccccccccccctctctaaaaaggaagcccttcttttgctcaacaattgaaggaatgagattacaaattgaacacaaatgcaacccttgatacaaagatgtttcgtactaatctgggtgttgtagctaggaattggaaaggtcgaattgttgcaagattatcaatccctaaagttgatgcctcctcacctctatatgtcaaggcctaagctgtctttgaggctcttaggtggtgctcagcaattaactttccaatcactcatagtgagtctgactatttacagttagtttcaaatatcaaacataagtggaagaacaagtcagctcttttgggtcttgttgctctgattcgaaaatccttatcaaaatttccaaatgtatctctttaccatatttcgagaaatgataattggaatgcccataataatgctagagacgtattacaactagataatgatttagtttggagaatttaattctcttctctggcttgtaactataactctatttgtagcttttatcttgtcttcaagttagttatagttgcttacaaaaaaaaaaaacaaaacgtaaaggctccgcctgacctgatccctagagatgcaacaactttcccgccttaaccactctaagatttattcaatctaattggaagattgctattgaattagcgctgaaaaaaaaaagggtaccaccatgacatgtcctttatgacacttttattattgtaataagaagcaacaagggcaaaattgacattaaaattatcacacaattatgtgatttttataacagtaataagaaggcatgctaaccacgtgtattttcagaaaaaataaaaacaaatataatttacaatttagattaaattgatatataataatagataattacctaaattaaaacgtcaaagaaagaacaatttttttttttagggtgaatcaaagaacaaattaaaaaagttttgaagactatttgtgacaaaaaccatgatttaaataacacggcttacatatcaaaatagtttatggcacgtaatccaataaatttaaatatttatatttttcttgaagaaaaaggagtgaaagagatgtgtaagcttatttatttatgaaagataataaaatcttttgtttttaattttttaaaagtaaaaggaaagatccaagatgtcgtttaaaagaaaaagaaacagaacgattgaattaaaatataataaagtcaattttggtagtcgagtggaagagggagacacacgtgtcatgtatggtcccaccagagggtaatgggaaggacacaagtgtccaaaacataaaaatatcagccagataggagagctctcacacagacagagatgcccctctccgcctgtcaccattttcccatcaccctccactgactccttacgcacgtccttctcttcttttcttctctatctatccactctcttctctctctcactaaactacaaaattcttattttgtttatttcaatccaaattaaaagtaaatgttagaaggtattttttttagtaatgaaaataaggtaaaaaacgagaaacatgatagatatgtattaatacgaattgggggatatagtctctttctatattttgattcttgctttttattttttgtttctgaagtatctcttttttcattttaatgtgaatatttatgcaatgtatcttaaatattaataaagtcgcctgtattacatattacaagaattttattgatgcacgacaaattatataagaactataaatacattaattacttctttttttggcaatcccaacagtttctatctcacacaataaatctcacatttttttttatattttatctcacataattatattactccatataatattttcatattttgttttctatcatttagatattataattttatgtatactttattaattaaaataaaaaaaacaaaaaagaataatgaaataataaaaaataataattaaaagaatgaaagggaaaagaaaataatatataatagggtaaataccattttagaccctgtgttttgcaaaagttacagattggaccctgtgttttgttaaatgacaaaatggaccatgtattttctaaaatagtaaaaataggaccct

SEQ ID NO: 227718 - DNA, 4830 bp, Cannabis indica
agtgaaatgaggttttacataaggctccttattaatttttggggaaaataaaatttgaatctaatttaccaacttatcctcccacaatcctataaaagaacctgagtttatatgagcataacttgcttttgaaagagttagtggggccagttgatatgtaatttctggtttgaaccgggacagtagatgattcaattattacagttaagacctctagcaaaaaataaataatagaccatgtgaacaaactataaatgttaccttaaatatatataataaataaaaaaaaaaaggaaaaacaaacaccaccaccaccatcaagcaacaagtcgtgtgctttcaggggaataacaaaacttaaatgtatcaaaaaaaaacaagactttagtggaatcaccacctatgcaccaccatcataatataatggtacatatcggatatgtatgtgtgaacattcaaatttccccaccccaccaaaaaataaaaagaaaaccacacattttacaaataccacacaagattactctctaaaagtcaagcattttatgtcttctcacactttaaatcagattagacatccttcttctatggcgacttagtgtagatctcaagttagaatcagatgatgttaccatcctacttttgggcaagaatgttgatttggagtctgagccattgcattttgggctctcaatgttgttgggaacaacatcatcagcagtagtctcaacaccatgttttttcctgtttgagttttgtaaagttgctttgaaacgacgatccggatagcttattgattgagaagttgtaaaatggatagtacttttggtccctgatctcagaattcttgctcttccaataatttctctttcagccgcgctctgcctttcgcggctggctactgttgaagtcatgaaccttggcaatgaaccagaaatgattcttctagtttctttatggggttcttttactttctttagatcttgttttggactcaaaagaactatttcttcttcttcttcatgttcaagtggttgttcagtgtttgagtacagctttttgttctcatttagtatgaattcaactttctgtatctgcttcttaactttctggcattcttcttcagcttctctcatacactcttcaaggtcatggattcttttctctttttgtttcttcagatcctaaagtaaatttgctaggagttatgaacattgattattgatcatgcatacttgaatagaaaaagaaaaagagacattaatgtacctccacttgttctcggttgtattctaccgctcttgctctttttgcaaagcacaaagaacatattgtctctccaacatcttcttcacatgggctgacatgaacaagcatcaacaccttcgatgcatcgcctgtaacaaataattcaagggcagcttataattatcataagctgtttcataagatggtctataatggctgcataaaaagctttcttacctaatgagtccttgagaatttgagttagtttactattcctgcaaccatagagataccacacaataaaattaggtaagacagttggatcagcagaaaaaggagcatgacagaagagcaatccatgtgcatatctgataggttcttcttaaagatttcatctttatttaaaagaagaagaagagtaaaagctaaagctgacaatcaaagtacaaagttagttaattacctgtatggaacatgaccacgcttccttcttagagcagcaataacatcccccaaagctgaaagagaaagatttatagccctgccttcatcaagtgttagcccactagctcctgtttttaatagtcgttcacttcctccaaggtcaaccatccacagtttgcttagttctgttttagctccagctccattgccatgccggaatatggttatccttgttaagctagatatataaagctaaacagataatgtgactgtcaaactaaataactgcaatgaacttttctgagataaataacaagatcttgaacccaccagtgagacctgctggatgtttcattgacatttgtccatgaagtagatcgagctcgcttccccttgttgtaccaccatttggctttagcataatcaaggatttgcacttctgtaagcccttcaatttccacacccccctttggatctgtttgaatgttgagattgctgcaaccaaatagtcaaatcatagataaccctctggctcagtcatcttctgcaagcactggtatacaaaacaaacagattttacttagtcttaccttctagtaacaggttcatagactctagaagttggccttggagcgagtagatctctaaggctgcccatgtaaacctccaacatactcatggaaactttgaggttttcaccttccaacgaggcttggcgaaagagctcctttagagctcggggaatgatccccggctgctcattggtgccatcctgcagattcatttcaaaaacagttttcatttaaaggccaatgcttgaatttgccaccacttcaatgcaacaataactcatttcaaaagcatccattactaaccattgtaaaggtcttgcctgtgccagtttgaccatatgctaaaacagatacgttatagccatctagtgcagatctcagaattggttccacctcagcaaaaacatcacctgaagtgtttttaagcagaattatctctcactgctagaatattaaacgtgaaaaggaaaactaagagaaaaataggcttgattttggactctcaccttggtttacttcttgaggaaagaccttgtcaaattcaaactccttcttaactccagctgacttcactgtaatcttctctgttccaattgaaataggttctggaatttttcgtctttccacagcaaggaatggccgaactcgagaaaacactcgaatggtgcctgaaaattttgttccacagagagatttaaagcagattaaaaatacccctagtaatctttaataacctgatcactaaactaaccaatatctactaccactttgcgaaaagaaacccaaaatctactacctttgatgtctagtatcttattcaatgcttctctccgcttctcattccacaatctgtgctttagcctcaactgttcaatttctcctattaaagcaatacggtttatattttagtataatggagatgaactccaatgtgtaaagtaatcgaataatattggaaaatacatatatttatatatatattctaccttcaaggtctgatatggactgaaggagcccgctcttctcgtactcgggtaaaatacttacgtctgtatggatggtagaaagaggaggagattcagaatctaatgggaacccatcaggggaaactggatttgcttccatgggagatgatttgaaggactcttttacgttgactgaaggcaatgagatctgttcaatttcagttgaaatgaacatttctcagagaacttagaacaaacagttggacaccctttaaaagaattggaatatatatatatatatatatatttataaatacagacagagactgagaagaaagaagatcactttgcgtaagctttaccccaaaaaagaaaagcagaaactgaagaagtttatataccctgtttaacaagactataaagtttgtaacttcaaacagagaaaagaggtcaaaacagtttatgaacatttaacaaaataacgatgacagactattaattgaagcatttattacttcccaaaaactgacacacttgaatccatatgaaggaatcccataaagcactttaggtactagtaatggaaactaaaacattccattaaaatatatcaaaatttaagagttccaagaaccctagatcatacccaaaaggaattgctgatcaataaaaatgcatttttctaattaaaaaaaaaagcagccaagaggttgagaaacaaaataaaccaagaaaaagtttgaaaagcccagatgaaaaaaaaataaaaataaaagggaaaaaaaagcaagttggatatgagttactttcaatgattgaacactctaatgacccagaataagaggtgatataagttcatgtacagttcaagggcgttttttttttttttgcagaccagagagagaggagcgtgatgactttgaggggcaaaagtggaacaggagagagaaaaatctcaatgggtgtttcttggtcccagtagtcactctagtcactactctttcttaatttatttaccttaagtttgactaaaggtaaggtaagaagaacatgaattaattgtctacaatgcatcaaatctaaagatgctgacatggcaggctggtcagccaacactgttgttgttgcgatcacgtgtcaaatattggttgagtgacttagtttagtagaatggagttcggtgcagtggattttggcctggtagtttgttgcacacttttttacagagaacaatgaaagacttgccgttaacggtaaactgtaaagctgtaataatggcgggtaagtgaggttgatgttcttttaattttcttaaatgttttttcttttttttttaaatataggttatgtttgttcaataaaaacacataaataatttaagttttttattattaaaaaagtaattttataaagagtttgagtcacatattttgtgattatcaaacagatgaaaaggaaaaaccaacctccaacttaattctagtcaacagcataataagattttaattaagaactcaaaattaattacaggtatttttagtaatattttttaatcagttttctatttataattaaaaaagtaaaaataatttttctaaaaa

SEQ ID NO: 227719 - DNA, 4875 bp, Cannabis indica
tccattggatcggatgtctcatccaatatccgatccgatccaattggatttttaaaatttgcatccgatctgatccaattatgattggatatccgattctattgaatcggttgagattggatcggtcggttggaattggattggatgactttctgcacacccctacctacagagttggggaaaagcagtataaaaattcgaatataagacctagacaagatcaaaaagtaaatatggataaaacgcggagaacaaagcttgaaattgaaccataattcaaaagagcgcaaaatcgttccatagagttctaattaaacatatgcactaaactttaacaatattatgtagttcatctctttatattactgaaaataatttgtcttaagattacaaacatcatacacacacgtgctttatataaactaatgttggagacacattctaattaaaaataatttttacacattctaattgaatcatatcattagttgaaattaattgtgtgaaaagtataatttgaatgtatcttcaacactttactcatataaatatatgtaagtaagaagacttgtcctgatgtttattttaggataacgataattgtgtaatttagggtgttgactatatttttgtttttatttttttgaaaagggttgttgactaaattgggagaaagtatttgaaggttataagaggttgtagaagggtatggacctatggttgtactgtgttggaattgggagaggttagagtcaagcatatcaaatcgaaacttgctcaatcctaactttcatgcgatcattgtaaaaacagaatgacagatgatgagcaacacaaaaggcatcatttatttctttttatttacaaaagcaaatgcacttggagcaagctttgacttcacaaaattaatgaaatttacaatataatcacaacttgaaaatacatagatttacagctaataataatgattatatttactgtataacaagctgaagtattaatgtttatgaaagtcgaagcaaaagatgtagtttggcttctttgaaccagtttaagctttgaatgcttttaccaagattatattttatacggactgcagataaggattccagattttcaagcttctgggataggaaggagattttcctgataaaataggtattcatgttagtactaagggtttgtagaccagtaaattaaagcagtgatagacaactggtatagaatagacttacctgggaaaatctcagatgcccatgttgtaggttagtagttttaacaattgtctcccactttgggtctagggatgatctcaatggactgctattgcaaatgtgggcatcaagtgaagtctgtgaatatgaattctttgaggaaattgtaggcaaggtacgctttagccaagactctgatggcgattttggcaagggtaatgcaagtgacatttgcaaagagctgccattagaactcccatcattacctaaattcgcaagtcttggactatccaaatcaattacttcggttttgcttgtttttgatgtagaactttgaacaagggctaatgcatcttctttagtacccgatttcatcagccgttgtctttctgaattaaacttcctgccatgagccttttctgagattgtcattgtggtaggattctgaaaatggccacaaaagttcttttcataatttaatccaaactgttcttggattttaaaatcaatcttgttgccagcttcttttgagcttgtaaacatgacagaatccttaacaaggccaagacgcctctcttgattacgggacttcacagaccgtggactttccaaattagaattctccaagtcggtcacttttgaggagcataacgaaatagaatcccgagtaagatcagcctgattggaactatttttcatgttgatttttctatcaaaagcagatctgaaatgggaatcaacagagtccaaacttttaggccttaccgtctccttttgattcgcaacatttgagtgtctgatatccttaagtgatgaatccagtgacagcttgtcttctgtgtcactacttttttcaggggctcaacgtcattccctctgcaatcagtcaagtctttcatatccaagggacttgactttgaggctggatatttcactttatgtacagcatctatgtaaagagtcttctcaatcactggactcccagagccaacttcccaaatgttgttctcatttgctgactttcgaaaattggtccgcgcacttttatggatatcaaaggcactattcttggaattttttgccttccctggtgaatttagaagatcattttgttcatgaaatgtggatagggaatgtttattatggtagggtgatgagccatgcccttgtagatgactatatagagatgatcgatcaagtttttgagactcgcttttctctgcaatcttgttggatttacttttcgatccaatctctcctttattgtcattagctgtttggggtggagccgttaatctttgctcagatacaacatcctcaatttgctagagagacaataaaacaagtattgagaaactgttatcaaatagacaataaggaaagaatgttagcaagtaataaaaggaaagatacctctgtgctagtcccactgcaagagctagaatatgaagatttggcacgcactcgacggactgaagaaacagggaactgagcctgaattttcacccctggtactggattcaaaaggcacaaggaactctttatgcaaaatcgaggaaacaacccacaaagtttagcagacaaaatatcagtgctttcacagctatcagattcatcttcactttcttcctcacctatacactgcgcataaggaggcaaaacattttccctgcattgattaagtggaggctgcttatccctattcactaccttattaacttgtctcggttgctcccacacaacctgttttcttctaggaggatattgaggtgtttctgaagccattgcttttgctgctggcagaaatcgatcaatcataaaatcccgagtatgtgaatctgttgagacagttccagatggcttgacatctggatcatcgtattcactcacacctgttacactgcagttcatgaagaatgactcagatctagatagcgtttcaagtgcgtctacataggcctcgtcaccgccctctgaagcagaactactattctcctctcttccctgtatagagcttttatctttagtttcatttcttttatccaggtctgagacatctctggaactagaaaggatacttgcagatggggaagggggaacacttgtacttatagaacctttgtctgaagcttgatgtttcttatttgaaacccttccaggtgggagttttggaacactcggagaccattcaggaatcttaatctgagattttctttcatccctgggttttcctggggttttctcccacacaaaaggaacctttccaggattcctcactggacctgactttagttctgatttgtaaacaggaagaggtggtaaatggggtactgattttcaattttccgtttgttatcggcttctgaggtcgcgcctgtcgatgaaaatcgtctgacagataaaagtggctgataaaaatccaactgcttgtcttccatcagattttttagaatcatacaactgcttcccaaaatcaccacaatcaaatttaacagcactgatctgtgagaaatttttcaaaaacaagaattacaacacaagactggtagaaaaaaaccaattactacaaattctagtctaccctaaaaaaatataataattaacagataacatatgcatagcctacttctactcatacaactaaattcaactgaagttgcatcaagggtttgaactaactcaatgttctataaaaacttgtaatttgggtatgaagtcctgtttaaaccctcattttaccttatattttatcagcttctaagtaccacagctgtggtaaagtctgcgactattctatcggtgcatttccttggattgcatcaacattaattttcaaacagattaactgattcaaaaatgtatgacaatcatacttaagtgcataattgttcatggaaacattcaaatcccactccacttgttggtgtttctatctaaaaggatgaaaataattaaaagaataaattcatgttaaaaagatttctgatcaattccaactgtcctgttggacccagctgagcatcatcaaacataaagtgaaatagtctttattttttatatatatatattagtgcttgctttctgtgaactggaatcaatgtctgctttaacctttattctcatctcaacaatgctaaaagaaagccagaacttaaatcaaataaactaaaattgttcactatttgattagttagggccacaaacttaaatgcaacaggaactagtaaaaagatacaactgtactaagcagctacctagatgattggatttcataatgggtaagatacaatgtttaactatgtaaggtatgtttggataaactaacaagaatagaagggttcaaaaatctcttactttcattcaacattcttcaattttctcagtaacgaaacagatgggttaggtataagtcaaaggtggctgtccattttgggtcatacatccagataataagtgtataaaattaaatgaaactattcttctccattgataactcaacaatcactatcaacccaatcaaaacctcaccgtcaaaaaaatttagctctacttttttaggaattaaatactaacaactatatttatataaaaaaaaataccttttttttcctttccagcaaacaatttatcacaaacctttctaaaaataataaaatatcgt

SEQ ID NO: 227720 - DNA, 2108 bp, Cannabis indica
ataaattttgtgtgactaaatatgacttttactcataacaaaagtttacttgtgactaaaacatagtttttagatacaagttgtcactaatttacttttagtcgcaacaattattgtgactaaaattattaaaaaaattaaaattgtaactacttaccgaagaattcgccgtttattgcgcaatgcagaatggtatcaccattatccctccgacaacatgcatcgttagacttggattgtgttgaagtacttttcatcatcaagaacgagtttaggtaaagaaaagcgttcttcttgccatgtttagcagccaaaaagaggggagtttcgcctttttcattcttaatctcaatcaacgaacgatagtagtcttgatctagatctaatgatgacattattgatatgcacataggaacattacctatagctgcagctagatgaagagccgtatttcctttttcgttttgaattccaagaggtgagctgctagcgttcgctacttgctctacctcagttctgaacatcattacatcacgattatcgtcctcataataatcgtgatatgatgatggtaatgatgactttgtcatatcttcagatatgatagttgatatatggctctttatgctagccactagcttataaacgatatcatctttaccatcggccacggctacatgcaaggctgtgtagccggaggtgctaatcttagtgctttgagcattaggatccgtctcgtacaaacgtacgacttcgtgccaattttgttgcatcgcttctctgatctttccaaccaactcttgctggtcatcgaagttctccatgttgttttgcaaagcgtgacacacttaattatagtatataaatacatatacatatatatatatatattacatgctgttttataaaatatgtatattgcatgtatatatatacatttatttatggttttaatttgtagttgtgacaattttatcatgtgtttattcgttacgtaggtattaagttgggacaatatatatgttaaagtgttctaagactttaatcgataagactaaaaattagaaacacacctaaattgatgtacttttacttttatttttacttttacttttttctgggatatggactgtttattttttcagaacttatatgtatcaaattatgctatttaaattgcttagaccgttaaattaaattggattcaagagcttattcggtgtaattttgtttaattttactaatgataataccaaattgtgtctcgcgaattttaacatgcatcaaatcttgttgtcggaactttaatattacgaatttttaccccttgaacttacatctatgtcagactatagaaattcttaaatatatctaacaattttcatagtttttgtacatgtaaaaatttaggaaacaaaactaattctaattatatataataagtaattgtttgaatttttaacagtataaattattcttaattttttaaaaatttatcaagtttatatatttgaagagaaaaatccaaattatatatatataaatatatatatttgtaaaatataatattatctattttcctttttgaatagatctaaaataatttttaaaaactagtcttaaagtggaaactggccgtaatgactttaaatatatattttcattaatctaactataaaaaatagtgaattagtatgtagtatatatattgcattgtattgtgttgtataatattgtattatattatattacacaattttagtagatacaaattcggttcaaattaacaacaaaatcaaaatatatatgtacacaaattttaagtgtgaaaaatactaaatcattttaaagcgatcaaatacttaaacgcgattttcttaaaaacactattttttggtaaattagagctaaattaatagaatttagcacttacaattcttaaaacaattttatgataaatacatgattatgaaatacattttaacgtacgcatccaaatattaataatatataaaaattaatagagtcaagaatattgtcataaattcacataaaataatataataaatactattgttgatgcatttggatacataaatattaagagc

SEQ ID NO: 227721 - DNA, 2732 bp, Cannabis indica
gtggaccaataaaattgtgccacgtgtacactgtgtccagtccaacatgacacttaacacctaaaatggacggaaatggtaaattgctaacagaatacgaatattgggagtttactgcccaaatttgagttttggggttaagtgaaactaaaatgaaagtttggggttttggccatttactttaaaaaaaaataccaaaacttgagctcgagtttattattttgtaccatttgaaaaaattaatacagggtttaatttgtcatttgataaaataaagtgtacaatcggtaattttcacaaaacacatagtataaaatagtatttaccgtaaagtaaagaaattagattttgatgggaaaaaaataagaaaaatgtttatgttcctatttgaagtttctgcacatttttacattactaattactctagactttctcacatttatataaaaaagtttaataaattagaaaagtctagaatatttagaagagcttagaaataattaatcaagaaaaatttagaataattgtgaatcatatagaaccagaacaatcaaaattgcatattaatcaagattgtgaatttaaatttagaataattaatcaagataaattattctagccacaaatgtacatgcaattataaataccccatcaagattgcatattgtaaccaagcttgaaaactaaatcaagtgtcctactactttcaaacatattacctactcttctaatggcctatatacaactattttctatcttatctcaatcaattatcaagtatcaactcatcatcaatataacacccaaaaatcaaaaactacatacttacatacatttctcttctaaacaaaactatactcatttactaaaccaacaactaatcatcactacactactttattatttggccttgttattttacctcaacatcttttaaatacttaatactctctacctatctattataaattgaactaatccaaatttattctcaatctataacatagtcttaagaaaacgtatttgtggattaagaaagattaaaatacctttaagaaggtaattttaatccaaggccatgtataatattttttaatagtttttacaaatttagaatattttttccaaaatttttatataattaagagagaatcattcatgtttaaaggccatatttttcaaatttcaaaggaaaacaaaaaaggtatgcaaagaaacaatattggaagtccatgattaaagagaagaccttcgattaattcgttatgtgcagaatacatcattaaatcaaatcatgaaatgaaaaactccatatctaaatcaatgaaaaataaataaataactttgtggcactataaaattcctaagatggtggaaaaattggacaaaatacaatctatcaaacaatacaaggatgtaaaataaagtttaaattatggttggaaaaagttttctccagacaagttaaaaatagaatgatatttgtaatgagatgaaaagaattttcatgctcatgaaactaagaagaagttacagcaagcaatcatggagtttgcacatttgagtccttggatttgttctcttcggacgagggccggttctctgagtcagattgccggatgtcttcgatcattctaacaacttcatccatgctaggccgcatatctggaacctttgtcacacaagccattgcaatttgcaacatttgcaccatttcttcttcaatattttggtacctcattagctcaacatcaaatacctctgctgtccattcctctcttacgacggaatggacccaccttggaagatcaaccgtgtcatcacgaccgggtgattgaagtggagcttttccagtcaacatttctagtaacagaacaccaaagctatatacgtcggatttgtgggtatatttacgggtttcaattacttcaggagcacggtaccctgcacccctagaaggagtggcatggacattcataagaggtgtcaggccaaaatcagagatacatccatcaaaatcttggttgaggagcacatttgaagccttgatattcccatgagtgaacttaggaccacccatagaatgaatgtgagcgattccctttgcagttccaagggctatctttactctggattcccagtctaactccgttctcccagctcctctgtttcctgttatcgcagccatgagaagaaactttattacaaaaacaatcaaatccaacagaccaaaacacctaaaatgcaacaagccatactgcaaaatttcaaatacaaacaccctaatcattttattggaatcttgaaaagtctaggtgcataacaactcattaagaaagaaaaattacacatgccattgtttcagatgtcattattccatggtgccaagttcaaaactgggactcaacacctaaccttacattatttggaaagaaaaaaaacctataacaattactgtctagtgtctaagaggaacttaaacattgaacattgcgggtgcaaacaaccgattaagctacccctttttagtttatatttgtgtatcttttcatgttcctgtcatgcaagtatgtttaagtttgtactgattacactgctaatttagttaacattcagaaattagcaaagtattagaaggatcagatgtacataccatgcaagagagcagataaacttccacgaggtacaaagtcataaaccagaagcttttcatcctttgagtaataataagc

SEQ ID NO: 227722 - DNA, 2141 bp, Cannabis indica
gagggaaagaagttctcttgaaagttgttgttcaatatattccaacatatgtcatgagttgttttaagttgtcatctactttttgtcatcaacttgagcaaatgatggaaaagttttggtggggttcagacactgataagaagaagactcattagagaaagtggaattttctttgcaaaactaaaatagatggtggtatgggttttagatcttttgttcatttcaaccaagccttgctggcaaaacaagcttggagaatcattcaatatccacattctcttcttagtagggtgctgaaaggtagatatttctctcataatgattccatggatgcttagataggcaacatgtcttctctaacttggcatggaatttgttggggtcgtgatttattaaaacctagattacaattgaaagtaggtgatggtagttatctggtgtgcttctaacccttggattcctcgaaattcaacctttaccccttgcgttatacgagatgtcctaacaacaaagtttctgattatgttactgctagtaatgaatggaatctcacccttctgcaacatgacttttcctctgctgatgttgattatatccttactattcctttgtcctttaataatctgaatcataaatggatttggcatcacagtacctcaggtgagtattcggttcaaacaagctatcactttgcttgttctcttgaggaacaagttctttcctctagttctacatctcaagatgcttggtggaaattattttggagtttgaatcttccttctaaagctaaaatctttgtgtgcagggtgtttcaaaatgccatagtagttgttgtctccttgttttatagaaaaattattgattcaacatcttgtagcttatgctctaatgcttaggaattggtgggacatgcgatgttttgttgtaagcatgtgaagtctgtgtggcaattagctggttttgaatttaattatcgagcatcaggacaattgaagcatggtgattatattgtttatttggcttcagtttacaccaaatttgaacttgaacagatcatatggattgtgtggtttatttgaaccgatagaaataatattgtccatggtaaaaaggcacaacgttcttcagaaatttgggcagaatcatgtgctcacctctacaattttcagcagcaccgtatcactaccactacttctattttgactcctgttggtgttgctgctcatttaccgtgacagcctcctcctccacgtaaactgaaattaaatgttgatgtggccattgatacatcaaagaataaaatggaagtaggtgctttaatttgagattctcatggtcaagttcttgctgcaatttctaagcctctaatcaacaattttcgacctcaagaagcgaaagccaaagctttgtttcatgatctcgtttgggcaaaacatctccatttcaatttggatctcattgaaactgattctctgcttttgacaaacaccataaatcatccaacatcaaacctttcttcttttcaagatttggtgaatgatgttcaaaattaattatcctatctctcttctgtttgtgtatctcatgttagacaggatgatagccaaaccgctcatgatttggctaaacaagctttagtgttggataatgattgtacttggttagaagaaatttctttggtcattttctctgttattgtaaatgactcttttatttattaataacagatcttttctaaaaaagccttttttttctctcttttttataattttttagtctaattttagttgtacgttttttttaagtgagttgctgcatttttttttctcttctctctatttttcttttttatttttttcaactctctctttatttttttcctcaaactaatttttatatctccttttttaacattctttttttctcttaaaaaaataaaaaaatataatttgacatgtatcaaagtttaaggcaaaaatctaaattaatcttatttttattattttaccagtagaccaaaattgaatgtggctcaatctctttctagttatgcaataaatgtgttcttgctacctgtggaaacttacagtgagatggagcaattgatgtgtaagttttggtggcgttcgtcgaagaacaac

SEQ ID NO: 227723 - DNA, 2563 bp, Cannabis indica
attgttctcatcccgaagagagataatgcttcttgctttgatgattttcggcctatcagcctctgcaactttgcgtataaggttatctccaaacttcttgctaatagaatcaagatccttctacctaatttgatctccccgtctcaatcaggttttgtgccgggaaggtggattgcggaaaatggtatcattgatcataaggtgatggattcttttaaaagatgaagggtcgcaaaggctatgttggccttaaattggacatgtctaaagcctatgaccgaatggagtggagtttcttggacaaaacctcggagactttcagttttggtgctaagttccagagtttggtggcaaagtgtctttcctcggtgtcattttctatccttctaaatgggggacctttgagacaattcaagccaaaaaggggtcttagacagggagatccgctctcgccgtatttgttcatcttgtgtagtgaattgctctcacggatgttattgaagtctgaacaagatggattattaaatggctttagattcgccagaaatgggactcctctatctcatttcatgtatgcgaatgacacccttatcttctgtgaagcaagtgggaaaacgtgttggaagtccaaagatgtttaaaccaatactgtgatatgtctgggcaacggttaaacgttaacaaatccttggttttctcctctaatgtggcagcggatgttaaacttgaaatcaaggagctattggggttttgggacttgacgagaaacgataaattcttggggaacctgattctcttctcgaggagcaagaccaatgatttcaagtttctcattgacaaaatggctaggcggattgaagggtggaagacgaagctcctttcacaggccggtcgatctactctaattcactcggtggccatgagcaccccgatctacactatgtccaccttcatgatcaccagatccattttcctggaattggataagttgattcgtcgattctggtggattggttcggttgataaaaactgctatcttgccctcaaaaattgggattctatttgtgtgccaagaaaatggggcggtctaagctttaagaaatttgaggagtttaatctagcgttggtctctaagcttggttggaaactcgcctccagaactaactccttatggtgtcagttttttcgggataagtactttaaaaggggccatactttctggacaacccactttcgtaattctatgtcctttgtggggcaaaaggcatcttgagtattagagacctaatccacaatgaggcccgctatctcatggggaatggcttatggtcaactccttatttgcaaatgagcctggggattggtttgttgatgctgttggggagtggtttctccctcatgtttgcagagaagtgttatctattcctcggctggtagcagataaaaaggatgagttgatttggaaggcgtcaattgatgactccttctcagtcaagaatgcgttcttggcttgcattcgtgagcgctgtgggattgagaatgacctatggaagctgatttggaaatgcaaggcgcatgagagggtgaaatactttctttggaagcttgcaaaggatatcctcccttttggtagcataactcaacaaatcttcggtcatggtaagacctgtgttctttgcaatgatggtgttgattcccccttcacttattttttcattgtgtatttgccaaacaactgtggagatctggtctgtgggatgtttgctcggatttgcttcagtttgatgatcctacgtcgatggtgcgatggctggtgtctcccccacatatccccctcgggaatcatatcgacagagaggctttttccctctatgcgatacacctttgctacaaattatggggggcaagaaatcaggcttttcatgaaggtacgtcctaattattcagcgggagattcttgcctcggtggcgagctgtaatactaaaacccccgaggggctgagatgcatcgatctggtttcatcccataccagtaatctcctgtggtctgagcacaacttcttcatggatgcagctgtgtgcaataactggggaagtgttgctgttttggcatgggatgcctctgggtctttgatcgaagcgctcacggtgaagagcgtggtgagctccccctttgtggcgaagctggttgcgatacagcaggcgtgctgtcgggccctgctctctggtttggcgtccatctccatcttctcggactgacaagttacggtgaacggattgttggctgggtcctgcccggagtggaaagctcagagtgtctttgattccactttggattgcttgtctcaaattgagaatgttaaaactctattggattcctcgcaacctcaatggtgcagctcactctcttgcagtgtgggctgcatccaataaatgttttaagatgttttctgttagggaagtggcatcccttgttgtcactacaaactttgggtttttaatgccctgttttgctttgaataaatctaggggtgttcattggatcacatccaatggatttgga

SEQ ID NO: 227724 - DNA, 1405 bp, Cannabis indica
gattattttctaaaccattttcttcttctgtctaaagaaagaaagataggtataaagtaaaagaatacaaggggactaatgttaggccactcaatagatagtcatattcaaattcttcctctgtttgacttggaagttctttatatgaaggcttttaagcaagaaaatgggagcaccaaatctcctcttttggccctctccaacattgggcaatcaaatagatatgtttgaaaaacttaaggaaattttctatattaaaaatgatccaaatcaagaatggcttcctgagaatttagcggcccatggtttggcaaagcatgctctgcggttagatcatgagttatcctggtttgaggattgcggatttttgcttaataaattcacgagtgattctaatcattttgtcaaaaaaaaatcaagaatggctagaaattacaaatagataatgtgatgagagtttgggtacttgtttattttctatatatagtaaattgaagctgtttggttatgtctttcatggttatttgaagtgaattagatttgtttgaaacaagattacttataaaaaaatgttaccctacttgtaatttaatatgacaatttgggctacacaagttgggatttagtggtaatcattcactttccattttttttatattttagacttagatattatatttactcaatgcagacatttattgttatatcttattgaaaaataaagtagatgataaataaatacaatgaaaaaatcttcattgtcaaccagtaactgggcaatgacagcttagatgataatgacaaggccattaatgcagaaaaaagctagtgcaagatcatatcataaagatgaagatttttttatttattataatttatatatggggccactttcaatagggaacatgtcttggacattttattacataatttgtgttgagaagtagatgaaaggtctaagcattaagtaaagagttcaatcacaaaaacagaaataataagcaaaaatgtacctcaaccatgttctgtgattctagtgaagctatagtacatatttcaagtaacaatctgtactcaaatatttaagttggccaaatcagaaaaggactattgggccttgtgttgatctgttttcttttcaacaagctggatctaaagacttttgaccacacaacttttagagcatagaatatagtaattgattcactagtagaccccatctatttcattgcttctttactccttttcacctttgatttcttaatgtgtatatatatatcataagattgagtttactagcacatcaacttttcacattctcaagtagcaaaacctttgaaatcttctttctttcctttagagacatatatacaagaatgggattcagatttccaagcatagttca

SEQ ID NO: 227725 - DNA, 3518 bp, Cannabis indica
caagtgtgttatagagttacacatgatcaagaacaatagataattacaagccttactagtatttttaggcattagatatcctaacagaattaactaactctccctgtcgagctacatttgtgcagttgtcactaacaactaactgtgagttgaaaacaatgactagtaacttgtaaccatcatagcaaatccccaccctagtttcaagttgctattgcttgtaattacttcaagcagtgctgctattcctcagccctttagggctcaaatgactccaattccaatcagctttaggcaatgctcaaatttactgcttgacactactttagtaatcgtgtctgaaggattgtcctctgttggaaccttggcaattttcacagcttccttctccataattgcccttattaaatgaagcttttatgtctatatgtttagtacgttcatggtgcacacaattcttgattagttgaattacactctgattatcacaacgcacagtgataactttctggttaaacctcaattcttccatcaaaccagtcaaccatagtgcctttttgatagcttttgtcaaggccatgtattcagcctaagttgtagacaaagtcactactttttgaaggtttgttttccaactgattgcagtaccaaacatgttgaaaacatatctagtaaaagactttctagtatcaatgcaccctgcataattagaatgcacatatccattgatcacattcaagtacctcaaaatctatttcagggcttctcaatgttcttttcaagggtttcccatgaatctacttaccatgcttagagcatgtgctatgtcaggtctagtgtggaccatgacatacataattgatccaactgcactagtatatggaatctttgacatctctgccctctcggtttcttctttaggcatatgagttgcacttaatttgaactattgtgcaagttgagcggttactacctttgagttacccatttcaaaagtttctagaaatttttggatggaacttttctagttcaagtacagaaacctctttcttctttctcttttgatgtccatgcctaaatttctgcttgcagggcacatatccttcatttcaaactcctttttaagttggagtttcaagtgtttaatctcttgcgtactcttacttgctatcaaaacgtcatctacatatagaaacagattcaatctatctcaatttatttatctgaaatatattcaaggatcaaacttgcttcttttcaaacctatcttagtcacatactcatcaaatctcctattccattgcctaggagatttcttcaaaccatatagggacttcctggcacaccatgtgctcctttccaaccttcaaatccttcaggttgtttcattagttttctttcatccaagtttccatacataaagacagtcttgacatctagttgctctaattctagattttgacaagcaactagtatcaacagaattctaattgatttgtgctcaacaacaagagaaaatacctcatagtagtcaaccctttcagtttgagaaaatccttgagcaaccaaccttgctttataccttgcctcttatacaccaagaatgcattccttccatctgtacacccatttgcagcctattatctttgcatctttaggcattagtatcaagtctcaggtgtgattcttcttcaatgagtgcatctctttagacatagctccattccatttccttctgtccttctcattgcttgtgcgtagctaataggctcttactgcacaatctgattagcaacatgaaatgcaaatgcaattaaatcagcatgcacatacatggcaggtgtgtttacctctctccttattctatccctagctgtgtttcagatcatcttgttcaaaattgtcttatgaatcatcactcatgattttctggtgtttcaatctccattctagcaaaaggctccacctcaagctcagttccctatgcttcaatttcatttttatcagatctagttttatttatagcaggcttgtcaataaatcccataacagcttcattgaaggtgacatccttactaattatgtactttctcattcctggctccaaacaccatagtctataacatttgattccttctagatattccaagaaaatgcatttcaaagcccttgcgtcaagcttgtcttgttatgcctgatatgtgcatagcacacacatccaaacaccttcaagtgttcataatttgctaacagtcctaaccacacctcatctagtattttgaaatttagtgttgttaatgggcatttgtttatcaaataggctgcaattgtaacaacttctgcccataacacttctagtaaatcagcacttaataacatgcacctcaccctctctaatatggtactgttaaacctttcaacaagtccactttattgaggagtctttctcgctgacttgtgcctagctattccttcttcattgtttgttaaaagcctttttactttctttcctagattgattttcaagcattattttccaatgtttaaatttttcaagcacctcattcttacttttcaaaataaacaccctatagttttcttgaaaaatcatcaactattgatagaaaatacctgcctcctgagtgtgatgatgtccttaagggtcccaacaaattactgtgaatgtagtcaagtgtccccttggtgttctttttgctaattccaaacttggccctgcaagacttaccaagaacacaatattcacagaaatctagttattcaagatttacctgtccaagtagtccatgcttgttcaactcatacaaaccctcttttacttatatgaccaagtcccttcataacaaactctgaacccaatagaatacaatcagttgaaagcgtaagtataatgtcatccacatataacagaatataaacagtgtcagaatcatttttgtaaacaaataaagaatgatcggacttattgtgagagaatccaatggtagcaacaaaatcagcaaacctttgacaccaagcgcaaggagcctgtttcaaaccatataaagatttctttaagaggtaaacatgatttggataatttttgtctcaaaaacccatgggttgatgcatataaatggtttcattaagatgaccatggaaaaatcattcttgacatccatttgatggataggccaagatttagaggcagaaatactgagaacgactattatggtagtaggtttaaccacaaggctaaacgtctcatcacaatcaactccttgctcttgtgtttttccatcacctacaagacgagccttctaacgctcaaaagaaccatcagaattatatttatggcgcaaaatccacatagaacgaataacattcatatttggtggtcgaggcactaatacccaagtcttattatcaattaaagcagtaaattcatctaacattacatttgttaagcaaaatttcacatttagaatactaaaaataaatgcaaaacacaatttcaccta

SEQ ID NO: 227726 - DNA, 1501 bp, Cannabis indica
ttttttttttctctatttcagtggctcaatccagtggaatgtatggaggatctagtcattgaatacgagtatgtaaaactacacataattttttcagattaactatttagatatagatattaaacaaccaaacgtacaaaaacatttacttatatatgttatataatacaggtatgtagagtgtacctcttcctcaatacaagcattaaatctatttaggaagttatatccaaaccataggagaaaggagattgacaatttcattgccaaggctgtgagataccttgaagagacccaaatggctgatggatcttggtatggatgttggggaatttgcttcatatatggtacatggtttgcgattaaaggtttggaggctgcaggaaaacactactataattgtcaagctattcgtcgagccattgattttttacttaacacacaaagagaagatggcggttggtcagaaagttacacttcttgcactaataaggtaaccgaaactactattaacttttccatgttaagtaaaattgaaaataatctagtgaattgagaattattcttttaagttagatcttatcttagtttcgttggtctaaataataataaataaataaacaaaacaaaacaacaatatgatttgtgttaaaagaaaaataaaaatttaatcttgatctcctcatgaacttattataatagtactctcttgcaggtatatactcctttggaaggagaaaactcacatttggtgcatacttcttttgcattgatggcattgattcatgctagacaggtttgtaattaagtagcgtttttaagaaaagaattcttttttcttcaaaaaaatataaatacattgatttattttattaatttacatatatatataggctgaaagagaccccactcctattcatcgtgctgccaaagtgttgatcaattcacaattagaggatggtgattttcctcaacaggtacgctataaaataattgttcttaatttttatataagtacattaatatgcaacaaaatgagggagagaataatcaagaataccaacaattgtactagctcattcgaaacttttctggactagtttttctattttttttattggttaattaggatttttattccttaaatttttacatttactaaattatgttagatttttatatctttgaattttcatctatcttagacatttttattaaaattgaacaaaagtctttaaatctaacaatctcaataatgcaggagtatttttattattttaaatgcacgttaatatgtattcgatcaaactaaaattaatacaactaattattattttgtgcaaataattcgtttaataaaagccaaaggtatctgatcatatattagaacaaattcaaattttattcatatagggctcgtttggaacgtcgtattaggccgtattgtattgtattgtattatattaaattggattatatatcatatttttatataatacta

SEQ ID NO: 227727 - DNA, 1204 bp, Cannabis indica
aaattttaaaaataattcagaatttaatgtataaactagcactagaaaagaaaatcatacacaataacattagactatatggcacaacttcctcgaggataaacttgatattaccagaaagaaaacagtaaatgtatatgcttacccgcaagtagccaaacctagcattgagaaagttttacataagaccagtgcagagctacaaagtctccactcgaacttcattttttttttttatttttcgcactaatatattttcttctttatttaaagtatagatattcaaattgtatatttaatatttcaaacttatagaatgcattttaatatttcaaatttacacacgtcaaattactgataataatttgatccaaaattaaaaaagagagaaaatctaattttgttccaacccaaaggacaatacccacaaacaagctcaattaattactgatagtgccataccaaatatataaagtgtactacatacgagctttgtattctattattttcatttgagaattacttttttggacaagtgtcgaagagaactacatttttgatataacacgtcatatgtagcttagaaaacagtgtgtgtagtgcacctaacaagtgtaagcagccaatttatatatcggctaatctgagaattccaaaataaaatatttatgcagtgatgaaaagtcacatgtgcatgcaattttagtacattacaagcgtatttaaagccaacaaccttttctatacttattatctgtatggtttattccaggcttcaaccctatatactacaatatggctcaaaatcacttctaattaaacaatggatccttgattgagggcatgattagcctagtgtcagtgaaaatgcaacaaatatctttactgcttaataattcaacctaaaactgtaaaactctgtgttgaaggtgatttcaaatttgatcctcactaataaaagcaatctgaagtctgtttgaggtgacaccagtgagaatacaacatatatctgaccttaacgaaaagctgtacaactaaataaattatttcctttggaaaaaaaaaaacacagagcagaatatcaataaatccctccccctaattgttgaggttttttttatactctgatcttctgctgtggtttggtcttttaacgttttggctttagctatgattttttcacaccttcataattcaaataaag

SEQ ID NO: 227728 - DNA, 2073 bp, Cannabis indica
agtgagaaaagtggtaaaagtaactaatgaaaatttttcaaccctatttataagccaatttttgaaaagggcgtaatcaattcaaaacctcagacgcttcgatttctcccaaaaaccaatattgggaaattaaaagcaatcaagtgctaaagaagggtaaccgtcaaaagcatacaaaagaaaggcgtgtctcgaggtaaaaaatcaattaaggctttaattagccaaaaactaaagagactcctagtcagaatcacatcgaatcacgaacagacttgttcaacacgtgccacccatccaaattgtaaagtcagctcaagtaaagtctacacgcagcttcggaagtctcgtacagacttgggaggcaaatgctatcccattttttgcactatgacgtggcatcacatgttggtgacatgtggacctgattccccatatctgcctaagagagatgctccgagcagcgcacaacacatacctgcacggacgatgtcttcccagccgagcagtgaacaatccgagcagcgtatcaacacttagcaattctagaatttgcatcatgaagcacaagagcaatccctataaatctgggattgtatcacagagatatagcaagctgtccacatcccacaatctatgtattctaaatatgtaatatatgttcttaccaattatagatattgtaagcaaaagagaaaccttcccgcatgtagccccataaatagtgatttattctcattggtaaaagggtcgaaagaattactttaaagagatctaagagagcatactcagagatttcattatgagagcgtcaagagaggaaacactatgttctttgttcttgagttaatacaaatcaagaggagtaggctattaccgaactgaacggagccgaacctctttaaaaaccgtgtgttcttttcttattagcttatatcatacctaaatcatattctttatcgcttattattagactcattgttgttggctaaaagcgaggtcaacagtcctcatatgtccaaatggaagagatcaaatgcatgtttaacaaagttgttattggatataaagggtagtttcttttattttaaaaggttacaaatgtgacattattgattcaaattaatggaaaaacgagagtcaattttttttattgaatgtattagagatgtagattgaaggatggccaaggcgtgtatcccattcgtctacattattatgtaaagaaaagaaacaactagaattaaccataagagtaaactcttgatgaggaatatagagtttcgcgagtattttagctatcccaatcaccatgttcggagaatgagcatgtattgaacaagaattattggcaaaaaaaccaaattagaactattgtaaagaaatgtagtgattgaaaaagtgtttatgttgaaagtgggaacaaacagcacattgtgaagtgtgatgtgtttgtttatttggacagttgcaatgcccttgactggtatgttagtaccattaggtaacacaaaaaatttgggaaaatcattattagaaaaatataggaaacaagatctggtggcacacatgtgatgtgtggctccactatcaatgatccaagaatgagtttgagatgaaaagtgtttaccagccatgttggatgttgtaggggcgttgcttatgtcatcacaaggagtggcttggataagttgctggctgagaagtgatataagctattggaattgggcagacaagtctacatgggttgagttgccagtggccatgtctaagctagtgctgacttagttgaatttgttttggctttttctgcttcttctgtcaccataccctggagaaagtcgtggataaagtagcatttatccacatagtggcctggtttgccacaattggtgcatgagggacttggtttctttgatcttgtggaggattgttggaagaggagggtcgaatagatgttcctagagaggaagaatctgaggagccaagaattcgttgcctctcttcttgaaaaattatagaaaataccctcgaaagattaggattgggttcattaagaagaatttgggcacg

SEQ ID NO: 227729 - DNA, 5656 bp, Cannabis indica
gtaaaatattattgattggtatatatgtaattagcctgctaagcctatatatgaagtagtatttattgtaggaaaacgatcgaaagagaaagtgaaagatcagagagtatatattaaaatacacgactttaatatgtatgattctgtagattcaaaaaataaagcccaaaaatgcattatatttatttgatttttgataatattttcagcatagaaaaagctagtatcttaatttgagcatgacaaaatcaaaatggggccatgccagttagggatatagttgaaacataataagtactagcttttacgaacaccacacccttggctatacctagctattcaccattaacaactttactaccccttataacttattattattattattattagcttagctacgtacctatagctattaaagaatattcaaagcttctacaacaacttacattaatttccatgacagtaacaactgcatttttttaaacaaagctaaccaaaataaatgtcttacatattttctacctaaaaaaacaaaaatccttctttttctcattacattacataacaagttaaacagtatggatcgagtaatgggaatgggagatatcacgtatattcgtacgtaccatttttatttattttattttaaataatcaattgatgtttatattctatatagtataacttcagcttcactcataatactttaagatcgaagttagatcttgagttttattattaaaacaaaaagtttattagtgatatatataatataactcttacaaatatatgcatgttgtggcaaatattgctaacgttacaaaaagatatataatgttgattaatcaatataattaatacctagttattcttgttacgattaatcaattatatatatattatatagttttgaaaaatgtcatcatgcatttttacaacttgtctttgatatatggctgcttcacgccaaaaacatccctgtttttttagagtaaatgctatacagtatttttttttaatacatattgtactaatattttacaaattcaataaaaatatatatatatatatatttttcgtgtgagaaaaaaataaaaaacatatgatactaaaattctactatatttttggtgaactgcatttaataattggagttgccgtggtgggtttacggagagttgataaaaaaacattgtgcatgatggtgggcccacgcgactgaaacaaagatatatggatgtttctacaatatacctctttaaatgagaagggatgaactaattttactctctattaattgacacacaaaaaaaaaaatagtctaaattttttcatattcgtgtacattatctttatctaaaacatcttgcaaaattttgaaaattttgaaataatttacaatgtagatcgcagtgttcaaacaatttattttagacccgtataaaaataaaattatcaggcatacatgacagactgtgattaaaccttatttttagcatgttaatttttttaaaattttgtaaaattttacattgcaagatgtcttaaataaatactacgtacatgaccatgaaaaaaaactgaactattaatttttttagaaaacgaaacagataggttgtcagtgtacccattttagttggtgtatattgcaaaattttcctctatatatttgttgaaattaaattctacaatgcacatactaaaagaggtgcactgatatatctatatctattttggtatctgaaataatttttaagttattttttttatagttgtgtacattgaattatttaagacatcctgtaaaatttagaaaaatttaacatgataaaaaatagagatcaaacagtttgttgcacgtgtgacactataaaaaaggatcatttttagtaacaactttttaatcacaatataaattttttgtgactaaatgtgacttttagtcacaacaaaaggttacttgtgactaaaagatagtattaagatacaagttgtcactaatttagttttagtcacaacaagtattatgactaaaaatacatttagtcccaacaaattatgatttttgtgactaattatacttttagccataaactttttttacaatttttttacttttagtaacaaattttatgactaaaagtgagattttttgtaatgtgagtcttttattttatacgtgtgtcaaataaactgttttaacaatactttttatattataaattattctaaatttctcaaaattttataagaggtcttaatataaaacgtacataactatgaaaaaaattaaactaaaaaattattctgaataccgaaattcggtgcaccctttctagaggtgcattgtagaagcaccttattatatgtaattatatatatttccttgcaaataatttacatgcaggctgcttttcctcttcaagaaataagctccattttttttttctgggggctggtagaaaataagcttgttatatcatgagcaaggtagttgaggaaataaatttagaaccctatttaccaaatttaactgagcagtacttatcatcactttattaccccctcttttatgactatgttcgaaaatgtcttgtcttggtaatatatgtaaccctaacaaaaaatagaataaaataaataaataaataatggttgcagctcaaattactcctatatgtataaattattatatgatgacgatgaatgttatgcttcccaggaactggaattctgtcattatgtatgtacattgcagtttcagcaatgtgtataggactatgtgccatgccattgtatgtatactatatatataatactctctccatgtcttatctaaacacactcacttggtttaattgatatataaaccaatataattaggtgaattttaatcaatttactgtagtctgtagcataacattaactaaacgtcctgtctattttgtactttacatattgacatgtctctggttgttacgtgttgccatgccaagggggagaaataagtttgctgaaattagctttttatgactctcaatcaaagtactttgaccaaaaaattcccaattaattaattatgtgatttgggataatgaagtgtggttaaagagaatgatttttacataattcaaatattaatgagtcttaatttacaagtcacttgtatattatgttaaaagttgaacaagattgattggagagtttgacagcatttttaatttttgtccaaaccttgaatccatttacaatgaaaatagtgctcttatttatagaaaaggataggaataggtctttcttgttgaaggccttttgttggaaattgccctaaaagtcgtctctttaggttatttcccatggtgagaaggactttctctcaattaggcctttggtcaaggcccaaaatcaaggggtaggtgtgtgtggacaagacttatttactggtaattgtgacaagtaagagtatgagccgcctatgaatatatggaaatgtgtgtcaaaaatggttgtggaaatttttttgttaattaaaaaattttgtgttgtgtattattattagtttagaattgttatacataatttgatatttaacagatttaatacaatgtcttgttttgacaaatatttaaatactattagcaaactaataatgtggtataatactgtcgttttttttaaaggaaagatttcataaaatcaacaaatagttacaaatggaatggcaagtccttatcaacaaaagaactagcaacaacgggcactaccacatctctatgctcaaaacaaaaattaatcctactcgaaattcaacaaaggaaatcaatgtatttaagaaaactatcaacatcacgacaacctctttcgatggatttgacgagttgaatcgcaacaaggtggtcaaaagctataatcaaattctgcagcttttttttttccaccgtaagcataatcccaaatcccaaaacggatggctgaataaaatttgtttaagcccaaagtacctgaccatcatggtttctattctagctaccacaccagtacaaaaagatcgactagatgagcaaagaccaacatccacattgattttcaccacattcacaacagggggagtccacttctaatcttggttcgaaggagtaaagctgaatgtattcttagaagatcagccttgaaaatctacaatatacttagtaaaccattctatagtagcatcagctttaagaatcctccattcacctatttattccttatgtgccacaggtgctaagaaatcaccacaaaaatatcaaacttattatgggaaagagagttcataacttccagaaaatcaaaagcattagtaagcctgcagcctttaacctccttccacagtccacattttttccatgtggctattgttgaagatgaaagttttaatatttccgatagctaagtaaatgaactttaatgcatattacgaagaattaagacaagaaagctacatcaatgaacaccagaaatacaagcttactctgcattggaaacacattccaaccgagtagtggttgggtccccaagaatcgggtaaagtaacatctactataaaatcaattcaattatatacaccagttctgattttacaaatcaaactacataatctgaaatgactttacacgatgttacctaattcttgaacacaatcaaaataaccgacctaagcacacttagatccaagaaaacaagctcttcttgcttccaacaagctgaagatccttcagcagttcagtttgaactctcctcaaacaatgcagattcgaactccttcttcaacctcttgaagattcactgaatttttatctgcatataacacagaaacaccagagaaatatttttccctagcagagcaagaatcaaaacgattctatcaaaaatgagagagttagttagaaaaaagcaacaaccgaatattatatactcaattgcaaaagaaatagctcggctaactaacaaccccagcggaatccaactggcacctgacttaaacaagaaaggaatataaaagctgaaaactgacatggcaaaccataaaaaccactaagacaaaacagatgaaactaatgacaatttaaatgaccaatgaaaaaagctaagatagcaaacatggaaagtcaaaaatctgaaaggaaccacataatttgccaaacaaaaactattgcacttacagaagagcacttccaaatagcaagtattatatcctcctcaaagccaccaccacatttagagcacttaggatcgactttcaacttcttgcaaaataaaacacagtattagtggggagccaagaatagcccaacttccaaagaaagtaaattgtgtgagatttacttgaactgggtgagattttgaaacaaaaataatttacaaaatcatcaattgcgattcaggttattgtgtctagtaaacatagttccattaaacgaaaaatatatattcagcttgctataaatttatggttacataccttatttgcacttttgccgcaatctacaactgcaggttcattgctcaaaataggctcatcattgtcaactggatgttgaggggaactcaaatatacattcgtattattttgaaattctttttctactgatgttggctgcatctcatccca

SEQ ID NO: 227730 - DNA, 2054 bp, Cannabis indica
aaaaaaaaaaaaagcaactttttgaagagaaacatacaagttaaagatggaaacttacaaccaagaaaaaggttttgttgatagttttgaatttgatatatggtctgggaagttggtaatgtagttttgctcagccaaaccaagaaaaggtatgtgatatttggttcgctaccatagagtgtgtgagctataccagagttttggatttgagtggcttggctaccggcaacaacaggttgctggtgaggatgtaaatttccaacaaaagcaagtgagaactaatgtacttgtaaccggcatttaccggtcaatggtcataaggatgatattatcatagctttgactagaccagttcattcatttactttggtttcaaaccagaccagtcagtaagtaccagtgcggtccactccacactaactccccccttgtctggactacgtctatttattattattattttcaggaaaaaaaaatgaaattggtgatcacattttcttttaagagaaaacgaaaaacaacatagaagacaggttgtaaaagtagaaaggtgaaaaataattgtagtttggtgggggtacccctcttttgttggacttacatatactgtgatttagcagatatgagtatatgaccctattcctttgtaacgaataaatgaaatcccttttctaaagaaaaaagaaaagaagcatctgaattctgaataggccttgaaactgacaaatttaaaaaggtgaaagaaccaaaaagtaaagaaaaaaaatagtaataattgattggcaccagtataatttcattgatggagtagctcctcctcttggaaaagaaaaggaaaaaaattatttaagtatggtcggtggacaaagctcgtgtgatttaaaacttaagtttcttattttatgtattaataatttatttactttttgctgaatacttaagtttattgtttaaaggtgaagaaaagaagaaaggtagggtagcataataacattacagcttattcagatttccatttcggatcaagaagttaaataggaattttaaagttgataagtcaagcttttcgaaccaagtgttgttgaccaaagaataattagtaaagattacgtttgaacgttgaacgaagcgtggtacataatgtggaacatcaaaattcagaatggtacactattttattaaattattttgatatttctcactatttaactctaatgataaaataaattttggagcgtcataaaattttttggtggtgtatcctatttagtgcccttcctgtccatgattattcagtgcccttcctgtccatgattaggaaaagattccacagctgccctctttgtaggatggaagaggactctcttgaacatttatttctgtcttgtgatgtggcttttcatttatggcaatcttctccctggggtatttatcctatctgtaataccggtattcgcctgtaggactggatcaaattcatctggaacctcaattataggggtattcgtgttgaggatgtcttcctttataaaaccaattttaattgacactatctggaggactcgcaatgacaaggtatacaataactattctgtagatgtgaagaagtgtattgactctatttgtacttcctttgcagatatacatgcatctttgctcccttgccatgctccgtgcttgccagaggtctggtctcctcctcaggactggattaaactgaattgtgatgttaaagtgagtttggatagcatgtgcattgcagtagttgcaaggaatcacctatgcggttcggatttaactttgaggctaaactttttttatgctttatgaggagaaacggcagcctgctgtttggcggtgacggttgctcttgagctcggatccaagtttattatcgttgagaatgactcgagggtagttatcaatgctcttaatgggaatgagtctcattgggcacttgagaactataccactttttgtaccaagtcttctccttcgtttattagttatatttttgattatattagtagaacttgtaattttgtcgcccataa

SEQ ID NO: 227731 - DNA, 1308 bp, Cannabis indica
atggttacaataaaaatgtaacccttgaaacttcttcttttttaagttataataatagtgactctttgttactattgtgatttgtcacttgtaggagggatgccaataaaccgtccataggaaaaataattggagtggcaaaagctaccctatattaccatccacgatataagggtaaccataatgttatatataagggtaaccataatgttatatattaattacttagtttttagcaactttattcgtaataatataatactgctcaaaacaagatatgtttactgatacataaagtttttgagaaagaaaaggtcatgcaatttatttgtaactagataaatttattcgtgagttggttgctacaattaataacgcttttgtagaattaagtgagccccaaattctggctggagtatgagaacggttataggagcatgcgcataggcgggtgagagctcaaaaataaagcgttgtagtattaaggctatggccattttggcttccatcaaagcaaagttttggccaatgcaaattcgaggtccccaaccgaagggaaagaaggaaacttgccctttggtggccttggaaactccttctgcaaacctctctgggttgaactctttggcatcctctccccaaaactccctatcacagtgaacaaggatggtaggtattgacaattctacctctgctggtattgacatattcccaagctgtgttttctcgtgcacagtgcgattgataaagattgccggtgggtaaagccttagaacttcatataaaatcatcgtcacctgcatccgtcatttatatgaatatacattcacaaaattacactaaaaaatcgagtcttcgctggggctgccatttttgttgtttggtaactcactcaagaaaataaaattgacaatcaaattttttatgagcttaaaaatattgggacactttatttcatttactattatttctctaaacgaaattctaattttttaatgaattatgatcttatgcattttatattattgtttacatagaacttttttaatatactcatcacataacaattgtgaaataatgaattaatataaaagttgaaatactttattgcaattaaacaataaaacaacaaggtgatatatatatacttacaactttaaggtgtgataagccttcgaagtccggagtgttatcgccaaagacctgcaaaacctcatctcttgcgcgagcttgccaatgaggaaacctacttaaaaggaccatagtccaaacaagtaagcttgaagtggtctcttggccagcaaagta

SEQ ID NO: 227732 - DNA, 2354 bp, Cannabis indica
ttttagtattatttttaagatacctatttataagtaatataaaatttaaaaatattttttaaaaataatttaaatttttaagtaaatttaatatttttattacattttttaataattttttattattatttttcagaaatgagtataatctttaaatttttcttttaataaatggaagaaaaattttgtattgttcaaactttaaaataaaattactaatttttattagtaaaagagcataattgtataacttttatattttaaagaaagagaatttttaacaaattttatattttatgagacaaaattaaataatataaaaagctcaatgataattattctaaaagaaattaccatcttttaagcgtcattatgtcactatacaaccaaggagacgtgactgttgaccttgacttttctccctcattgcaagctgggtttattattaatttaatttttttttctaaacccacactacaattttcaagttgtagggtttctttcttccattaccttttattttgttttgtgttttttttttctttgttaattactaataatttgcaattgaatttgactgaaaaatgcgccgccattgacttgttattcataggtgtattgtgtaaaattataaactaattaaagcaaaagaaaattattacaaaccaaatagtgggagggactaaatactaacaattggcaaacattatattttggttttcactgtttttctccttgtattattacgttgcactcacgccacaactcaggtttattaattaggagagaatagtttgaaagttgtacttgtttgtaacggtcgtatcgtatacgactaggattggtccattggccccttctttaattggactcatcccttaagcaaaccacaaagcagccaactcttcacccacaatagaagtcacattaatatcttattactctagtctcataatttgttgaggttaactcaagtgtctatagaaggtaaagtggtgcatatgtggggtcttgagattaaatcctgattatatgtatagacattacaataataatgaaaaaaaatatttagtgtcataacttttaagttagggaagaatattgtgaagactaagaaaattcttttgaaagaagctcctaaacttgtttaggatgggaaggatactaatatttgagaaaatctgagttttacatgaccataatatcctcaccttgtaaacgtccgacctgagggtttggaaaaagtaatgaatttacgttcagacaataaaaattagaatgtgtccaaacttcattacctttttggcctaagatgactaatagtattatcaaaggtagtaaactctctactctctggccaagatagaaaaaagtgggtatggaccaaagaatcaaatagttaattatctactaagtccgtctatctggtgcaggccttgaatcgtgctcctacttgcaatattactcctgctctatagaataaactatggaattataaaattttggagcgtcacaatgtggtggagtatcctctccaatgtcttgcctacctaatccattattgctagacgaatacaggttgaggatgtttcgtgtcctatttgtggggagggagaggaaacaatggagcatcttttcctctatcgtaactttacttttcacatgtggaagtcttcccctggggtgcgatgcctgttatggactcgaaggtctgtttgtgggattgtgataaattcttatggagtatggagtctagaggagtggttgtcaaagacttgttcttgtatgcttcgatagtggtagacacaaacccgcaacgaaaatgttcataataattctttttgtaacattaagcattgcattgactctatttctatgtgttacagagattatggttcttgcctttttttctacaccggtgacggttgagtctcttgtttggtctggataaaaatcaactatgacgttagaattggttgtgattcaatgtgtgtggtggctcttgctaggcaccaaaaggagtcagttttgtgggtagctaccagcatgctcaacttctctaacctgcttattggagaagtcgcaacatgtttgttggctatggaattaattagcggtctactggaagcattcttttgtgttgatagatagtgattctgagacagttatcaacgcgttgaagagaacctgttctatttggaatattggtaactatgtacttcaatgcaaacaactctctaatttctttattagctgtaatttcaagattgtgtaattttacgacccataatcaggccttgccctgggcataggcgggctaggcctgtgcctagggcccacctatcccaggggcc

SEQ ID NO: 227733 - DNA, 3361 bp, Cannabis indica
ccccatactagttcagacaaactgcttgtaagacacagttaattgattttagttaataaattataattttaaaattagactatgtctagttcatgaattttttactaagatatgacttgattgtgaagaaatactgttttggggtttatttgttaattaagagactttatggagtctaattaataaatattataaatgacaattttatttgataggtattttaattattaaataaatagttttggaatttataggcttgaaagtgtaaaagtggtatttatgaaaaataggtaaaatagttgggaaaaatgacaaaacccaaacttgagtggggctcattaagtggccgaccatcaagtggtttttcaccctatttttatcattttttattcctaataattcaaccctaaccctattgaagatagtataaaaggaggctatggtctcttcatccaactaatgcctccaaagctaaaaacctagctttctaatgagagctcttccttcttcttcttcctcttgaatttttgaaacactaagcctttcttcacaaaatattattcagccattagtgattgagttagtgcccacacacatcaagttggtcctcaatcatattgtgtaagactgtgaagaatccaaacacaacgaaggagtttcgggctcaaatcttggtgatactctgctacagaaaggatacaagggttagagatctaagtggaatgagtcatttaattccgctgcaccaactgtaaggtttctcataacttttatgtgtttaaattatattgttttagaaattcatattaggatgttaaaaacatacatggtagtaaactagatcctggtaaaataattccaacactatgtaccagacttggggtcacatatcaccaatacttttgccacttatccactttttcaccactctgtaacccgccacaacaaacaactctaaccatgacactacaacttttcccaaacctcttatgaccatagcctcacgttctgtttcaacactaaaccacctagcccctacaccagttaacaccaccagcacgggcaaagaaaatgtttccccaaattctagtttcaagagaccgatatatagtcttaccatgcgtaaagttctgaagtgatgtggtggaccccctggtacaacctcttcatttttttagttctcaagatttttcggcagaggtttttatgaaaccccgccactcgccatgaaaattctaagttagaatgcgcgaggcttggggaactcgagtgtgttcagacatctaaagttgcttgttcaacaacaattaccccatattttatttcttatgcaaattaaacctactaataattctatttcccactttagacagtctcccaattttacaaatggtcttgaagttcctcgtgttggtctcaaaggaggtctgatgcttttatgggaagacgatattgatgttactcttctaagctatggtcctgcctatttagactgctttatggggtatagatgatggtctgactttccattcactggtttttatggtgctctagagtcaaaaaatagcactgattcctggctccttttaaaacaattggcagatgttgcttcattacaaccttggctggccataggggatttcaataaaatcatgtccaatgataacaagttggggggggggggtcctttgcgtaataaatcttaaatgtaggcttttagatcaattcttgatcactattttttgctaaaaaatatcgtctgaaggtgaaccttttacatggattaaaaatagaataggtgtacaaacggtcaaggaaaggttagattggtgttttgtcaatcaccattgacataacacttttaacacccgacaaatgcaccatttggattatcatcactcatatcatcgtgctttatcagctagttttacaccagtacaagttcctacccaacatgacagatgttgaactcagtttttctttgaaaagctttggctttctgaccccgagagcaaggacattatttcacaaagttgggcttatttttcttttgatgatcaaatttctgctatcgttaataacttggacacttgtgcaaagaatttataaaaatggcatatagggaaatatggaaaaatgaagaaagttatttctgaggcacaatcaagagtagcagaccttaataatacagttcagcgtacttgtgaccatgttgctacaataaaacactctgaagcaatattgggtgatcttttagagcaagaagaaatctaatggcagcaaagatctagagtggattggctccaatcgggtgatcgtaacacaaagaattttcatgccaaagcaacagcaaggcggtcaaacaacaaaattaaatttctatgtgctgaaacaggggacaaaatgacatctaaagctgatatggctgcaattattcaagattatttttctataatcttcaaagcatccaccattgatgaagcagctcttaattacgcaatcaatgccaatctaacaacgattaccttagatatgaatgagatgcttatgttgccttttacactagtagaggtgggacaagccttacactctatgggacccgataaaagccctcgaatagatgggatgtctgtcacaccctaactattttaggcatgttaacgtgatttttaacttaactgtgcagctcattgctaatcaacgagattattgaaaatcgtaattaattaaaattatacttaattaacaatagacattaaaatattatacttatagtaaatcgggatcccgttttacaaaatatttacaaaaagtttcactgtgcatacataaaagtttgttgcctagcgactatacaaagtaagccctgatgtcccaaagaccgtacgctctaggcctaactgccctaacatgtacaatctccatctgctcgctctgacgactgctcagccttggccttgcccttacctacacatggaaatagcaactgtgagtcaaaagactcagtaagaaaagcatacataataacatagcaataacctgaattatgattagacagccatacccccaatcataaccctatccccgtgtccaacacggtgctgagtctagaacctttttatgacagtactaatgaccataatattagcctatactccgtacgctagtcgtactctagtcgtaccgatttgatactgccaagtagtacagtactatcgacgatgatatcagcctatactccatacgctagtcatactctagacgtaccgatgtgctattattgaaaagtacttaagccaacatacatttctaatgtaatctaacatgcttaactaacctgcacactaaacatgtaaataca

SEQ ID NO: 227734 - DNA, 7135 bp, Cannabis indica
gccatttcatagttgtgttcatgaaagagctgttaagaaaaaaaaaagactaaagatacaaacaacaagtattttcaagcataaatattgctactcattgtttaatatatataattaaaaaaaaaatcaaaaccttaatgccccttgatctccactcttcaggactgctagtgacttgcatggcctgtgcaagtgaatcatcaagtagtttagagtgcacaagacacttcttcttccaatagtcaaatataggttcagcaacgtttgagctttcacaaatccacaacctttgcctcgtgcgtgtgacagcaacgtataattgcttgagttcagaacataaaatattatgtttggagtcggaaaattttgggaagctaggtatggtggtgtcaaaaaagtcttgctctttcatgtattcatatatgaccctccaatgattctttagaagagaggaaccaaaaaaattgtacagtaaacatcctacagaagcacatgaaaaataaaaataaaaaattgttaaattgtgtgattacctgaaactcaagtcccttacactccaaaattgtaagtagaagagcttgcttcccaacataaccagagatttcctttcgggcattgtcatctctcactaaaataacctgctctgcaccaaagccaacaatacctccaccggtctttccattgttgccaaaaattttaatgattgcattttcatcatccccacattgaagcagcaatggaggttccccatatatcaaactggtttctggttttgaaggatcaatagagtgtggaaagaaatgatatataagttcaattatgctttgagccaatttcagaataccagcatgagtacgaaagttttgagacaaatggatagtttcagatatcaatcctttctcttttctgtctacattttcactattgggttccaataaaaacttcttgtagaatagatggcgtatgtcttcgaatctaaaatcaactcccctggcaatggtctgtgcagtgtcaccagaaaatacaaacccctctttaacatttccacatatatgcttgaacaaagtgatttgactcattgtaagatcttgaacctcatcaatataaacaaaattcatttcatccccattatatctttcatgcttgagtctagagtgaagatcattaacgaaatcagcaagatcaaattcatcattttccattttctttttttcataaatctgatatatatcgtatattctctctctcttttcccgacttaaattggaggaacgtccctctgacattttaatataatcctcacggcttagcttaccatcacttgcttcaatggacagcaaaccacttttgatatgagaaattatctcagtgaagactcgagaaggatcaagcttcttccttaacttggaattaaaatgaggccaatataaagcactaaatttctcgtagttgacttctttgttccttatcaatgtctgaagcaacactgatcttgaaattccaccttgatcattaaaaggatcttccacattaaggaatctttcaaaataagattcactcaatgttccatctagcatcattatgaacttatggaatgttatgaccaaagggtagcaatcagcaggaatctcataaaaagagtcaggaatgttcttgaactgtgtttcttcgtcatctatatcagcaatatcaatcaaactaccttcatcttgattgttgccaccattaaatctgtcaaaataaccgaaacatcataaaattagatttaacttataattgtaatgtatcaaagaatcagcttataaccaccatggtgaagcacaattacataccttttcaagtcaaaaacatgttgcttgatggcattacatagcttaggactaactgtaacaaaaagttgacgtaagaatttattcctctccatactattttcacagtacccgtccatagcagaaagatgtgacttttctctttggaatagtttcatcgtcaacacagtactctttccagtccctgaccgtccaagtataaagctactttcattaatcaggatggcgtccatttgttcatctgttagtacatattgaagaccaattttcctaccatcgcaatcagatagcaagtagcttactacatcatgacacaataagtagaatttcatctgcagcaaactctcgctgaccttcgaattctccacataacttcttccattagaagaggaacctaactcactctcagatttgttgttggagagattcttaaaccgaacaaaatccaaagagggtggccaattctttggaatttccaagttgctagaaacagaataacaacacattaagaatacaatatgattgcagtatccaacattcaattagcaatgtgagcaagtacctacccttcgaaagacttattgttgcagaggctgacaaaatcatctgtatacttgccaaaaattttgtcaagacgattgatcagttttgatgcatcatctggaggcaagacatcccatatcttcaatacttgcacatagttcaagttctttgtgatgtccacagtactaataacaatctggctatcaacctcaaagctcattatctccatagaacttttacttcccgaatctacatacggtttcttgggcctccacccactggatagctgaagaataaggtgaaaaattgattttttcctcaggattgtcaattttttaaatgacttcaaaaagttgccacttaaaagaacctaaaatttgcagaggaaatgtcaacaaaatatgtatatgtataacatttgtgaagagtaattgaaaactaaaacccagaccttccacttcgcccattttgcccacttctcgtatcttgaaatcatacgatcagcatcaagaagatcacagaaatggccagcctctttcttgatatctaaaatggcctcagcattcatctggaaaagaaacaaagaaaatttattagttaagtaatgaagctagcttataacttctataaagaacaatgaagcacaaaatagagcacattgaaacaaaatcagaatagaaaattttgaaatgaaccaaaaatacacttccataaactaataaaccttaattatgattcctatagtgtaaaatctcaagtaacaaatgaaccaaaaatacacttcctctatttttttttcaaagtaacatctcaaattatgtacccatacaacaattagcatcaaaatcaaaactagattaattaataatcatcagagacttaaaacttgcaacacaacaatataaaagactttctttatgaacaaaacagaattactgaaaggggttttcccacaagtatacccaaattacaaataaatagctttaaaataacaaaagatattcaaaatgaagagtttccaagagaaccttatctttgaagagattttcatcggaaatgtcgttaagatcagtcgaagaaaacacagtttgagtgagctgatcatgatcagtagagtctttctttctcgtatctgaagtttccatcatctgaacttattttttctctgcattgaacatttgtaataaaaagtaagggaaagaaaataggtttcttgggtccaaagcttggtgaaaacagagaaggaaaatatgggtgtgcagctaaggaatcttttccatggaaagaaaacgaaatgtgaaggaaaatctctttcaaatttgacttacattaatccaacttctttaaccaacaaataaaatatgtgtttgtccgtacaaccgttttgtgttcttgacttagtttctcttgtctaaattaatcgatagttagtatcatagtgacaccctacatataggctaattagaatatttagcctcctaatttttccatgtattaaataataactttttagcctcttaaaaattcataaaattaaacggaaatttgatagaaatttttaaattcaataattttggaaaatataatttaatgcatgttaaaattacggaattaaaatcttaattagtttatgtataattattagacattacatagaagtagagatattcgcgatgcgggtagtgcgaatttagactattttttcaaattaaaccgcatatgttgtttttgcaatttcttaaactgcaattgcaccgtaagactttaaaattgcaaaaaccacactccaacaatatccatataaacttctcgacggtttaaaattgtcgcctatgtttaggtataggtgccggttataaaccgtgccatatagtacaggtgacgattctcaattttaaaatgtatttttcagcaatgattttttaccgtcgttacattagaaaaataggagaaacatacagatttttttccatttttcccttggcattaatttttaaaatttttattaatctatattaaactaatgctgattatctaaatttatttacaaatttatattctaacaataaataaattaacgctaataatcatttaaatttatttgcaaatctatatagcaacaataaattgaaatatatacactaatcaacatggtagtcgttgtcgctccgctccagctttcatatttttaatccaccgatcacgcataatatttatctggtcatttgtgtacgatatggggaacttaccctgtaaaataaaagtatatattaattagcaaaggcctattattatacactatttaataaaaaataatatttattataatacttatcaattattttaccagttgtgtcaattagagtattgaatcttctacggtcatgaaacgttcaataaatttcacgacgtaatattcacattatttttcatctggttgttctggacatatcggagttattcactcaataggtctatcgggttggtttgatgtttgattgtaaatggtaaacgacctacacaaaaaataaagttagcatataaatttaaatataaaacacacttacatgatattggatatagaacttatgtgaaaatgatgaatttcaaatcatctggtacgtcgccattattgatatccaattacgccactgtctgcgtacttagttagatgagtacaaacatccaacaaaatattttcctacacaaacaaacatgcaaaactgttaatacataataatatacattatgaagagttataaattataaaattattcattttaaatctatttaccgatagttgtaaggggaaataacccatttatctagattggtcatcttggccatacgtgtaactagtgcttgaaaaaggatactatcaatcccggatttggtggtaatgacaccaggatttagaaatacatattttctattaaatccattgaagtcctgcaacagttcttttaagtacctaataaaaacatataattaataattgtcgctctcatcaaatttattaagagttaaaaatcattcttgcaccaaatcgatataggttgggttcttaagtattacacggtacacaattcctgtatgtcattttttagaaatcaaatcgagtcgtcttcgaccccaaataaatttgcttcaacccgaaattggattattgatgattgcgaccactttctcatcgagttccaaaagttaatgattgaggtagtttgtcgaagttggacatgacgaccatggcttgtttgtttacttggcctctcagggtgttttggaggttgtgctcgaggaccgagtaaatcttcagagtcttgtctgcttttcttcacggattgcttcttaagttgcttggtgggtggttgtgtatatgaaaaaaatacaataaaattagaaatttcattaatcaataaacacaataacttaagtaagctaattaaaaataccaagtattttctaactggtgtaacatagtctttcagccatgctacgtaacttttgatagcttgacctattgttgtgaatgtatcttgggcgatgggacacgaaagtagtgtattcgcaacattgatttcgtggatgaatacccgacgataatcttcgtataggtattcaccattgtgaatcgagaactttccatcttttaaatatgactccttcacaatgtgccccaaagcaacctttagtaccatcccactggggtcccatcgacagtgcatctaacacggaaaggtttgcatatccaaattaaacaagcaacaaatcaatttgtaaattgaccatatttataattttgcattagatcaatttataaaataatattaagattacctcttctgaactactactagtaggtggcggtggtgctgctggagcaaaaatctcttggaactcagtggtggtgatggagtagagacattggcagcacccgatggttatgctacgggatcggaggcaaggtcagcatgtgcttgttcattcgatgctcctcaaacaccagaatcagacgcatgggatgtacccgcaacgctgctatgctgggaacgaactagacgaaggagctcatccatttgctcccacaaccgtctgttgctctcctctgtctcacagatgcgtctctccaaatttgataatgccttgttcgacccatttgtgttttttcttttagggcatggagtgttaaaatatttggtctgagcgacgctgtaacccatggctcgaatccgaccaccatgctcatctgttcctagcgccatggtcaacacgtccctcttccttttcacatgcacaactctctgttccacttgttacgaaagtcgtcctagaaacataacaaatagagttagaaataaattataaaacataacaatataaatgaaattatattttaaacttacaatctatttaacgattttcgtagttgggccctccacctcgccttttgtgttcacatgaagtcttttctatactttacatctatcaaaatcgataatttggtggcctgcctctttctacatttgttcttgaactattcttacaccacctcgtctggtgcaatggttgtaaatatttttttccctgctctgttgggcctttttttttcttaccgcaaattctggagtcaatctcgaagccacaaactctctccattgttcctcatcaattatgctttgatacagcttcggtggcttctcaagaagatggggagccgcatctttgaatttaaaaataccatctgttagggtatttttccaatc

SEQ ID NO: 227735 - DNA, 3770 bp, Cannabis indica
agagaaagtgaatgagaatttctcagtttgtttattctaatggggtgaatcctatttatataaatacaagagtcaaatattaacaaactaagaaaaagagaaactggaatgttgattacaattaatggtaataaataaaaaatttcgacatccacataattattaatatacaaaaataaaatagaaatacttgagacttgtttaaatgggaacaaaacagctttttttttttttttttgtttatgagaggggataacggtcattgacatacataactgaacaaagactcatccctctctctctgtctcttatgatatatcacatttacaaagctgattttgattttgaaccatgtctttctcgctttctttctcttcgctttcaactcctctgctcaagcccacttttctatctccaaccccgttattatcaccaccatctcgttctctctccattaaatcctccattgacaaggacccagattccaagttctcttctactaacaataccaccaactctaaatcgtgggtcagccccgactggctcacttcactcactcgctccctcaccattggcaagggcgacgactccggtatccccatagccagtgctaagcttgatgatgtttctgatcttctgggtggtgctttgttccttccgcttttcaagtggatgaatgagtatgggcccatttacaggctcgccgcggggcctaggaattttgtcgtggtcagtgaccccgccattgctaagcatgttcttagaaattatggcaagtatgccaagggtcttgtagctgaggtctcggagtttcttttcgggtctggttttgcaattgccgaaggcccactttggacggtaaagaatcgaactttgtttattttgacatgttggtatagtttaattctcttgcatttttggttgtgattcttgtattgctattttgttgtttctttattctttagagaaggttcaaatttcacttttatatatcaatgttagccaaaatttgatatcttttttattaaaaaaaatgcccattttggatggtagaggatccaactttgttggtttgagacgtgggtgtgactaaaactaagatggcatgcatttcagttgtggatcttatacggtgaaaattgatgatagatttattacaattggcttagtgccttgataaaatgctactaagttccttgtaaagttcctacgaggtattgaatctcagagggcttaatggaagcatactatggagtatggacccgatcacttgacctactcttgtgagttctaggaagaagttccaagagcacaacatcccaaaactttacaaaatactttgagtagctgcttagtgattcttcttgttgatgatatgaattagaattagaattttaaccctcttatttgagaaggaatatctgattcgttttaggcaaggcgcagggctgtggttccttcacttcacaagaaatacttatccctgattgttgaccgagtgttttgtaagtgtgcggaaaggttggtggagaagcttaaaactaatgcactaaatggcactgcagtgaacatggaggagaatttttctcagttgacacttgatgttatcggtttatctatattcaactacaatttcgattcactaaatgctaatagcccagttattgaggcagtttacactgcattgaaagaggcagaggctcgttccacagatttgttgccatattggaaggtacaggttcttaattctcttgttcttgtttagctattctttggcgttaatcattatgcgttgttttcttttgttgaaggttaaagctttgtgtaaaataatcccaaggcaaataaaagctgaaaatgcagttacgattatcagggaaactgttgaagaacttattgctaagtgtaaagagatagtggaagctgaaggtgaaagaatagacgatgaggagtacataaatgacgctgatcccagcattctcggtttttgcttgctagtagagaagaggtctgatcatgcatttccccttagccattacctttctttatttgatgaatgatgacaaggaaataactttaccactaaaatgaacattgtaaatgattaaaatggacaagctgccagctagtacattatagaagaaatatgtttagtttcttaatgaaatttaggatttgtttagaggatgaggcatgtatttgtctttgaagtaacagaaatagtttgaatcaattaatactatactcttattccaatgccacactggacaatagtatgtataggttcataaatggtgcttgcctaattgtagaccattatacaagaactgcttgtcaggtttttaacttgagcatgtatatattcagcaaacaagtttgactcttttagaccattaaagttagttttgactaatttctaatcttgtcgattttctatattcatcttgtatgtgaagttctaaactgaagtattctatgtctattaggtttcaagtgtacagttgcgggatgaccttttatctatgttagttgctggccatgaaacaactgcctccgtcttgacttggacaatgtatcttctaagtaaggtacctttaccattttaatgtactttttttccggttaggttgtgagtaatgcattgatcctatcatgcaacagaattcaaagctcaaaaatttacataactcataagcactactcccatttatgccttttatatgtggactatggtctcttatgagtcaataatccatgaattttaaagaagctcatgattccttctgctttagctggcagtgaacatggatcatggtcgtgatgtttatcattgtacatgtttataataataataaaaaaatagtttatgtgctgatttaggactccagttcattgatgaaagcacaagaagaagttgatcaaattttacaaggaagacctccttcctatgaagatgtgaaggacctaaagttcttgacgcgttgcatacttgagtctatgcgtctctatccacatcctcctgtattgttcagttttacacctttatatttgacaaaaaattagatgtaatctctttattcttgattgaaatatttttataatgtatatgatttcaatttttcaatctatgtaggtgttgatcagaagagcccaagtccctgatctacttcctggaaattacaaggtcaatgctggtcaagatataatgatatcagtatacaatattcatcattcttcaaaggtattacctaatagtatatatgtatgacagtttgttgctttattcaacttgaccaattgaagaggctatctaagctcatgataattgcctttgtgagatgtaactatttttacatttcaattctatgtattggaatatcaaatttcagtgcctctaattttattgaatctgcattcctagtctttgcaaaatttgacaagaatgcagctcagctattttgtctgttcaattgtcaaaacacgcacgtacacatagggcctccaattggtttcaaatttttatttatatataaatatatattatatataaagaaaaacacgtgtcgtgcaaggtatgggagagagcagaagagtttgtaccagaaagattcgacgttgatggtcccatgccaaatgaatctaacacagatttcaggtattggtttatgcacatttccagaagcttcaatagttgcaatatatctggatgcaaataatggaaataacacattttctttcaaataaagaagttgatcacccaaattgcattc

SEQ ID NO: 227736 - DNA, 1198 bp, Cannabis indica
ttcctgtaagaactcaaatcaccgatccaatcttctaacaattgaaagttatttgggaaggaacaatagttgttcttgtcaagtttggagtctgcaattctaatggtgtgattcccataattgattgacctcaccaagaatttgacatgattatgggagtgcattacagtaagattgttgtcgcaagaaagctcatattgtgggtagccacagtgttttggatcggtgttgagtctgaaaggacttgttatgttgatgatataattatcacaagaagagggtggacaataatgaggatttgatgattttgcatagctacttgtaatattattaaggaacaataataagaagaagggggtgattatagaataattatcatcaaggacaaccatggaaaatcttctcttagagaaggatcttccacttttgattggcacagagtactagacagagaaacagatgaagctaattttctacaccaaactaaaatgatttaagcaaattttcgtttatatcatgaaatataaaaataagacaatttaatgattgttatactgaattgtataccaattggtccctcgttctaagacattgcatacaacacaaaacaaaatataccaatcacaaaagaatcaataagaaccaatacgccttagaatctaacatataaatataataagagaatcaaatatccaatttgattttagctaaatttagaagattagggcctaaggagataatataattctggcaagttcctagttaaaactttagagacaacaatatagctgaaaaagtacacttagaaaggatcccaaaaatataattttatgacatactcactaaaatgtgggagctgcaggaattgtgcaattttttcactcagatttccttgcactgagaggaacaacctgcataacatttattgtataaaatagagttaaaaaaaattgcataactattcaacttacaagtaaatgaataagtatgaaaaagtcaagtttgaaagcgatatcaactgcagctggatgtaaatgtaatatgaaaagttcaacataacttgaatgatacactgagaaagctcaactacactgattgcaggccttagccatccatgcccttgagcaattcaatactattcagacatgttacaatcaactcacaataatatcaataaacccaaaaacaaaagttatca

SEQ ID NO: 227737 - DNA, 2602 bp, Cannabis indica
aacactgatgacatgacagtgcactcgtgacaaccaaagtgcacttcatctcatgaaaaatcctatgcatcatgagagatctaaacacatcgacataaggctgcatttcatcagagacattgtcaccagcaaccaggtacatgtcaagaaaattagcacagatcacaaccctgctgacatgcttacaaagtgtgtcactttggacaagtttagacactgtctaaccttgctcaacattgaagaatcataaaatcccaaacttcagttcacttgtgtctcaattaaggtggaaattgttgtaattaagacacaagcaaactgttagtttgccacatcagcaactaacttacctaaccaactgaattcagttggtctcaagtcagctgcaacctactcctataaaagggattctggtctattgttttaggtacagtttttgatgcattgctaattgcttagagagagaataaacaagagagaatacacatacagtgagagaattactagagggatgttaaagggattgtccattcatgaaatggcttccctcatgtgaggattgaatgtaacttgtttctggttttgtatcagattattttttttcttggtttatttctttctctcattgattgtaatcaaagataatttagcaataaagattcttcttcacattcaaaactttgcctcattaattcttggtgaattcgattccattcattttcatttcagttcatagttaattgatctatttgatctcttgttttgttctgttatttcttgaattgtgttgttttcagctgtgttcttgcacaacagtagtaatcaccatcactccatactagtttttgagaatttgaaccaactatatctaactgaattacccaatctcgaaagcttctactcaggaaataaagttatgagcttcccaagtttgaaacgattatacatacgaaattgtcctaagataaggagattttcagatgggattataaaaacttcttcatcattattgaagacaatcgaggttgatggtaaagaagaaattctggaaccacatgttaatacaacttgggaaaatcttttcggggaacataatactaacaataatgattcctgattccgattcaagattaccacatgaattcactcatcgaaaggtaccttccttcatttttactttttcgttgttcttcatcttttaatattattaatatgataaagtctttatgtaaaatttgccaaaatgagaatgtgaaatactgaaatttgtaaaataatctcatcttatctgtagtcgtttagccatatatttcatcatatttttgtttgttgattgaatatcatgtcttctttgttggttctgtggtaaaggatttgtggagtgcatgcagatgcaggggactcctcttctcttctattctactatactagagagagagacacacacacacacacaggtaaaaacctcaccaaatttattagtttaatatcatcatgatgatgtacacaaattcttgtaactattatcccaagaaaattcacaaaataaactaaatctctctaatgtaagaaataaggagtaaatgttcgtttagaattaatattacacttgcatttaacatttgtttatttgtttgttaattaaaattaaaagttaaatggtttctgttatttatttattcgcagaggatttgtggagaagaaataattaattaattagtcatgcaaaaataaattgaaagcattattatcaaaggatcgatcaattgatggaggaatgcatggagatgagatttgaaaacatttaattaattgtgttgtcttgtttgatatgtaacaatacttatacacctcgatctctcactctttctttcttcctttctatatcaaacaaaaaagttctgttaaagccttttccttagatcttgttttaacatttctacttaattttctacgactcttctaaatcatcatcttaatttactctttatatgataatatacattattaattaatttgtaatgactagttttttttaatctatttactcttgatatttatatttgacatatatgaaatatatcatcaataggtttttatttgtcatacttatttatttgttatttaatttttaatctgaaaattatattatatgaaataatataacaattaaacattagctttcttatagtataggaatacaagtatatatatagtagtgagtactcttgtaatattttctaatagtttggaaattgagcaaatatataaattatgccaaagaaagcccattgcaaaaagagagctgggggcaaaaacacacaataaaattaaatactgacaaaatagtacgtagtataagtactcaaagtttaaaatttgtaatcggcataattctaatttttatttttagcggcataaatactcaatatttgtaaaactgtaattttcttccaattttgtcaatacaaacttcatttgaatttattaaagagaaatgcaagtaaatgaccctatttttaactttatagataattaatgtcccttttttaaaataataaagcaaatgtcatttttacttttaatacctaaaatacccttc

SEQ ID NO: 227738 - DNA, 2550 bp, Cannabis indica
aattatattttaatattggggtgaaatatcaaatatcattatcattatcatgatcatgctcggccgttcttatgcaaatatctttactatcatttatcatcaatggaagattaattgaaagtgcagtgtttagtagtgtatgtatggaatgtattgcagcactattctgggattttctcacaatccagccactgttttcttcaacaaatcaataccctacgcttcaaagacatctaccactaaaaatggcagcttcagagcaaaacccaacgatgaaaatgacccattactccaagccgccattaacgcagcttctcttcgcttacaagagacccttcaaccaggcaaatccatttccctatgtattgcttcaaatcgctccatgtttcattcagacaattcctcgaatagttagtcagctaagtttttttcttccgtatctcttttatggctaaaaatgggtttactttttccttgcaaatgcagagcctctttttcatgatccatacgcgggttgctttatttctccccagtttcgttttgatgataagaagcagcgttcttcttctctccattatttactcactactaaattcattgatgataaattggttggctttatgaaccaaactgatggactaaagcaggtgattagccatgactaacagtaaatagacaaagaatgattacttgtttccatatctctttgaagctcaactcaagtgttgtgttcttgagcttgtaggttgttctgttaactgatggaatggacactcggccttatcgacttaggtggccaaccttaactaggatattcgatatatccccagatagaatattcaaagaagctactgaaaagcttcaaggtatgctttctttaacaattttttgttcatatactattagagttagagtctcacgttgctaacgcgatgatataagatgaatgggctattcctctcattctcaattagttttgaaatgaaccccatatatctaacaattctaacacatactattgctggcatttgaacaatgctgatgttgattacataatcatagttagcaaattatctcccacttgttcttagcatgtctttttgaacttatttcggaaaaatttacaccaaaattctctatttttcttgaatgtagtcttgtcattagtgaactttgacaattaagagtgtttttttttcacttataagctctagaactatgctgtgtagcatgttccgatatagttgtttttcaaaatgcatcagggaatggagctaaacttccaaaaggttgtttgttacgtcatattccattggagtcctcgaacattcagcagactctgagtgctggtggttttaatggaaaccggtctagtatctgggccatacaggttctttagattttcactttttcaaaatccatatttcattttgtttatcataaggatttcttgatgagatcattttggtttatttactgtagggactgcctgtgatgactttgtccagttttgaggagattttgatcactgtaagtggtttggctacaaagggatgttcgttcttgggcgtattgcctgctggggttgtagaaaccaatattggaaatgaggttacatgtctagattctcaaatgtaactccttttctttgtcagcaacaacaaagacagcatttgagtacttttcttttgtgcagtctagtataagagaaaggatggaaaaactgttcttgagtaatggctttcgggtggagatgattaagcatgaggatgttgctagaagttttggaaagttagtagcgccgggaaactacaagactgtactgtttgttgctgaacagttgcggttttctgatgatcaagtaagagtacctctctttgtcttttcttttgttaaacagttttttgttttgtcaatatttttctttgtttgctgtttgtagtttctaacatgctagcatgtatgttgggcagatggaaacatggagaagtgagttccagagactcgatgaagaaggggatgaagaaggtttcgaggagctttagatgtaacaagtagtttttattagtcaacaacaagactaagaaaacatccaggtgaactaatttgatggctagtttgatttttgtaatgggcgtggccatgatggatgtcttttaggcaaattgtgataatattcaaaggttccaacgaaaactaaggcattgtttggttggaagtacgaaatggtaaataaataatgttcatttcattcttttgcttggttgcattttaaaagtattggaatgcttgaatggtctttctaacattttcggtggagtgactagaaggaaaaatcattgagaaaaaaattaataatttttgtatcaatttttttatacattttaaatttgattttcttattccccatttgtcacctaagatttatgctgtcctcctcacctagtacctttgtattacagaaaaaaaaaaaagaaaaagaaaaagaaacctagtacccatttaaattgtaagtaaaaatacaattaaaaaaaatagatatattactac

SEQ ID NO: 227739 - DNA, 3878 bp, Cannabis indica
caggagaagcgcatgaagatggcaaaggtagataaggcattggagagttgctcgacgagcctacttgatgtttttgaaactataaataggcaaatcctcaatttcacgccaccaattgcttatggtgttttcaatgtggcagttaaatatcgtcatcgtaatatattttttcactttttacaaaggattcctaatagaaatgcgaattacaaatacaatcagtatgactaaaaactgggaagaaaagtatagcattattacaacatgcagcatgtattcggcccctgctaatcacctgagtaaaatccctggaccagctttacaaatgaaaagtgaactagaatggttcgaggtatatatgcatctcttgtttagatattatttgaatttcaaagtttttgtgttagtaaataatccatgattagtaataaaatcaattaatgtaggaggtaaaacaaaaatctacagtgttttcccatcatgtagtgaaagcagaggagttgtttaccaaggaacacaaggaattgaagagcgcaggagaaaaatggatgaaggatacagctactgcttgtagtttggtgggttccctcatcattaccgtaatgtttggagtggcattaactgttcctggcggcagcctagacaaggacgagggcctcataagggccggcagtcccatactcttacacgacaaatggttcacaatctttgtcacattcgatgctatatcactcctctccgccacatgttcagtaataatattcttagccattctcacgtcccgctacagacaaaaagaagttctcacatccttgcccacaaaactaatgacaggccttatcttccttttcctttctattgcaacaatgactgtaactttctgtgcagcccttgtgattctgttacgagacaaacattcaaagagcatacattatatctttgtcgcagttgccattatagtagttatatttttatcgacgcattacgaacttctatggcaaatagtcaagcacacttgtcgatcatgggtcacaaccttgagagatttatttcgccgttgttgttgttgttgaagaaaataaaaggaaaggagtttaccaaataattttgagttgaatcttgaattataggtcattattacctttaagacgttcgcgagcagactaaacaccaccatgtggtctccaaaacaaaatagctcggtcaacaacattgttgctgacttccacgggtagaagatggaacacccaaatttgataccactggctggattgaaaatcgttttaagaaactgtttttcgttttccatttaattaatcattttccaattaaagtgtgggataaagacttctatgtaatttattttattattttattttgaaaatgatttgtgtgagtgtggcgagatgattttttgtgttatttatttcgtttgaagttaaaagtttggatgatatcttttgcattttatttatggatgatgatctgtctatgttaaattatgaattgttttgttgtaattatttcattttcatgtttagattaaatatatttgtctttaaactctgaagtcttttttttttttgaacctcaaatgtatgtcaaattgagattatattatacaatcttgttggaactaaaactatatataccaaatttagtacactattaagtttcttcattcaaaaccacaaaaagaagcagaaaaactctacaaacaaacactagttcagggcccccaacgacctaacaacaaaaaagggtatatcaattaaagtaatacatacaaaagttgaaatgagattgtatcgtataatgtttcaagaactaaaacatatactcagaattaaactggagtggactaaattatcttagtactataacatattttatgtggcccataaaatctaatactaataaattttatgtttggtgtagtataggactaataaaacacaaattgaatttttttaaatataattatataactaaaaaatcatatgtataagactaatgtcctttggcctcttccagttgtccacttctctgagaagtcttttctcttcacagttccttttagctacttgtctgttttgtaaattgtaacctttcaaaatggatggcttcctctgcttacattttgacataagcaagaaatgtctcatctctatttgagtaaatctcagttgtgacacattggctttttccaatcacatcaataacaaaaggtaaatgataccccagtctcagtttcttataagtaagaaaaattgtacatcttggattttgctgtagcaatagccttggttttacataattagtactatttcctatccacataaatgataaaaaagaaaagcaagattaagtagattgaattgttgcgacttgtttgaggccatagtcaaaactgaattaatttgataggcacggagaatcgcatactgaatttgatatcgccaaccttcaatgcaaactgggccatcttattatttgacgattttgctctgcaaattggcttttttctattaaaaactgtaaataatgtatagaaacaaacatgagaatgtaaataaaggaaaggcaactatgtaacaacatacaaaatcctatacatatatttgagtaaacctcagttatgacatctaggcttgttctaaacacatcaataaattacattacattacattaacaaagcaaacccatcaccaccatccaagttcaagcattcatcaaaaaattgtcttataattttctgatggaaaaatcacaaccccaaatgccacaaatactagcaaaaacacgaaaacaatcatatcaatgcaagtttagcaaaaaccatttatcaaaaaaggtaattgaaaagctgtacaaattataggattaccaaattagaaggtaattttcaacttcaaatgattcaaagcaccaaaaaaaaataagaacaaaaaattaagagaaattcaaaacacaaatttgtacaattaaaaacgaaatctaccatccataaatgatcagaaagacataaaagtcggctgacaaagtgaacaggatgaacatggatatgggggtcttctcttccctacagcactcagaaaactactgaaggggcaaacgacaagaccccaagaaacagaacaaaaatactgatttggcaatttaaaaatggcaaaaaagaagaaaattatgctaaataataaaaaaactattaccatcaccacaaacaatgtaacaaaaaaaaatcacaaaactctgaagccacataaacaaaaacaagaaaacaatttaatatcaggcaccaaaggaaattctccataccagcgaaaacagaagctcaagcctcagacttgagacaattataataaactacaactcagatctaaggaaagataaagctgcaagggaaaaactgataggtaaccgttgtaaatgtaatgagaaaaaagaatttgagttattaacataggaaaccaaagcaatccctaagcaaatagatttaggcataaatgtcaaacaccaatcaaactacataaaacaaaatataaatcaagttcaggtccaaaacatttaaggaaagataaagcagcattagctctcaaagcctggcaaagacaaaagctgcattatctctcaaagtctagcaaagacaagctattagacagctactgcaaatgaattgattaaaaaagccttgaagggttttactaatcatcatggacaaaatcaactacagaaaaccaaagcacataattaataacataggcaacaaatggtatccatccacaaagcacagatagatattaccaagatcaacccaacaaatcaaaccaatctacttcaaagaaattgtaatgaatcatgtctcagacatccaagga

SEQ ID NO: 227740 - DNA, 3290 bp, Cannabis indica
aaatcatattctctgaactttttataggcggttaaaaaattccttggaattattgacattgttgtaataaaggatttctgtccaatttaagtttggaggctcgatttaatatatggacaattgtcaagttaagtggttgttagaaaaattggactgaatttgaatttaatgatttttttcgaattattgacattgttggatttaagagctttggttcaatctaagttcggggcttgatatagtatatggaccatcaccaagttaagcggttgttagtaaaatttaagttcgggggctcgatttattacatgaataattctcaagttaagcattcgttagtaaagttggttggaccgaagttgttgaatctaacaatttcaataatttataaagaattattaatgatctgaaaagtttgggagaaaaaaattttaattagctttttttttttttcttctaattgatcttgttcctgtggattgatgtgatggtgtatggattagttatcaattgaatattttaatttttgtttagatttccaattggatctcgtgttgttggagcatttatcatgccttgtggtaattgtcactactgttctaaggtaataatgctactaactaattaatttaagttctaagattctacatttctactactgctttttgattcataatcattgattgttcttcattgaaggggcatgatgatttatgtgaagatttctttgcttacaaccgtgcaaaaggaactctttatgatggtgagactaggctgttccttcaagactctggtaagtgtataaactctgcccattcattttatatggaatattacactaaacatattgattggtacaatttaatatcgagaattatggtctcagacacttttaagtatctgaaacacccacttgggtagaattcatttctgaaagctagctaagagaatagggtgcccaagtagttatatactaccaaccaatctcatatatggacttaatcccctttcgcgacgtcggttccacttgagagtgcattgatttgataccactggatacaatgatacaattacttgggtagaactcactcccaaaagcttgcctaagaaagcagggtgccaaagtagttatgtactatcaactaatcctatacttggataatgtggaatcctatagcgtcgtatcatgtagcaaccctcgttcgtattgtcttgaactacagaaataacgcataatatcttatatttgcatacttgttgtctatggtgaaaatgtaggacggccagtgttcatgtacagtatggggggacttgccgagatgtgtgttgtgccagcccatggattgactatcttacccgaatcattgccctataccgagtctgcaattttagggtgtgctgtgtttactgcttatggcgccatggctcacgctgctgaagtgcgtcctggggattctgttgctgttattggaatggggggtgttggctcaaggtaagtgaaataaacaacaacaaaggaatgcatccaatcctatctgagatgattaactagatcgaacaatacagttgtttgcagatagcaagagcatttggtgcctctgatataatagccgttgatgttcaagacgaaaagctgcaaaaggcgaaaactttcggtgcaactcatacggtaaatgcaatgaaagaagatgctgttgacaagataagagtaagtatttcgaactctgtatgtttgtttgcatagttgagcaatgagcatttttctcggttaatgttatttgctgtcgagtacaggaaatcaccggaggaaagggtgtggacattgctgtggaagcgctgggaaaacctcagacgtttttgcagtgtttcaaaagtgtgaaagacggagggaaggcagtaatgattggattagcacaggccggtgctttcggggaagttgatataaatcatctcgttcgaagaaaggtgagtatgttcaagaatttagcgttagtacatacattattatagattataactaactatttgatcgggagcagataaaagtgattggatcatacggagggagggcgagggaggatcttccgaaactggtgagattagcagagacgggagtgttcaatctgaaagatgctgtttcgaaagtgtataaattcgaggatgttgggaaggcctatgaagaattgaacaagggtgccattgttgggagagctgtgattgagattatgtaaaatgtaaactaaataatctaacttttctcaactaaggctgtctttgttttataacacactaacactgtttggtgtggtgtgattagggaattgaataaagatgacagcattgcttactttgctcactttcattgtggagtctctcatagcttatatagaaaattctatgctttaattatgtcaaaaagggctatacaatatagattggcaccatctatctctatattcgattgtgcacaaaaagaaaagaaaaaatatacataataaccacaatttaaggaacaattctttttgctcaataaaaaaaataatttttctatctacaagttatgtttcaaaatgtattagtgtgcaaaatattaagtataaacatgcaatatggaacgaatgaagcatttgaggcttacaaacttcatcttaacaagtgtagacttgaaaaagaccaaatttattttctaaataagggatgaaaaatattttatttttcctatagctcacaaaattttagggtcaattttgatattttcttaccaattttcactgttgtaaatgaactactttgatttataataagggtggcaatttaagtaatgactcacagatttgacatgaaaatgacacgaaaattatgcgggtcgtgttcgtattttataaatttttcgtgccacacatgttatactcgtgttaaccatctaaaataaatttaagaatttcattctacacaaggacactaaaaataataatttagtttacaacacgccaacacaacatgaacacgacacaagattttgtgggttcgacacgacacgaaatttattcgagtcgtgttcatgtccgtgttttataaattttttgtgttacaagtcgtgttcaggttagctatttttcagttaattttagacaacacaatcagaacatgacgagccaacacaaattgccacagtgattatttcaaataaaagattttttgtttattttgttaattaaaatttgtataaatatataaaataaagaaaatttaggggatatatatagagagagagaaataaggataaaaca

SEQ ID NO: 227741 - DNA, 3239 bp, Cannabis indica
tttctctctttcttaggggtaacttccaatgtgatgttttcaaatgatttgcagattcgagacttcagaacagactgggagctgcaaaataaccaaccagttgctggaaattattatcctgtatgcttccatttcttttcttgacagttgacacgttgaaatttgcttcatacaaaatatgttacgatattgatccatttcatacaaaatgtgtcaaaggatgtggtctccattccattttatggaagtaaacatgagattataatcctgtatgttatgatattcattcactttgttctcaaactgcatttatcttatctcaattccattttacagtttttacggtaagcatcaattattgaacatgtgttaagttcaaatgtctcaatttagtttttgagagtgaatccaaaaacatctgctttgttttgtgtttctcatgctctagcatttttcatgtattctacttctgactgcctaattgccttttgctattattaatttaatatctttcagattaatcttggaatttacgtgcaagacagtatctcagaactgtcagtgttggtcgaccgttcagttggtggatccagtttagtagatggtcagatagagctgatgctccacaggtttctattgtcttttgatgttttcccaagacattattattccctggtgtaatgcatttgatataataaactaggattgcttccctatgatttctaacaaactgctttgattttgtaggagattacttcatgatgattcaagaggagttggtgaggtgttgaatgaaacagtttgtgtacttgataaatgcgaaggtttaactgtaagtatactattattccaaccgttattgacagaagaaaagttgattttagaagcttttcttttcagtttcatttgttcttttcttattgttttgtatattaggcctattttgcaaggtctgattctaaacatcctttaagtagtaaggattgacgaagttggtctagtggtaaggaagaatgttggaaaggtttgaatcccgctagactcaaaaacctggcgccattgggaggaggtctctccctgtcaaactgccaggccaaaaattttatataagaaaaaattcttacattattcccatattctgcctgattttgaatttcgtttataggtggaatggtttagaaacctcccttctatcttgaattgcttccttagcatagggtgtttcaattacctgttttttactggttaattcctccttttcccttgtttcagattcaaggaaaattttatgtcaaaattgatcctctcggggaaggtgccaagtggcgccgcacgaccggccaggagatatactctccacttctcttagcatttacagaacaagtaaaggaaacatgttatatagttagctttattgatatccggccacaatgcttaggtgatctttttctttctctgcaggagggaaatgagtacttaaactctcatgtatcaacattttctggatttgattctttgtatgctttaccgaacaacattgctttgataacgctccaggtactactgatcagatattaatttcaataaggttttaggtttttctcttttttatcttttttcggaagattaccaatgtgatcatgttttgaactgcaggagcttgcaaatggaaaagtactcattcgacttgcacatctttacgaggtttagtttccttttctttaacttgctgaattggtaaataaacattaccaatatccatagtacaatatagtttgccatgaatttcttcttctagttgtgattgtgatttcacaacttctctaatgggaaacttatttccatttacatttagattgataaatttacacagcaaataggatattggtacttaaatgcaatctacaagggcaaacctagataattatttatcagtccatgaaagtgacttctcttagtttgttgtatcaatctttatgttgtttatatcataattcatgcatattataatttcctcatatttttcttggttttgatgcatgcaaagattggagaggacaaagactactccacactagccagtgtggaactaaagaagttatttccaaagaaagaggtaagacgaggactcggttgaagatgaatgctgtttttcatccatacatgtaataatttttcccatgcattattttcagatcagcaaagcgacggagacgagtttgtctgtgaatcaagaaagaaccgagatggataagaagaagctagtatggaaagtagaagaagggttcggtgaagagtcaaagaaagtgaagagaggagggcctattgaccctgcaaaactggtggtggaactttaccccatggaaatccgcactttccttatcgagtttgctcatattcacgtgtttggttcctgaaataaaaaagtaaagagcattgcataaccggcctttttaaaatttttcttgagaatgaaaaaatagagttagattgcttatgacccttatttgtagttgtgtagatttgggtgttgtatggtaatgttgagaataatagtgatgtgaaatggccaaaaaattaacaagggacattttactaagagccataaaagcatacatcgttcttggtttaacatatgtaaaatggatcatttgaatttgtaactctaaaaaacagagtatactttttttttcttctaaagaatcacatagtttttttcctaattaccgaaagtctattatgggttaaagataatatactttgagagtatgattttgttagagatattgttaatgtgtaaaaaaataacactatatataagatttatgaactattcttctcagtcaattaattttgaaatgcaactctatatatcttaactacaaatttccaaattttaagataatattagatcagttaaaactttaacgagtatccagtaaaaattggtctataaaaagattagtaaaaaaaattgtttgtaatttgagaatagtaatatatgtccacacattctcaagttctaacggatttacatacccacaagaaataaagagacaaaataaactaagtagaatttattactaataaaaatagttgttattatttgtaacttttgcaccaacactaaataaataatgaaaatttgacataataaataacaataataaaaaacgacaatgcttatgctaatcatttagaatatggtatgattccctatataaattatatatatctac

SEQ ID NO: 227742 - DNA, 3767 bp, Cannabis indica
gataaacaagatcaatataaagacttaattaaaaaacaaacagaataatatggatgaacgtttggtgtagtgtagtatactaatacaaccaataattaatttaattgatatctttcagtaacttacggtcaaaggaaaattgcaactttcacaaaatagctagcagctttgaaaatattcaaaagattacatatacaattatatgcaaatgtgcaataaagaagtaaagataaatgaattactataaactagtaacatatttagcaatgttgagccaacatttgcatgtgtggaatatagttgtctaacacaaacttttaatttatcatcaagagaacatctctacaacaaagatagaatacaaacaaagaatgaaaatgagaccttcacggagtcaaccatcctttgccaggcactcaatgtagtttcatcatctgcgatatgaacatattgattattcactttctttctacattttctattttggaagaaaacaaaggccatatgtaccagcacaattattttatcttattttagtttcggaagaggaggacggcctttattccttcaagaaaagatcattaatcaaagaaaatgcacaataccataagtggttatttgggaaacggcaagctccagaatgaaaaaagcatctttagaatgaaatgactcctcaagaactgcatgcaacacacaccaattgaaactcaatcacaaaatagtgaacaaaacaatgtcctttcttctactttattttcttattttgctatagaagcagctataacaacaatacttcaaatcatatagaaaaaggaaaatatacagcaccttacttgtacaacataaatttacctgttttacaactctcccattcatttattaaagtatctaggatgtgatcgaaccagcacccatcaagttcttcctctaggtgttggcgagactgctcaaatgaagtctgtcaaaagaaacatataaacaatgatacttctgctctgcaaatgagactaaccacatatgtttaagagacatcatttctttcttcttgttctttatttcattgtctttttactagagctgaatgaaattagttgaatcatacattgaatagctgaaaattgcgatcacaaaaccattcctctcgatcaatcagtagcttccgcaagaaccaccctgtatgccattttactactgcagataatggtgtctggctagctaaaaccttcaataatgcgtttaaaatctgcaacatgagaattcacttcatcatgactcctaaattcattcgaaaccagagaaaaaaaatgcaatattattaaatagttatgaaagcatataagcgagagaagtccaaagggaaaaattgaaatgaatcccccatttgaataaacaaaattatcgatactagagagagaagacacaattacccatcacacagtatcgatacctgatccaaaaatcttgtaatgaaatttttatcagcttcatgcattccatttaatccaatttttggaaagatcgaacaatcaagatctaacaaatgcattaaaaacaattataatgcgtgataaaaattacacaaaaaatagcttacaaatattatcattttgagaattgatacctttaatttcagacacaataagcaataaaaacaatgatgctaactgcagagtctgattctcggaaaagagaaatgcacttaatccacccctgcaccaaggaaagttggttcttagtgaaataaataaaaatatcagtctacacttcatgaaataaatgaaaacaccaacgacctaaaaggtacttgtccataaaatgatagaaacataagagctcagatcaagtcacacgatctcaaaaactcaatgaagactaccaggataggtgaaatttctcaaaactgaattaatcaatatacttgttggtaccgtcacaactaacatataaatatcacatcaaaaaaatcaacgaccttttatcacagaaactatcatgacagggagggtagttgatgctttcttcttcattctcagaaacagaatatgacttttcttccattttatcctgatgcttagaaaatgattcagtaaaatgattggaagttgcaatgtctttgatagcatcttgatcacttgaatcgaagtaaagatataaaataacaccagcaacaggatccatcatgccttttccatcaataacttgaagaagacgtgaaacaagatatagtgaagttactccatataaatttgaaacctgaggtgtaaatggaatttagtaatgagtaaaggtgaagggatgagataacgtacaaacaaacatatagaagagacaatgtctcacattcctcttccttgactgcagcaatggttgcaatataggaaggactagtaagctgagaagattttcagcaactaatctactcaaacgagattctccaatattaagaatatccttaagataataaagattgtctgcaattttatcagcctgcaaaaacagttgtttcgtttatgctcaatgcaggtacccctggacaaagatacgagtttcagcttacaaattgtgtaacactatcacaatcatagactgaaatagtaaaaagaaagaaaaatattgcatactctgaagctcggacaaggaaatccaggtgagagcattgttctcttaatcttataaccaagtctgagaagtattttgagactggaggagttgttatgtactgatataccatatcatcacaaactgcataaccaaaaggatactgttgcaaaaatgttaaaaatttaatgcatctaatgatatggaaaagaaagaaaaaaaaaaagaaaaattgagtatacaataccataccatagtatatactgagagctaaagaacaaacagctgtttgaatcatcttctcctcgtggaaagcaaatttaagagcctcattgtacagggggaatgaaactacagaattctgcaaaatgatgtagatatgactaaatagctaaaactcctaattataaaattgctatgtagaaacatgttcttttttcccatagaagtcaaattttctcaaaggaagcagcctaatccagtgttgggaagaaaaaaacatgtctgagaacacatttctcattaatcgtgttttgaaaacatacagcataagaaataaagtagaagcattaaaagttcatgaaatggttctatgtcatattatggcaaaccatatgcagagctttttcactattacaaattttcacatgctacggctataccaaagttccattcaaagtctgtacacattgaaagcccatggtaattacatatctatcaagattaaacttacccccttaaccttaacaagtaggcaaagtgtgtctttgttgactttaccgcttatggctctgagagagagagaaaagaagagagacatgaagactagttagaagtgatacaatttctcacttaataactaaatctagactgaaacaataaagagaaaaactaaggatgagctatctatgaaaaagttatactgagagaatcaagaatgggtctcagaagtttttgcaaatgtactgaacttctgagaccagcccctttttttttagagaaggttgtaacaataaagagtaagctgataattacaactaaagagctaactaacaagaaattgttataacagaaataaaccagcaaaaccacttggcttatcacaaatgaacaaaaagaaggcccaagtttcaaaacagaaattacttaaaagagcacacaaataacct

SEQ ID NO: 227743 - DNA, 3899 bp, Cannabis indica
agaaagtctaagagattaaataaagattgaacacccaaaatgacaaattcaactctggctttcttgtaacattaatcaaaatctcattcaccatcatctcatacaaaaatgacaaaatatttccactacaattccaaattctgtcaaaaaaatcatagccattgagcttctttttcttactatatatgtacatctcagctaaacaagaatgagaagaatgaggaaataaaaatggttaagaaaacagctacaatatctgatatgaaacctttttcagtttagtcttttctgaattctaccgatcgccttttacgaatcaatggtacttcgatttccatgtcctcatcgtcggtcatagaattaaccgatgtggggagcttctcttgtgcatttgaaggaagaggcgtatcgttgttggtgctactacggaagataccccaaaagaactgctttgattctgaagacaaaatatctggcaaaatacatgggaaaggaaattttgtgtataggcatataaagacaatagcaaatagacaatcttattatcataacaaaacatcagacatgttatagaggttttacatagcaatttctagctcatttgagaaacaagtcatcaatggcaacaggtagtgttcatatgaaaatgaatacttaatttaaggcacctgtgagtttagtcataacctaaataagtttaagatttgaaaaaatgaaaatgtcaatacaaaataatgcgagtgacaatatatttttcatgaaggaaaccccgtctaaacctataaattttcgcgtcaagactaagtattttgagcaattctcattcttagatttacacagagaatggagagcttcggtgtaattttttcttatttttggacaaatgagtattttatatactagtgaactgttttggattatccaaattggatactagtttgttttggtgtgttttatgctaaaacttatgtaatcacggttttcctccgccacaagtgagggtttttcaatatatagcgtgggagagggatcattttaagacaagtggcatctttctgtttttccacaaaataaaaaataaataaataaataatttttcgagtcaaggaaactattcaactgctatgtaaggtactcagaaaagactcgaacctcatatcatctattaggcactaagaatgtttgtttagaaacactaacaacaagaatttagagaaaaaaaacaaaatcactatggagataaaaaaaaaacttactttgcgaatcgtcattaagctgtgttgatgagaatattagtagctcaacaccattgacacaacttgtcataacagatttatggaattccaagtattcaaacagcttcacatattcctgtcttgaactacaagtgaaacaaaagaaaagtatttacaacacaagaacataactcaaaaagcgatatcatttaataaataagaagctgaaatggaccttgtactgttatcatcagctgggaaaaagtacattccaacatctaaaagatctggacaaacatcctggaagagatcagtgaagacatggcaccgaggaagaatcttaagttgaagaacggcaggcatctttctcgaaatttcatacactttttgatgaactttgcatggaagttgtgcctggaacctaccaagcaattcacatggtgtccaatttagaatgctgaagtctcccctgaagaaagaaaaaacagttgaaattcaaaggatttactatttgagatacatgaaaagacaagcattttgttatgaaagcatatatactcattccattccaaaatttcaaccaaacaaaagaattggtatttcctttccattctattcctattctcacaaataccaaacaagattgcattaaaaagagatgatgggaaatcacctttactgtataactgtctagacaatctcagagaagctttattaaatcctagtcttttatcttgatgacatggcacttacggattggatattcaagtttgactactcttgaagttagttaattcggttggcttacttagtggtcaagtcagcttcttttcatttgtataagtactattttgtaagtattgtaatcagtacttagtacagagagagccgctgtattggtgaggttttaaaattgtcgtaacagagagaaagaagagagaactcgaagggaagagggtaattcttcgagggaccttcaaggtgttcttctccaattcagaagctttactcaaagggagatgttctgtacttagttgtcaaattttcttgattaattcgtaatgtgtcattgacatagtgaagatcgaattcctcgaaaggagttcaagaggagtagctccaaattggtgtgaacctccataaatgtccttgtgttctttatattctgtttttactttatcttcttgttttctggtttgtgatttaatttgcagattaaaactatcaaaactacaaccacaaatgccaatcacagagaagcattgaggaggagtatttcttaaagcacaaagtatatatctgagcatttttcttttcaagcaagcaacgattccacaacatcacagtacgagaaattcaagattttgaagtaaaaataaataaattgaaaggataagttacccacttccaagttgcatttggagcaggaaaaaatgtaatatacgaggaaaaactcggtggaaatttcggcagctctccttcttcaaaatccttggttttaccacctacagaaacatagactgcaaatcaaacaacaaagcaacttaagaatggggatggcaacaatgtactggctgttttgttgttagaggctcttttgtgcatggggcacaacaacttttttctcttaaaggatcctaggaacaccaccttaatatattagggtattttcggaagtaactgtgtaattactggggaagtaattacactctattttaaaatacaaggtgtgtttggctataatgtggcaattacttatgaattccaaatgtcttgtttggcaaaatagttagtaattacacacgaaaataataattttttagtacctaatatttaaaatggaaagtttttagtttttacaaagtataattacaccaaattttgagatctctcaattacacatatctcaattacataccattaccgtgtaattacatgatcagacaaatacacacagaactgtgtaattactgtcaattacaaccaaatccatttccctcttgactttctatgtagagaatgtaattctttttaatgaattaacaaatgaaaagaaagatgcagaactgatgatacaaacaatcttatcaatttcaacacaaaattttatagcaatgtagatgctatgcacatatatctctccactatttttttttagagttagtaagcatttgagatagcttaatgacttcttcatgagaaatgaacttaagtttaccagtttctacagtcttttgcttattggaatgaagctgtgaaactgagaatttcccatttctcaatgctcttgtgacagcttcgtcgttcttctctgtttcgatcaaagtcgagtaactaacactttggcatgattcacagacccaatattcaggtatctcatcctttacttctcctctcatgcaataactgaaaacagaaaaatcatttaagattgattattatcaatgctctgttctttccataaacttttgttaacaaaagcaattaggtggcgtttggttaggaataggaatcaaatggaatcaaatttaaaatgcataaaaaaaattgataaaggttccattccaccaaatagtggaaaacccattctattggaatgatttcgattccaatccattccatttcattactcccaaccaaacgccaccttagcgatacttgaac

SEQ ID NO: 227744 - DNA, 2132 bp, Cannabis indica
cacaaagacaagactaatcgcagtagtaaaaacctaatcgctttagcataactacaaatcctaacaagccacactcaagtagggagggtcggcgggcctagccagagaaaaaacacaaccttcaacggctaagaatttaggaacgagaaaccctagcaggtgatataaaaaataggaaaaataggggtgaaaaggggaaccatgggttatgcctcaaagcgtgggataaaatttgtctccccaaatcttggaggagttagggtttcaaaaaactgtggagatgaattgtttctttctagaaaaataggggtggcaactcattaacaaagataaatccttgtcttgtaaagtgctaactgccaaatacttaagaacatccctttctctccagtgcatttataagaaagttgatttgcagttttggaagaatgtgattaaggctaaagatattctaagtaagggtatgtgttatatggtaactaatgggaaagacataaatatctagaaagatttgtgggtggctcatggtaaagtcttgtggccaactccgaatggagttcccactctaagcatcatgactgtggcatatcttttactgaaaaatggtaatgagatcttcataaactgttatatgatcatgaaatagtttgagccattttgaaaggtggaaagtcatcaaggcaatggagagatcactgagtgtggataaaggaatcgaatggtaaatttttaactaaatgtgtgtaccttttgtaggctcttgagagagatcagcactaccatggtgctccttccttgtgtaacaaactttggaatagtaaaacacatgaacgacataaagtgttttggtggagcattttttccaatgcgttttcgattcaattcattctctgtgaacgtatgaacattgaagactcttcttgtaaaatttgtgggagagagtaattatggaacatttgtttctccattgtaccatggctttgcatctgtggagagtatcttcgtggggcctcattcccgttatggaatcgaggaccagattatgggattggatcaaattcatttagagtttgaatacgaaagacgtgaatgttaatgaagtatttttatatgcatttatcgtggttgacactatctagagagcgagaaataacaaggtacataattaccatatgcatgacatacattttaatattgattctattgctcattgttttacaaagtatgatcactctcttttgtctcattttaagccttatcatgttgccactaaatggactcctccgcccatagactggaccaaaattaagtgcaatgtgacaattagggagggggaaatgatactgacaatggtagctcgtgatcatgtagggacgttgttatggctcatgatcatgtagggacggtgttgtgggctagcaccaagcggctgccttcggctaatgctttgtgtgggaaagcaacctcttgtctaatggagttagaatttgcagtgaagaaagacttgcaatttgttattgtgaaagtgattttaacatggttattaaagcggttaaaagtttaaatccgagataaaaaaattaaaaattatgtaactcattgtaagaaccttatgaactcttttggaatataatttgttgaagtttcttagatcttttaatgtggctacaattgaggcttactcaatacgggatcatatacatatatataaatatttccacttctttttaaaaaaaaaaagatttgaaaaataggcagttagaacttaattcctatattattattttattacttagttttcgaaataaaatgtgtattataaaccctaataagatatatattcagagatacaattcaactcccatatcttattcgtcctttaaataattttaagtctcaaataggagtaattttagaacaaagataagattagcataaatttcattcttttgttgttggaatcaccatagaaactcaaatttacaatcccaaaccaacccaaaggcttgaatttactttcactttgttctacttttaggaattattgatcaaaaacaattggttcaaatgttcacaacaaatcaaaattgtcaatttagccgattgtgagacaattttaatcaagtaatgca

SEQ ID NO: 227745 - DNA, 4315 bp, Cannabis indica
taaaataaattccaacatgctcaagggaaaacccttaatgcacagaatacaactcccatgcctagtaactgtgcaagtactaatgaaacacaagatgttgaggctcctcgaagagaagaaaattttgagcaagagttcaaaagaactcaaacacatgggtaccaactaatgggccctccacctaatgtggatcaacctctgaatactgagagagccaacaagactcctccaccaactcctcctcaacgctctcaagacattagggcctgagaccatgcaaagggaaaaggacctgccactcaagactaaggggtaatcaaagactttacttcaaaattggaggatatgaggtccaatgagtaaggaccaatgagttgcttcatactcaaaaatactttcgagatgaaaggggtaagttgtgctgttactttgcctgtggccccaatggccagtagtatgagtacttctcttgagtacatggagaaaagttaaacttgagaaaccaactcaattctctctgtacttgtgatccaattgaagaatactttgagggaagtagccattacaacgctccgaatgaccgctcatgtagcgcatcgtctgaagacgatctagagttcatcctgagaacatcactagtgttgccttcaggtgcccgtggtatgaagacaacgacaagacccaagtcgatcggagtccatgatcgacttggaagactaagacacctgtctgacaccttaaccaaaatttggttagtggaagttagggcttctagaagagaccctaatcgggtaacaaaagatttaaccgagacgtaaaccaccatccatggtgtcaacagggcatagtttgacaacatagcagccctagtgaagggaattatgaccccaaagttgtcaaaatttgaactctgatcaaatcaatgctctaccattacttccaaagtttaagaacccttcctagcattaataccccgagagtgaagatctgctgtctcacatccattacatcaaattgtggaccaatctgcatggagtaaaagatgatatcaggtgcaggatcttcactgccacactgacagacctagctcaccagtggtacctcaagcgtccactatattgatcaactcatcggatgatctagtggatgcttttggcaacaaattctctccttcctaacaatgccaaattaaggatgcaagggtaatgaaacttgtaacgggactcaaggagatgagtcatctatggtttgaccttcgtctcaaggtagtttacaccatgaacgactttcttaataaagcacatggttttatcaagctggaacaagctgtcacccgagctaagggctcaaaaggcagcaagaagaagtcaccagactcctcatcccttgacattgaagcacgggtaatgggaagaaaggaagtttgaacagaggaaaaagaggcagcaatggtggaacacaaggaaactccccaggtggaaagaaatccaagactgggggcaggcctttgcgagagtaagagccctttttcaccacccactcaatcctcttggccccaagacaagagatatatacggccacacagtcaatagtgtcgtaatgcgaacctcttcccttcaaagagtcagggaagagggatatgaaaaattctgtcactagcacaataattacggtcatgataaaaataactgtaatcagttgcgagacaagatagaatttctcatcagacagaaacatgctgctctacagcagtatgtgcaacatgaagctgcaactagggcaatgcaaatctcaagactgcgctagttatagacagcctcgagattatgattggacgcactcacctagttgggaattcaaggaaggccttagaaaggtatgcaagatctttgcgacatgactaagagccaaaatactagaggttgcagaacgtcctccaaagtctcaatgctatgagtatgctcccatcacattctgatactcagactcctatcatgtcaggtaccctaacaacaatcccttggttattgaggtttagatagccaacataatggtgacaagggtgataatttatgacggagcatcctcaaacatcttattcaagcaaactttgatctggatgggtttttcttatgaaaaatgtgatattatggactattactactactttttgaggctggataaatttcctgataaattttatgcacatatttaaacagatcgatattcataagcttaatcttgggtgacttaatagtattattacatcatatactcgtcatcatctcaattcattggacaatatatatataaaaattcttaccagtgaattttggaactggatgttgacaccacaagagctcaatattctctttctcatcagttgcatgaagtgcagttacaggtggatgatgtgaaatctgagtaagaaatcaaattattatactcaaagtctcaaatataaagttctgaaaaagattatataattagctctaaaaatattacataaatactaatttaggaagtgtacctgctcaaggagaacgttaagagatcccctagatacgtgatgggtctctccaagaatggggttataaggagaaactccaaagagtaaagggcgcagagtagatatgttccatgcaagaactgctttgaacctctctattgggctttctttagtgttgcacttccctaacaaatcatcactaatacagtataccgactctccataacattgtaaatgtgattttggaatgttgaacattggtggcaactgttaagcaaaatcaagaatataaatatgaatacatgatgtaatgttactaaaattgcattagttatttgccaccatttattcagttacataatttcaattttatattattaattatcaaaatattttaacaattattaatctcgcatctcatatcattctatcaaagcaccattgaaaagagcaagtgagtgcttagaagatctataactcactaattaatttctttcttatttttatagatctggagatctacatgttagtgtggattcacatgtatcaatagctagaggtattggcacacatatttcgatcatttcgttgtattgtacatattcaatttacaatttccttctgcactttataatcatttatatatgtttatatttataaataaatttctatcagttaaaacaaagaatgtgtatgaatattagatttgtgactcttatatatgttgaaataataggttaaatcttataaaactaaaagtgatactctcatcaaaataactttttgtgtgaacaaaatacaacccaacattttgtcaatatttaccaaaaaatatcaagctatatatcatttatatatcaatatataaatttcaaaattttacaatttaaattacctgcaaacgagttaaatcggatcctggacgtacatctttcaatagactaagagcacgtcgaagcatattaggggctttgtattcatcataagaatcaacacattctattgatataggcttcgttaaaacaactttcctaccctttgtctcctgcttaaacaatattctattaattgcaataaacaatcttgcaattataccagtttattataaaagttaattttgtaactcatgtatatatttatatataaatttgtaaaatattcaatttgaatctaacaatacgtatataaataatgtaataaattataaatgaatctaacaatgacgttgttatatttggtaaaatgtttttgggcacaaacaactataattggacctcataatagaaataacaaaactttgtgttatgatagttggtattcggtttatagagggatgttttagttagtctacccttttgtatataaggctcttactccactgttcaagagatacttggagaaagactccattgttatactcttttttttttttttttgaaagaaactccattgttatactcagtttcaatacaaaagattgcatagcccttgtggctggtttggatatggagtcgaatggaaccacgtatggcattgtgttatttatgttttaattaattgtttggtttgaccccctcttcaaaaccagtttatgtcgtatgctattagtttgtatttaaaattttaaagtttaaattttattgcctttaaattaaactttaaattttagggtacatatcatgtcattttggaccatgggtcttacaaaattactaattggactttctgttttgtcaaatgaaaaaatagatactatattttctaaatagtaaaaatagaaccgtgagcccaatttctgacaattta

SEQ ID NO: 227746 - DNA, 2936 bp, Cannabis indica
tggatagcataagtcaaagaaggactaacaccacccagccccatccttatcatgagaacgccggtccattaacgttggaataatatccactagactcgggcccaccttactaccagcacaaatggtttcggcattatctttcaccatttcaggcccacccacgtgagccttattagaaattaaaggcagcccactacccaaagcaccattacttttatcattattagatggcccatgattaaactccataccaagcccggcccttgcaccattactttcgtgaggcccaacaacacaaggcccactctccatattttccacattttcccccataacggtcaacaaattcaaatcattccttttatccttattgtatacatttaaaacaggtaaatactcagagctctttcccatatccagggcctccgtattacctccatagcccgaaatagcaactgtcctctctcctccctgaggacgattcttggggaaccacaccgcacgcttgggcatcccgaggctagccgaaggctgagcagtccctttcactggcaatctcggacgtcgcgaggagtgggggaacagatctcatcagaccaacagctccgtcacccatggctgccggcaacgataaaatcgcccctccgtcttccactcgccgaggacgggcacccagaacaccagatgaaggacccgaaaagacatcattgtaggtagactggacagagagccacgggccgaacatggggaaaggaattccatcgcggttcgccaccgtcaccggcgaagtgagagagcatccccttcgttgatgccccagacatccacagaaatacaaaaaataccaatttttttcgatttaacttggacccaatgcttaactcccgaagcaatatcacaaaaaagcaacctgagaacagaggtgtccccgatatcaatatccacctgcaccttgaggaacttgttccaagtagccggcttatcttcttcaatatcgactttcaccacctttccagccaacccccccacaggctgccgttagcctttgaaaagtactcatggggcagattgtggatttgaatccatactcgcagaaatttaaaatcagtcggaccttcaacagtcggagtccaggcttgaagaaccaatgaatacccacggacgcaccacgggccgttctcaagggcccagttcctatgttcaacacaatcaaaaccgaacttaaagacattagacaacctctccttatccaccaacgccaccacagaaactggtatcttccagctttttgttacaaaatcattcacatttagttcatccaccaccatgggtgctattacttttccaagtaagcagcatgaggacagagccttaagagaagtatcagaaggagtaagtttgaccgaggtttcaagacaagagaagcttctgcctttaagaggggagttagacacaatgattgactccataaatgccctgaaaagatgaccaaagacaactttttgcaaacaacagcacaccaaagaatcttaccaaccacaccaaacaccaaagacaactttttgcacacaaaagctcacccaacgaatcttaccaatcacactacacaccgacaatcccaccacagacacaaacaaaataaaaagagtcctcaaagccaccaaccagaacaaccaaactcacagaaagacaagagacaggcacaaagaaccaacaacgcacagctccaagaacaaactaacacgcacagaaagaagcaaagaagactataataaaataaaccagggtcaaaaccaagggagactttacactattgaacacctatcatagcgtatagctctcactcatagcgtatagctctcactcatagcgtatatgccattgctatctctattctatgtttctaacatcatataaaatgtggggcctaagctttgagagcggacccaaggcaactgcccactaacttgcgggccgacacttggatagtgtacaaaaataatattgtaattttttttgaaagaaaaataatattgtaatttaagaggatgtataattataaataaatactccatgctagatataacattccacaaccatgatcataaatagctttctaataatgactttgtttgagtcagcaaaaacaaaatcatcaacttcacttggctccatgcgtgaaagctaaaaaaaaaaaaaggcaaataatatatgatgaggctgccccacacacccattaccatttgtcaacacttttgagtttttctttttttccatcatatcttcatctcaattatttgctcaaattggatggttcatttaatttcattgtgtgtctccacacatccaaaacctcttgtctacaattcagaacccattacatcaagggtcaaaactcaataccctttgcatatactgttaggttttttatttggatttaataaaatgtgaattaattgaacaattttttgttgtgttagctcatattattagtcatcaatagtaaatgggattagtatctgtatgtgtaaagtttagttgaagtcgaagtgtgaaattttctaattaactgaaatctttgatgagtcgaccaagtccaagtagggttatgtagctaactctataaatacatattttttaatcacaattgtatatcttttgataatcaaataaataaaactacttctgatttagagatctaagaatgaaaacttagttcatagtattgcactatcaaattaaagtaattgctattattttattatataattattattattgtgttgtagattatatagatatttgtatcttgagttattaaatattttaacatgtggtatcaaatttcctattgtatatgatgtatgacctatattttatttaacaattacttgcccaaaggtaatagttatgtatatatatatatatatatatat

SEQ ID NO: 227747 - DNA, 2630 bp, Cannabis indica
gcaaagtgctgaaggacacatatgaatatcaatgagtttattattatatccatattgcaagtaaatggccgaccacaacactaaaaaacacaacaaaaggactactttttattccttattattttaaggtgtctaaacgtgtatgcttgccatgtggggataacgacaaaagctgctatattttacccaattgtaataactttctttcttcatttttttttaataagaaaaatacagttattagttatacaagccataacttctggggagagtctcctaaacctaaaacagaacaaaacagagatcatcattccatttttttttgtttggcttccattgccaattatttgtagccacatttccttattctttcttccttttcatttttttttttcaacaagagactaattctattctagaccccatttttggataaggatggagataataagtggtttctcttttagttttatgggcggttgctattttttccttttcttttcttttctttttgctttgtatttgtacttaactagggactacaagacattatgctaaagaattagtgatagagaacaaacaaacaattatacctttaaaaacaaacaaactcacacaacagtgacaccacataatttaaacaacaaaatttgtttctttttttcctttttaaaagaaaataagaaaaattttgatgatgggttactaaacaaataagtaattaatttgtacaccttaatttaaaatgagaagatgaagattaatatgaagagagagagagagagagagaaactcacttataatatcaccaacttggaagttcttagtagcagaccatagtttgtaatcgacattaccaatggtggtccagccagaagagtctccaaccttgtaaactgcagccatagaaagcttcaagacaaggaccaaaacagccaaaaccctcaccacaaaagccatggctactaactaatgctacaacaaagtacagacactaaagacaattaatatagtttaattgggttttgttttgaggtgtggttgatgaggacttgagacaatggaaaggcttgtcttctggtgcttataaagcttttggagttaaccaataagtttggggacaacaaaggcaattgaaatgggaagatcagaaaggagaagaaggtaaaattatgatgtggagtggatggagtggaccccatgttcttttcttcaatatattgcacttaaattagtggtcttcttcctacttgatggtgttgttataattaatacaaaaacaacaaaaaagacatatgtgtttgtcaagctacttaagcttgctcttttagcaattaatatatgtatatttgtggtagtcttggagaagaaagtgcttgtttttcaaattagatcttattaacttttgtttctaattaagtctaattatatgctagaataccttcaatacagatagatacaatggtaaattactatatatcaatacgttaatatataagtaagtaattaaaatagtatcacaacaacaaaaaaaaaggatggtctagtgtataggctatgaaaatacattttaaaaaaatagatggttaaatagtatttttaaaatatatttttgttgtggtcatagacataatttagtggttctacaattctcatacatgaagtcttaagttcgaatctccgaccccaatataaaaaaaatacattttcctttgtttaaataaattttattcaaatttgtttgagttattcaagaaaaaaaaatagtaacacaacaaatatgtagaatgtaaggcattatgcataggaactacaaatttcaaattagtattttgaattcgtttcatgcatttacaatattggggagatagatggtttagtgtttcggctagggatggacatttgatttaatttaatatttttttgttgtttcattcaatttaattagtaattcgatttagaaaatcatcatccgatccgatccgatttcaaaatccaatccaatccaattactaattaaatttgattaattttataattagatatccaattacacaccaaattatttatataaacttaatatgaagaaaattacataaaatctaattgatattaaaaatgatttaagggaaaaggaaaatactattaggtatttttctagagatttaagactgtacacgtgtttggaaaaaatacagtaagccaaacgtatatgctattcttttagtttaaggtgaaattaaattattttttagaaagactaattgattaaatatattagtaaataaagaaacaacttaaaataaatataatcaattattttttaaaatatttttattatatgtaaataatatttttaatatatattaactgtaattagattaaatcgatttttaattaaattttaagattaacatccaataacgatccaatccaattagacatttaattttggatatccaattcaataattggatgttcaatttttttttatatataattgaattagattagattgaattggattagtttagtttagtttaattgaattggattgaatcttatctagccctgctatgaaaattttcaatacagagagtaacgggtttttatttaatttggttagaata

SEQ ID NO: 227748 - DNA, 4627 bp, Cannabis indica
  modified_base (5)..(5): a, c, t, g, unknown or other
ctctntcttcttcttcttcttagcaattgagctgtcataacaaaactacttctctctctcttctctcttccttcaattagccgtttttcattttctcccgttgggaccaccaaagtctccttcttcgcctgaaagatgccttaaacatcatcatcatcatcatcatcatcgactgggtttggatttagatttgggtaacttaattaattttctaggtgggttcgtgatttttctgctccaacaaaaaaacaaaattgattttttttaatcctaacgactttcccacatgggattgggactgattctcaaaccgaagaaaggcaaagattacaactttgaaagatggaatcaattcaacactgtttaaacacctcttattactcactatggattacagatgctttggaagaaatcccacacaatttcaccatcaccgatcctagtatctccggccacccaatcgttttcgccagctgtggcttcttaaaaatgacaggttactccaaaagcgaggtcatcgggaagaatgggaggatgtttcagggtcccaggacttgtagaaggtcggttatggaggttcgtgaggctgttagggaagagagagctattcagattaatttgttgaattatcgcaaggatgggacacccttttggattttgtttcatatgtgtcctgttttcagtaaggaagatgggaaagtcatcaactttatcgctgttcaggtccctcttcatctttccacaccaccaacaacaacaacagcaactgggttttccagatatcaacaacaactgggttcatgtagaagacaagtatggtctgattctttgactcctgcagcttcttctgatgtttcaggtatgtggtatgtaattgaattgaattgaattgagtcgaaatctttaaggaaacatctaaaaccaaaacaccccgacaaccccttaatgaattaaacatagtacaacaatataagaatgtcttaatatcaactcaatacgtactaagtatgcccacatacataaatcaacattcatggtctattactcacgagtttttttgatatagtgtaataacgggcatcatctcttatgtctattctatctatttgtgttgttgaatgaactgaattgaatttgatttgatttaacaaagcagaaatgaaaattgaagaagcttgggaagcaagtgatgcagagaagaataaagctgcttctggcatcagtagagtgttgtctgtgctaactcactatagcgagtcaacagggagagttgtgtgtggaaagagatgtggaggcttatctggggtgggacttctaagttcatccttaactatttctcttggtagaatcaaacaaagctttgtattgtgagttattattgcattttttactcatcatcatcatcatcatcatcatcttccaaagactgctgactgaatttctctgtgtttatgtttgtgtttggattcaatgcataggactgatcctcacttacctgacatgccaatagtttacgcaagtgatgctttcttaaagttaacaggtgctttaaacttgttatccaatacaaatttagtcacacatatatataatctctaatgtcttttggctacttatacaggttattcctggcatgaagtaatagggagaaactgtaggtttttgaatggggaggatacagattcctcagccttgtgtaaggtataacacttcattcataagacattgactctgtcatttggtttgaatatctgatgatttcatatttgagagagcttgttgttttcggtttacccagatagaggaaaatattcaaatggaacgggcatgcacagtacgtatcttgagttacaggttgattcttatttctttatccaaatatccaataggttacttaggtaggtattatgaaagtctgcaattttcttatctgaattttaatgaaaatgcattgttcttcattttcagaaagaataagagttcattttggaattctcttcacgtatcaccagttcgtaatgcttccgggaaggtattttacatgctactatacttgtttttcttttataaaaagcttcaactcgatatgacttttcattagttacatgaactccatttgtttctacatagccaggtcaaaaattgttgaggcaaaaagaaaagaaatgaatgtgcataattagacaaatgttttaaattgattgagagaaaacatgtaccacattcgcctcatttttatatattggcgaagacaaaaacagtgttctcgaatgtttcagtgtacacaccttgtgatagtctgaggtttttcttatgtcgttaaaattgtttgattgttcagattgcatacattgtgggtgttcatatgttgcaagaaagcagttatgaacagggccagggggaacacggactgagccctgagatgaaacaacttagcacagttggtgctgttaaaattgcagtgaggagttcgtcgatgggagctagctcgtcgtccaagtcttagcaccttaatcatcttggccaattgcaattaatagtagttctcatacgagagagataatacaatagaaagaagcctcttggaacggaaccttaatcattcccgtaagtcttcatcagcggctacgtcccaggaaacaaatcttatgagagctcttgtttgcagtgtagccaagattaccaatttacgagacatgtaataaactagacatggtacttggaggaaactgggggagatgaactgaagacttgtatgccgaaaaaagtatgaactgaagacttgtgagttcatttgggatgatgatgatgatgatgatgatggtatcatataggtgctcccttcgaatatgaatattcttcgatgacagaactgagactcccaagttccaatccatctcggtatgatgtcaaccagatcaagaatttcaacacagcttcatgtttgtttgttttcatgattgaatgttggtatagcttgtgaggggacattatacattataattctatacgtagcttatacatatcacattacaccagttgatttcattatatcccaaatgcaatgacctatatactctcaatctgtctgaaggaagaacggacaataaagaatgattggatcaaaaaaaaaaaaactagtcccattgcttttatgcgagtagattaatattgtacttttcttgttctgttttcatatttcacattcttttaagactattgaggaatctgacaacagacaattaaatttgaaaaacacggtgatgatttctcatgagtcaaacataatttatcaataagagcctgtttgaatacatacaaaagctcataccacaatttcattcctttgctgcaatattatgccaaaatgataatatatgtaacattatcattagctaattacatgtgttgatcatgctattaatcagctaactattggcttaattataaaattagttttatcacacattttctgtgttataaaagctgagaattgtgaaatgactttgtcattccacaatttaaaccttatttccctgaaaaattaaggaaagccaaagttgcagttcagaaagcaactattttctcattaaaatctgatgcagaaagcaataaatcatccgaatgagttttacacaatgaactcaaaacgaaaatagcacaactgaactccattgagatagcccaatgagatattacttaaaataaaaagcatcctacagtaaatatagataaaatccagccaaatatgagtgaatttcctaacacaacaccctcatcagaaaaccaagcgttcacaaaaaaagaacggaagcttgaatgcaagcttctccagcaagtactagctcttcctttttactcaaatgtatcatcatcgtcatcaggaagaggctgattagcagcttgagcaagttcggcttcatgactgcaacaaacaacaaacgcttatttaagactagaatatgaaagaggtgatatcgaagcgggtacaaatggtgtgtgtggcaatacttgcaaatgggaaagaagattagaggacttacatttgttgtgctgccaagtcaatgtgtacttcaggaggagcaagggcaggagactcaacaaagtgaatatcagtgttcctgtgaagaaggcatcacaaacattaatccaaaagtaaataattgactgacctatacaaacgtgaatttagaagttagatagcagaagatttggtgaattacccagcaagcttcctggcaagatacaagaaaggcttctcaaaattgtagttactctttgcagatatctcatagtattgcaagttcttcttcctgtggaaggtgacctgcttggccttaacctgcctgttcttcacatcaaccttgtttccacaaagaacaatgggaatgttctcgcacacactgaatgacagacatgataaaaattttacaaagaaaaagtcaaataccatccatattcagcaccagtcggcacaatgattcaagcgtacagaaagaaaaagctcgtttagaaataaatatagcacaaaccggcaaagatctctgtgccatgtaggcacattcttgtatgtcaggcgagccgttacatcaaacatgataatagcacactgtccatgaatgctgca

SEQ ID NO: 227749 - DNA, 2200 bp, Cannabis indica
ctttgttttcattttaagtgattattaaccaagacatttggtacagctgtgtttaccagctgtcaagaaatgaaagaatctgaaaaaagtttcaaattatttttccaggatctcacttctaaatattttatcactaaataacaactaaggatattatagtttttgtgaaaataaacttccttccaatttctgctcctaacaaacaaatgatgaaaatcttaacactatctctctatcttcaacaaaggatataatatccttcctctctatattcatttcctgaggaatgtgcctcttcatattatctctctatctaattaaacagagagtaatggtttaccattgcttataatagggtattttcaactattatggtaaatatttacatatatatattttagagatattttatatttataaatgtatataaggttccatcagtagtgaaagataccaaatttctataaatttacaaaagagattgcattctcatttcttatttaacactgaaaaaagaaacacaattataccaagtaaagaaagaagctttgtatgatctaaaatcctatatcatgattattttcgatgtaaaagaaaaaaaagagagagaaacccgcaaaacacattattgcaaataatcgtcaagctttcaaaagagctatgttactagcactaaccgctcaagccgcaacatggatctgtgcaaagcaataaaaaggcatgtgctaccaattacatcctgcaaagaaggcacaagttaggtactacaaatagaagttgcaagttgaaatgtattggcttttttcttcttacaaaattcaaaactctcacaaatgacattcaaattcccaaactatcaagtatggacatttactctcaacccaaggaggccacatcttcagtagtcaagtcttcactgttctacagtgatcaagctttgcttcattcactcaaaatgattaatttagagtttaatttgcctaaagtaatcctatacttgatacataataccttattctcttctttattgttatgtatacagttagaatacaaggaatatttcatctatatcctaatatagtactttttgttaaggaaatactttttcattttcttagttaaactgcgcaatctaagaacatgttaaaaccacatgagagactacagaacacttagctgcaagcaagctgaataataaatgaataaatgataattcaagtagtttgagaaaataaaggaaaattaagccatctcaatactgaaccaaaaaggggagatgtagtttgagaaatcataagaagaagatttcatgtttatgtattcaaactggaatcctatgcttctataaattagtgacacttctatgagtcaacatcctaatataaaaattgtcaacatcaaacaaggacactatgtcgtcaaatatgccaatctcttgatgcatttatgacaagatatggatcattatcaatgtataaagtgcactaaagatgcagcatactaaaccacttgatcctaaagaaagtctatattgtttctatttaccgagtaatttatggagggataggatctgatccttagtttgcatgagtcttcttgcatgaactctcttgtgtacacgattactaacagaaataatggtcatctccatactatctcaaaagctcttatatcaataaaaataaaaaaatatacccccaaaagattttgggtttcagccttattgctacggtgttgctcattatatgaagcggttgtcatctaggattttggatttcaatagtttattgtaaatgatttcaaaatacttctaaaactacaacatctactggatgggcccattgtctgtgcttaagaagggaaaacttgatccaagagctataaagtgcattttttgtggggttattccattgtttgaaaaggctacaaatgctatcatccaccaacttgaaagttctatctcttcattcatgaaacctttgttgaacatgcaagatattttgacaccaatttatttgtgctttaattcctatagtaaatgtaaatgagaggcaagagaagtcttgtagaaaggcatttaacatagactacatttaaataataaatacaaaatatacaaattaacattaggaatgctacaaaaagaataaagttaaaataaaggaacctcttcacttgggaaaagaaatgtcgatggcct

SEQ ID NO: 227750 - DNA, 1121 bp, Cannabis indica
ttttagtaaaatgaaaaaaaaaaaatactttaaaatataaaaataaaaaaaaaactccttaattaaatatattatatatctcgttgtgctgtgctgtgtgtggatgcaccattaatcactacacaaatcctatagaaaataaattgaaattaatgtgaagaacagtgttaagaaacataagcaaataaacttacagagtacttatttatcttttctcctttttcctcatcagatggtacttattaatcttcttgtttttcttcctacataataaacaatgttgagtagtcaacaaggttaattcatgactgatggtattggtaagtaactataagggtcgaatgagtcgagggccaaataatatatcatgagatgttttactgtgtaagtaatataataattaagcatttgattttgttcaatgccaagctgttgggaggtctttctttcacaagaggtaaataactcactactacgtgtctccctagctactttcagttgtttgcttgcttcgaactcattctttctgactcaaaaaacgtgtaaggactacaaaaaagctaaacgtttttaaagaaccacttttgatgttccaccattccatgttagttggcaaaactcttcatgaccatcaacctaaattgaccataatgaccttggtagacgtagttgaataagggaaatattgaccagggttatcaaggtaatttcattatacccgtcaacttcgcttccaactaagaggttggtatgtagttctcacttcatatgtatctcccgccaaagtctaacttagccgttgctttaagatatggaaagtactgtaactctgcaccgagagaaattatagagacttgagagaaaaatatatgtatatatatatagttgtaacaaccattaggtaaaccattctaaaaaaacccaacaaggaatttctctgcggtctttttctttattaaatacacaccaattaacatagtggtctcagaatgcttatgattgatctccctcatcagttgtttagcattgaatataactaacctctaaaaccaaagtcaccaaaaacaggacaagcttttcaagcctaagcaaaacaaataagtgcagagatgagatttttc

SEQ ID NO: 227751 - DNA, 1546 bp, Cannabis indica
tatatatacacgagcaatatataataaaatcatatgtatagacagtacatctcatcatcaacaaatcattaaactctcttgcaaatatgtatatggtgccactgcaaaacattttacatttaattaagagaacacacaatacaaattacctctggatctatagctaggttttgtcatgaaaaaatataaaaagtaaaacattttcgccataaaaatgccatattattggcaaaaaaaaaacaccacaaaattctctctctctctctctctctatatatatatataaagcaaatctttgacaaatgaccagcacacaccactcttttcctttattatggtatacataaatgatcatagcaagttagtctctttctctcttaacatacataaaagttatattgttcaagaatataatcatttatgtggtcatgacataaagattgtatgtatattgttgattgctggtcctcactcattttagagcgaggggagagagagagctaattaaagaaagagaaatgtggaaataaatatataaatacaatggaaagagatatgatatatataatatcatcggctccgacaatgaccattcctttgtctctcatcgatgcttgtaagaaattttggctgccatgactcatctgagggaccctttctagcttctctttctctctctctcattatttttaaagctaataaaaaaaaaaaaaaaaagccaaaagcccaaaaccattccagtagtaccatagaggtttcaattgtataaccaacaaaaccggacatatatattatatatattaattaaaagatccaataacgcatgcacatatatatgtgtattgactactcgatcgagtctaccaacaacaatataatatatatatatattacaaagaaaacaatcgacaaaaaaaaagctcactgcgataattaaattattgcaaaaaagcagtcgaaaaacctaataattacgtctttaaaaattattcaacataaatccaaaataactatttttaaacatatacttacaaaccctctagctagtttttaataatattatgtacgttaactaataatgtacgtctgtcacaatttatattatttactgacacatatacacactcatttatatatatataaatatttctctttctaataaatttttatatatatatataataatgcatggtggtggtgtgatgctctctgggaatactcacttttttatagcaccattatatcgttctacgtacatatataccctaattaatgtgacgtatccctctccctccttattgtctcctttttttttctctcaatgaaatattgcgtatccaaatttgtgagctacagatcttatccaatgttaatattcagtaacccagggaccagttttggattttcactgcaagcttttatgtgtagcatgtagaaaggaatctaaatatttgagctatatttatatatatagctcaaatatgatcatgtgaagggtacgtccagttggaacaggtccatacacacctatgtacacgcatatata

SEQ ID NO: 227752 - DNA, 4452 bp, Cannabis indica
acaaatacatgggagtttttaaagcatatttaaaaaccgttgcctataccttccgacagtttaaaactatcgagaatattttatttttcttgacggttttaaatactcaatttttttaacgacaattctccgaaaaaaaaaaagttaaaaccatcgcaaatattattttttgtagtaatgataatgtcccatcgagatagtattaagtatcttaaatgccttcttgaataatgcacgtccacttctcgggtatgcacaaaaccatctttttcgttattgtcttattattactttttttacaagctcaaactcccatgaaatagaaccaaatcctacgtatgattctcctatatagcatatacccttttataaacgctataaatatatatatatatatatataaaaataggattagtggttattatccttgattaatgtgttcaaaatattcttttattaagtactatctcatgatttcttaacaatatattaacagttttcaccaatcagttaacattatccttatttgctagctgccaattattcaaatttatccctcacatgtgcatccataaacaaaagtactacatattaatgtacatttatatattagataattaaataaaagtaagagattgttttgaattaattattttattcacatcttaataagctagcttcgtcatcaagtcattacgtacaatgactgaatgacaagacaaagtgtacacgtattatccatattccataatatatatcacatgatcagcgaatcatattaaaagctgagctgaaacatcaccttaaaagtttcttaaagttaaagttgaaagaaaagaaagaacaacatccctatttatatcaaacaaaaactcgaatatattaatatacaagaaagcaagacagagaaggaagaggattatttgaagggattcctctgtcaatattattgtcttttgagaactgatctttagagagcgcgcgaggccttgtcggggggacccatcaagactctctgtcctacgtgtcaacccctaaacctctttacacatcaacccaagtaaaaacgacaccgttttctttattgcacttctactagtagtacgtaagagatccaaccattagcattgtcgtttcaagtagtattgtgttaagtatgtctctttcaatctccataactaatccttctccttcttcttcatatgccatctcactttggatcttcaactgatgaggaagatctctatcgattaactcgtcaatgtcttccaacacctggcaatctttgttgggaaagctctcaactctccaacacaacgtgtcgatcaactgggacccatgcatgatccaaaactcggatgaggaggatgatcttgaccgtccacgtgtactcctattattagtccacggcttcaagttcatacaaggctttaatatctccaccaagatttcgtcaaccacatcgaacactaacctccggttcgaccggagtcgaaactgggacgaaagatgtgcaaaagtagttgattcttggaggtagaaggagttctcgagtcggtgaaatattgattggtctaatgggtgtgagggagagaaccaattggtgaaggacacgtgggatgttctcgctattcctacacggaatagtattctggaaatgtactggttgaggtccgaccacctggcgccgcggctggtggaggcggtggtggtggtggttgttacgacgtcgtttgtagtgtctcggggttcgagcacgtgggactctgtttggtgttggtacttttggctctgagaactagataactgtgacgacctacgtttcgattcttgggcattattagatacctctgttatttctgcctgctttttccaaaaacgcaacgtaacaaaggataagttgaaaaaattatgagcacagaaattattgaaattcaaaaattaatataatgaaacaaataaatgggtttaaattaaaaaataaaataaaattgaaatatagtttttggacctgtttattatgagagatgggatgacttttcttgaccgaaaagagagttgggacattgatgttattaagaagattgttagacaaaggggtcttcttgcatttcttgtcaggaatattgtttctggtagatgttgaagaacgaacaaatgtctcttcctgcatcttttgtagccttgcaccgaaccctgcttcacgcccagcttttttcgttgatgttctacttttttggtgaaacgacgtcgtctcatgatggcctcctctctcttgcaatgcctttgacttgactgtagctaatttgtccggcgcaagtgatgaagatgatgtcgtcattattggcaatggccttgaaatttgaatgctaatttgatctttactactggcgcataaagatgttgttgctgttgttgttgctgttgatgctgttgttgttgttgttgttggagcagtagtagtacaagtagtactaatagtactaatagtcctaatagtcttggggtctgtgaatctgagccttggagaacaggaattgtttgatattgataacgagtaattctttgctccgcttgcttggtcatcaagtttggccaaaccctttgaaactttcttggatttgagctgtttaacaagttcatctttgctctgattatattctctgttcctagaagatgtgtttgttatgtccaccaaaccaactttcctgcttacactctctttcacctgcttaacaatctgtctagcgtaatgacctggacttcgagtactgctctcgtaatgatgatggtcggtttcatgaactcttaactgctttcttcttaaagcagataactttgagaagtccaaatcatcagtacaaagattagcagcgttgttgttgttgttgttgttgttgttgttgttgttgttgttctctttattgatttgaagcgagagacgggggtgatagtcgacgtcggatcttctggctaatgatattcttggagtctccggcaatgaacgagtgcctgaataattagtaagatctttggtttggagctgaggttggcgaggccttagaggtaatctcttgacacgattttgttgggctgaatgagaggccggtggagtaaaacttggggagttggtctctggaagaaggtctaggcccattaatcttgctaccaagcttggagttttggtacttggagagctactagtgtccgaggaaaaatcactgatagctcctccagcttttgatgatgatcttgaccctccatttgttttgatttgaatacccatctggatttttaatcaaccatcataaatatttatataataataatagtaataaaatatatgaaatgtggacactgataagtacttattaagactcttacagttgggatagtcaaattgaaattttctttagtatcttcttcttcctctatgatagatgatagtgatgtaccctcatcagatttcaaactgtttcttggtgcctctatacctgaatgaatttcacaaattccagccataatatagtagtatagtcaagacatgaatacaaaagagaaaataattcataataacattcattataaataagtgtatgtgcttaccttttggactaacaggctcttggggctgaatgaaaggactgctgccttgtttgaaagagggtttagcatcctggtttaaattagggagctgaaactgttgaaaatcaaataactgaaacactgcgcacatgcaacccgccgaagcagtggctgcgtctttagctactgcttctcttcctctcttcgaggattttccaccccaataccagtattccttccccataactactttagcaactacttcacagaccacaaagctcgatcttctttatttatttatataaaggctcgttttgaaatatgtgtgttgttatgagagagagagagagagagagagagactagagagaatactctagtcgtactgatgtggtagcagataactcatactatctgatatcctagcatatatcttttggcatcttggtgtaactctatgtacacctcatcgatgccctgatatgctaatatgatggctatatattttcctaaaatatgtatgtcggtatctcggtgtaactctatgtacacatcaccgataccctgaaatgttattctgacggcaactaacatgtacgctaaacatgtatacatatatgcatatcattttactaatcttaccttgtttccaaattcaggtgtgtcggccaaccggagtggaataattacttggtgaattataggcccctagatcacatcgttcataacatggataagtgacacgctaaatcataaccggggacttaggttttaaacaaaaaatttttctactgaaaattaacatggcaataccctaaagcaacacggaattaatcaactaaggatctgaaactaacccgaatcgaca

SEQ ID NO: 227753 - DNA, 2880 bp, Cannabis indica
agtttggaaggatgaacttttgaactcagaagagacattttgacaggaaagagatgatccattatgaaaatagatctcactaaagagccagaaggtttgtaaaaaataacaagcttgagccgcctttttatacacgaagtccagtgacaagaaagccaaagattgagaaatctattggttggaagttgtgcaaaatatgaagagacgattcataatgatcctcgaaactgtacaccaccagaattaaaggatgcatttttcctaagaaaagattttgataaaaatgccttctgtaattattaaaaagctctttttactaaaaaagaactttttaaggggcaattgttttacccgaaattcggctggaggacacatgtcaagataaagggaatgtgaatcggtgcaataactttttatggaataactcattaattacataagagtcagagtatatttgtaacccgctgactgtaaagttttaggcgaggaatcaatgtacaaactggcacttagtgtattagcaagaaaccatacatcgctaaatgcgagtagcgaggcaccagagaaagtgacacataccaactttaaaagtccttagcttgcaataagcaaactaagtgtaaaagtcggatcgactcaaagaacaagtatgcgaaatgaccatctcgctatgggaagacttccaatagcttcatccaactaacaggagcgaggctcacgaccttggcgagtcagaagatttctttataaataactgcgatcgacacaaaacatacatcatcgaccttggaaggaagaatggcccagctcgctattgggatcactataatcaagtttatgtcaagacaactccaaattcaacaattaaagatggtttaatacacgacaaatttgacccagtaaaagtggaaaaatcacaactatacgattttcaaatcataaaccgcatttacatttcatgatatgtaattaaatcccatgattttaagcataattgctgtaaacatattatggtcaactttgtaattaattgcctactatgtaattagaaatagtggcaaacaagctcaaaaaaagaacgaaaaaactcatgaaagaggctcagaaaaaaaatactcaaaaatcggaataagattgactatacagaattttaactgcaaaatcacgtaaaaaccctgtgttcatattctatattttgttagctttaattttttctgtataaaatcaatattatgaggctcaaatttagttaacaaaaatttgcgttaacaacaaacaatataactgatatgattcatccctcaattatctacacattttataatgactataggtctaacctttatctatctataaccctatttcaaaaacaatatatttgattagtgtagttaaactaacaataattgtgacatgttgtatttcccttggtagtgtaacattaacatgttcaataactttgtgagaaataaataatatagataaacagaaacaaatatgaagaaagggagagagtgtatataaatatatatatttttatatatatatataattcttagtatcttacgaggggtcttctggtctgcatgggagacagaggttacgtgtggtagcactctgaatatgtatatatatagagagagatataatataggccaagcactatacttttttggctctgaatgtggtagggtttagtcaatcgtaataatttttcttactctcatttcccaagaaaaaaacacacaactttttcttgctctaatccttatcatacgtactaatctatcttatttttatatatgtattttcacatatatcaaactatttgtctttatttggggttcactgtctaaatttcaggctctggtaaattcaatatatctaaatagttcacctttcattattattcatgtacatacgtacgaacgttgtattttccttttatctttaatggttactttgaaaataatgtatgcttcttaattaatcaaaaaaatcttttatgtaaagagatttgaatgtgtaaattaataataaaaaagtaaaatagacaaaactattttattcattagaaaaaaaaagtaaaattatacttatataaaatgaaaattaaaaaatacaaatatatgcccatttaatttactaagtaattaaatacccacaatttttagtatatatataatcaattaagcggtagaatatacattgattgatgggaccgcaacctttcacaagtttatttatttaagaaatatataaaaataataaaaaaattattaaaatataatagtacaatattaattatttttacaatttttaaaattttatttacaaaaatattgtacttttaaattatttttatgttgcactacattattatgtgcattgcatatatacttagttatattttttagtttttatctttgttatgtgtatttttaaaattttataaattatggaaaactagttaattttttaattttgtgttttttaaatatttaaaattttaaaaatttgaagaaaataaatataaaatttaaaaatagtaaaaattgaacatactgtctaatattaaaaataacaataaaaaaataataatgttacaaataatatattaatatttatatacatttaaattaatttaaaatcagtacctatatactatttttttaactttttttttttaaatttactagtttgggtttctaaaagtggttgcagcgctagttgcaataggaatttctatacattttttgttacaatttaagttgcaacgctagttgcaatatgattttctatgtagaattccgtaaaaatataaaaaaaaaaaaaacaaaaaacgttaagtttaaagtagtaaaataagaaaacgcttac

SEQ ID NO: 227754 - DNA, 1544 bp, Cannabis indica
gttttcttgtttattttttgcaggaaatttttcaatttcataagcatattatatgataattgtgatgattgtgaattagattgtctcgttagtatttgaaattaacgttgttaaatctgattgtttagcaattatatttgcttttaataatagtcatgtttacttaaatgatttgggttctttgttagaggatattacaagtttgttttctaaatttttaataatatccctaattcatgtacgacgaagttaatacgactgcacatggattagcaatagcagtgcatgctcttcggatgaatgaacaacttgtttggttagaggatttttctttttttgtgacgtttgtatagttttttagcatgtactacattactttgatttttaatgacattgattattgtttgaaagaaaaaaagaagcaaaaatccaacaaatctaatttataatctaaattttaattcaaaaattatctataatctacatttttttttctagagtagcttgaatgttattagttttgagctagaggcaaattaataatttgaaggttgactatagagagaaaataaagagaagggcaaatgagtatttacaagaggcttgtatcatgttctatttatttatttattggaaaaaggcttgtatttggtagtataagaagcttgtatcatgttaattctcatattttttttttatctttaaaattactcaaattaaaattaaagtagtagagttgagtcaaagtccaaagaagattcatttcattcactaagaagagcaaaaatccaatgaatcaatttatatataatctaaattaatttcatagagcatcttaaatattaatctggaactagggataattaagtaatttgaaggttgttgactaactatagagactaaaataaaaaaagaagggcaaaatggtaacttggtagtataagaggcttgtatcatgttaattctcatattttgtatattgttataaagaaaacataatacaagtctggctttttaataagacactagcatggtggaaaaaaaaaatatgagtttgggtacaataagattgataaattagataagtaagtataaatagactaacctgaaagtatgacatattaattttttttatataatttgataataataataataataataatatatttattaataaatatataaattgtaatcattttagttaattgtttatatgattattcgtaaaatattgttaaaaaattatataaaaataattaaaattattaaaaaaaaaagaatacacataatcttgtgatcttaagtgtaagaaaaataatagaaaagtggaagccaaattcaagtctgcataagaaaataaattaacctatttataaaaaatgaataagctcgagtaaagtatgacatgaattagaacaagacacgaaaatatgaattatgggtcgtatcaagcttattctttaaaatatttttaaggcacgatacaacccataacttttaatgaaccgacaagtcacaactagggatgcacacgaggcggg

SEQ ID NO: 227755 - DNA, 3239 bp, Cannabis indica
ttaattgctcagattacctgctactccctcctttcttcaagtacatcgctgtaggcttcagatggggtataaattaccgtcttttggatgggcagtgcactgttgtcgatatcagaggaaatgttgggacatgattcgttaagtggttcgcaaggctgtgaaggctcaacactaagcactgcatcagtaccttgtgcgacagactgtatttccataggaaggcttgacacagggtccttttttacaatcagagttgcagtatcctcaaataggcaaatgtctcccacgcctggtaaagttaccatcggaaatctgcaaactctctcctcccctgactccggcagctcctcgatcacttgttccaccatcctcctcttcccggggagttgtctccgattctctctagcatcccagttctccgcctctttaatggaaatgttcattttccattgtcgactgaaagcaacgtcgatcgttaggcgtttctggattatccagtcatggaaccatttcggaaggaccttgtcaaacggccatttagccatttcttcctgtttcatccagataccatacataggaaaaaaggacccttgttggtctttaatgactgtgggcggtttgaaacagaacttctgttcatgagaaatgatgccacattttaggcataattttggaagcttctcgtatttgtattgaatccataggtctttgataggctcccttttcatgaagaaacctgagaacactggtttatctatgtcgagtgtggcccggaatcgtacagaccccattccaaacgaacccgtctcgaagtctatgtatctaggcagcttataatttggagaagctttagcagccaactcctccaagtttgttttgttccagtaaaagggtggaattccactgagcctcacccaaaaaggtgatttgtcaaacttaacttccgaaggcgttaaccatgacggccatggcatgatgaccaacagagctccacaaataatccatggccttcgttggaggacattccacgcatcctctttagtggcaaacgaaaaatgcaatatgccctcatcatcttccctccagctccaccctttaaaggctgcccaagctttctttaatgtgttcgcaatggccattcgaccgagtttgcctttacagatgagcttccctagtaggactttaccctgtggctcttgattatcaacttcccctgggtctagtctgtatgttaagtcttcggttgaaacttgaactatttcctcaaacaaatgactgagagagttatcagccatactgcaaaggataaatttgttgatgatgaatgtagattttagatgatggaataaagactccttgagtaactgttttcactgtccgaagttacacctagtatactccggtaatctccacttgcgagaagctcctacagagcattttcatggacatatcattagagtatactccggtaatcttagtcatgcaccaaaaataaacataattcatattgacacaatgtcaaatgtaatgttgttatgacccaaaaataaacataattcattacattttcctttaattaatttcgtccaaccactacaaaaaaatcatatttttagtcataacaaaacttgtggctaaaagtaaaatagttgtgactaattacaaatcataatttttatgttgtgacaaaaaaatccgcaggtaaaaatattagtcacaaaaatcacaaattgttatgactaaatgtgtttttagtcacaatatatacttgttgtaactaaaactaaattaatgacaacttgtgtctaaatactatgttttagtcacaagtaactttttactgtgactaaaagtcacatttagtcataaaaaatttatgttcagactaaaaagttgtcactaaagaaagatgttttactccccttacatatcaattttggaatgccatgcatgcaaacctcttaaaattttcaaagtaaaatgtgaggataataggtaaaaggggaaatttttgaattgttattacaaccttagaaagtggtatacacataggttatattgcaaacacaatattcatgaaggcttcttaggcagataagacaaaaaagtgacctttaatttgtgttggagtgaacgcaaggcatccatattcaaacaaacactccacgttattagttttactttaaagtagattatacaaatttggggcaattcttttgcactattataggtatatcatgaatgaatagtgaattggaaaaagctcatttgtcaccattcaacatttttatctatacttttgacttcatcttttggcctatttttgtctcaattttactaaaggaccaacacaagtgatataatatgatgtaaacaagattgattattttttattcttatctaaattaatattattgtttgtatattggataagatgaggatgtatgttttgtcaaaaaaatgatgggttggtataatgtctttgtctttggtatcttttattctttattattcatcaattttgtgtgatatgaaagtaaattataaatatcgcatatctatatgagttttattaaataagttttattattataattacaaaggggtttggactttggaggagataaccctcatatatattaataggaataaatatatatttttcccaacatatactatgacttttttatcttaaaataaaatgacaataataaatcatttttctctcaaaaaaaatcatttttaatttatttgtaaaatttaatacttagtacatttcatttataactaggtgagtgtacgtgccgaaccacgtattgctagttttatttaagattttggtatttttaagattttgaatgtattttatttttaaagattacaaattttttgtttgaaaaaattaaatatttatatttgaaatattatttaataatgtattaaaaataatattagtgtaattataaaattgtaaataaatttattattggagtagtagattattctatttagttctttttttaacatagcattgtaatgtaagtttatatttataaatattctgtaaagtgttaatattatatgaacatctccatttataaagctaaaaagtgggtcaatgacagaagtggtatatctgcaatcacacaaagatagaagtggtatttctgcttcctatgcttatccagagaaaatattagataacgtaatgttaactttaatattagataaagtgagtc

SEQ ID NO: 227756 - DNA, 3121 bp, Cannabis indica
ccattgctgccaagaaaagctttaagtcttttgaaagaaatcactcgattacaattgttgaaagggagaagataatagatgaagtccggaagaacgcatcagaaattggacgagggtcaggaaaatataaaagtttggggacctcgcatcatcccaatgaaactttaagctcctgggagagtagatctaagaagaccattgaattttcacatgaaacaaatagcttgagaacaaatactgataagaaatctgtttcagaagttgaagcaatgtcgactaaattgggaagttatgatatctcagttatgtctaaggaaagtacgagttctggcagtttgggatccaaaaactgggcacagggtctggaacaggttgaaattgataaagttaatcagcgtgtttctgagaagggaaatagtattgttcttctgctacctaaagagtcaccccaaaaaggatatcgtgaagtattgcagctttcacaacgtagaaagtcttttgatcaaaatttgactggactaagtaagaattgcttatcagaagactctgattctaccaacaacataaactcttcaaaactttttcccgaaattccacactcgtgcccacttgcttcttctgttcaaactaataccatctcggataggattcgaaagggtatgactagtaactacagtggagagctttcatctgctgtatctcacacgctctcatgttcagaaaagacagaagatctccattataaggataaatatgtaattaagaatcagtccaacgtgaaggctgcaaactcaagtgtcctggatcgggatccaattgcaactttaagtgaagaggctaccgagctgacagctaacaacagtagaaatccatctcctcatcgtcgatttagcttcagcttaggtcggatgggaagaagcttaagtttcaaggaaggctcgacagcttcaaacccacagttgagttctacgcatgtgactgtgaagtctggtccggtgacttctagtgcgtctgattgtggtgattatcagaataaagataaagtaaaaggtcacaacagagccaggtccagtcctttaaggaggttactagatccattactgaagcacaaagaagcaaacacaccccatcattctgaatctggtttacagccaaaaagcagctttagctcttttagtgggcctgtttactcatttccaaatgagaaggttgaagaatctcaggtgcaggctcttttgcagctgataatcaataatgggattccattgttcaggtttgtggtcaacaacagcagcaacattctagcagcaacaataaaaaaccgcacatccagtaaggatgattcaggcagtaacttcacattttatatggtcaatgaaattaagaaaaagagcggtggatggataagccaaggaagtaaaatgaaatatgtgtacaacgttgttggtcagatgaaggtttcggcatctgatttctcttgtacgagtgaactggacaatgctgagtgcgtgttgagagagtctgttctctttggggttgaacgaaaacaagtagatcaaggatcacctaagttcatacctaatagggagcttgcagcagctgttgtcaaggtccccagaaaacacaaagaatcaacggagaaaggctatgtaaagtgtattcctcagaaccaatcctctttgaaagtaggagaaaatgaacacttaaaccatgttacagtaatactaccaggtggtgttcatagcatgccaaacaaaggagagccgtcaccactgattcatcgatggaaatctggtgggtcgtgtgattgtggaggttgggatgttggttgcaagctccaagttctctctgacgaagaaaactccctcaagggtccattctcagattgccttgaactacacgttcaggtactgttttcttgttgaatcaagcacttgcctacatagcaactttcttttaatttagttcaatccattcatatgctggttttgccctaaatgcagggaggagggcaacaacaaaacattccaattctcagtttgatgccttccaaagatggaatatactcagttgaatacaatacatcaatctctcgattacaggccttcttcatttgtgtagcagttttgagcagtcaaaaagtgccggacctgtcaacaataacaacccacctgaactatcaaaggtcttggatcagtctgatatgagtgataaaaatgggtaccgagtgaaattgccattgccaacaaaatatgctccaaccccaccactctctcccgttggcagggtctagttttctaatcgaaaaagattgccctgttagccatgtctgatcgtgaatggtcggccttccaatgcatgttagagtgggaaaagctacgtcgtacatgtatcatggttaacctgaaagatctttgtatgtatggtaaagtaccttttgtgtatgaccatggtaattgtcaggtggttgtactagtaccaagcagttgtattgtgtaaagaagataaactcgtctattatatacaactcataaatttgatctccacattttgtgcgcgtgtggcagttagaataacaaaccactttgtggctaattttgctcaagaatgagatcacatagagttctctaataacaaaaattaattaataagaaaaaaaaaatttaatagacatcatattaattaggtttatttgtaaaatgtcttggtcagtagctccttaaactatatttttttcgcaaattagttttcaaattatataaattttaataagttgatcttcatttttttttttttgtttaaattggtctctaaacttttattttcttaaaaacataaagcttttactattaaatgattgtattttatttaggatgaaaatgtaaaatgattttaattttagaaactgaattagtaaacgttcatttttttaaaaaaaaattaaaaaaaaaaccaaatataataaattagctaataaaaattatgaaaatacatttactatctattgtttcttttttccaaaaaaaattataatatatagattaagtcatataattcttttagtattgcatattaatatattataacaaaaacgtagtaatatattagatcatgaaatata

SEQ ID NO: 227757 - DNA, 2557 bp, Cannabis indica
tctagtttagataagtaaaaaattgtagttttttttttatgataataagaataaagagatcaactatatagctatatatgtagggtcaaacttttatttattaagttttttttccaaaaatatacatatgcatacatagagaaaaaagagaacctctataattggaagataataagcaaatcaaataaaatatattgatggatgtgacaagagaaaagcaacaaaagataatgcttacatatttttgtggctctcagacaaaattgttacaaccatatatatcatgaatttataatttctctaaacttatcgaaagatatgcaattgatctctatatatgtaaaaagacaagaaaaatggaccttttataacactttgttttttcccattcaataagttgctttcagatagccaataattgacagaacccattccacctgacaattgatttatcattttagttccattaattctataaatacataaatatttcaagcatgcatacacacaaaaaaaaagaaaaagttgagtttccataaaaattgaccttttctcttctctattttatttatttacaagtactcactacaaacaataagtactattgttacaatgatttatctttattgaaagcttacaaaacaagtgtatatagacaagttacttgattaatactaaagcagatgcagccttggatgaaatattttactacgacaaaaatggggttctaataatttatttagggatagtacttactcatgaaagtaatagatgttttctctctcatctatattatgggagaatgtaaattttggatgtttctaaacttggcgtctcacaaatatctaatatttttattggtataatttaatattaaattttatttattttactttaataataattatgaaaatatacacactacatatgcgagaatggaatttttttacattatggactttttttacaaattttcacttgtttttttttctagaaaaatgttgctttcacctataatagcgtcaaacaatattaatatatttttaaaaacaacactttttgtagttgtagaaataaatcgtgcttacttttttttgtaataacaatgtcaaaataatatatttttaaaaacaacaaaaaaataattctgtatttttgtaagagaaaaaatctgtaaaaaaaatgtaagaaaaaaacaataaaattataaaactttgtcattttcatatatttatgaaataatccctaataattataaaaaatatccttaaatcattaatagggcattactttatggtgctagtgcctaatagtaattattttttttaaaattccacttatatgcatatatagactaaagctaattcaattgtagaactctagataaaagaatgagatatagtagttgtgagcacattataattaatgaaataacgaataactgaaagtaggagatattacaaactcaaatcgttgaagacgcacactgaattaatgtttcgtctatgaaaatattttggcaaataaaatatatctattctatataaagtgtgcctatataactgaaattcttggtttatgagaaattcatgggtgatttttaatttttatttaataaaataataaaatattatttatatataataaaataataataaaacaaatcctattaatatttgaactgatactaaatatttgaaatactaattaagaataaaattagaattatatagagtttttgaacttaaaagtatctatataattataaaattaattatttgtcaataataatattaatttaaatatacatgtaatttgttaacaaattttttcataactatatgtatggtagtaaaattatataaatataattatatttattctataatttcataatcaagtctaccgatttaatttattttttcaatgttaatagcatatttcattttgaattcccttaatatttatatatctatatatttatttaaatttgcttcaaatacttttatctatttatatatttattcttttattttttttaacggttgttttaaatttttattattatcacttagatcaagcaataaagcattatagcaatataaatatgtgaaaaatatgaaaaagactttgaatatcaaagtaagaaaattcaaacctttaaagtctcattttctatatttttttataccaataacgtgagtgggaaagctattattgataatattcttaggtatcatgatatatgaagtttaaggcccgatcagtaaaatacgtgtttttgttctttttctacttgattatactggccttaattttatgtaatttaattattatattatttataaattattcctatacatttatcttattatactattttaatgtcaattctcattattagaaatactatactcttcttttttttttttttttttcattttacttaccgcatttttttcttctctttatttatttattcatttttttcagctaaattataccatgtggatttcttaaaaaaaagtagataaacagataaatataaaaatttaag

SEQ ID NO: 227758 - DNA, 1057 bp, Cannabis indica
ttcgacccgtacccgaataggggccaaattagacatggaaggcgaagaagaaggagaaccaaatgaggaatggttttcaacaatgggcgaatcaggcatagaatattgtacttcatgtgcattactcttgcctaccacctgtttgttgttttcccccaaatagtctccctgaccttccaagtcattacaagaatcactacccctaaccccatcatctaagctcagcaaacaatcatccatggctgaatccgacaaccctctttgcaaaagccccgagccattaagcgcgtctacaaaccagttctcagacttggcatcgtgaagaagagcccccattgaggccaccgtctctggcttgacaagaagagaaaagcctcaaacgagagggcttcagaggagaactcgtagcagtcctatcgtattcatcaatcatgttctcgagatcttcgtcggtagtaacagagatcaaagagtcaaggtcctcactgggaagctggtacttaagggtgaaggctcggccattgaggaggatccgggagaggcgtgagcaaaggtcagcgaacgaggagtggcgatcaacaacgaagattcgggtgtcgccgccgacgtagcagagcgacttgtcatggggacgggggatgatgtggccgccgtagctgcacaagaggcgaagcttggcgccgggaacaggctgcagaggctcatccgtccaggtatccgcattgcgagaatgaggagaggagtcgaaacagtccgcgtagttgagctgcatggaggcagcggaggtggtgggaagaggtgggagaggtggtggatccatttcggaggagaagctctgctatttttcttccatttcgatcgttttcaagtggaaagcggttctagtgtgtagagagaataaataatgaaacggtagtcgttttagtgtgtagagagaatataatatatcgggtaggggttctctattatgtttattaaattaaaataagtaaaatcgattatgaaataagtgctacccattttaatataatagtatttgttctccaaaaaaaaaaaa

SEQ ID NO: 227759 - DNA, 1650 bp, Cannabis indica
atatatatgtgaacgtaatgttgacaaaattaatttaggaccatatagcatagccacatagtccaattgatgatagatgcatgagaaggaaaagcaaaacattgtgcttaattaatataacattgcatcgtatgttaaaataatacttatctcaaattgccaattctatatgttttgaacaactcacactacattataatgtctagaccttaaagcatgatatcataattctcgtccttttcaaaaggttttgttgttaacataattgactctctaattatttacttgtgtaacatacgaagaatccaaggctggctagtatattgttaaataattaattagctgtgtattttgttgataaggtttcactcttgcataatatggtaaatttccaaaattattgtttattttttttattcaatgaatgcagagagctttgatttggtagataaacaaacccacgtaaataaatatgattttgaccattgatctacaatattatattgcaattattcataattaatttgttttattattctctagaagtcttctctattgattcaaatttgtcaaaaagtaagcccaccatagctaactagatatttcattaaacaataggagttgattgatgagttttcatgatttaatatttagagcactaatatactgcatatgctgtatttcaatatacaattattactaacccaccaatatgcccattgttccattaatttttttgagttcgtatttcaactatagcaaaagacgtctcctaccttatttaaaaattgatgaccaaaattctatagattattgcccaaaatcaagaggaatttgtgcaaggtaaactcattagagataatagtatgtttgaatttggtattagataggattatcgtatgtttgaactttgttcgacactatcgaagtaaaaatataaaatcatcttatatgattaagatggatttagaaaaagcttacgaggaaatttcgagacatttgaatttccctaagcactttatcaatttggtcgtggtgtgcatagaggcgcccaaattttcactcctcctacttaatggttcattacatgagttctttttagctaagaggggtcttcggctgggttatcccatatctcctttgccttttgtgctagacatggaatatcttgtaaaagatgagtcaaagagcttaattatttcaataattttatcattgttgtaagaagttgaaacttacccacttatgttttacaaatgaccttattttcctcaaatgagatgtgaaatttattatgcttttgttacattattttaaaatgttttctcaaacttcggggttgcaaaaaaatgcttccaagacatctatatattgctctgaattctaatatccaagagaaagatgtcaattagattttgaacgagactggctatgtgaagagtaagttgcgatttataggagtgtcaatgggtcgggtcgaaaatgatccgactatgatccgacctgatccatatcatttaaggatctgccccgccttgtcccgctaaatcagatactcggatcgtatcagatccgacccgacttattcggatcggatctaatctgacccgactattttttttttaagaattttaatattaacttataatt

SEQ ID NO: 227760 - DNA, 2774 bp, Cannabis indica
tcagttccatatgcattagcaactggtggatggttaagcttgattctgttctttgctatagcaacagcagcattctattcaggcttgttaattaaaagatgtatggattttgattccaacataagaagttaccctgatattggagagagagcatttggtaacaaaggaagaatgatagtctcaattgctatgtacacagagctctacttagtctcagcaggcttcttgattttagaaggtgataacttgtacaacatgttccctaatgatggttttgaagtagcagggcttataattggtggcaaacaatgctttgtactaattgttgctcttgttatcttaccaactgtatggctagacaatatgagtttactctcttatgtctctgctagtggtgtgctagcttctgctatcattatctgctcgattttgtggactggggctttcgatggagtcgggtttcgtcaaaagggagaactcattaattggaatggaatccctactgctatgagcttgtatgcattttgttattgtgctcatccagttttcccttctctctatacttccatgaagaaaaaacaccaattttctaatgtaagtaaaggcctcatctttatcaaattcagtttaaaatgtgaactcattatgaaattcttacattaagttttattgtttttagtaaaatttattgtgtttgatagttatttgtattgttagcttatattattatagttcttggatttagtatctcagtaaagtttttttagtttactgaagtctttgattagaagtctaactagaattatgtagttaaatcgccttcttaactttataaatacatattgtttcatcacaattgtagattttttataatcaaataaagaaaactagttctaatttaaagctctaagaaagacttaattgataatatttcactgatttatcaattttcagtgtcattttgttgtaatgacctgaaaatgatatttgtgcaaatttcaaataagctaaagctgttgttgttgtggttaatccaggtgttgattctttgctttgttatatgtacgattggttatgcatccatggctgtatttgggtacttaatgttcggaacaagagtacaatcacagatcactttagatcttccaactgggaaactcagctcgagaatagccatatacacaactttggtgaatccacttgccaaatatgctctaatggtaacacctataattgatgctgtcaaaaatggctttccaattccatggtttctcaacaaaagattctttggtcttatcattggcaccacattggtcatcagcagtgtcatagtagctcttcttgtgccatttttcgcgtccctcatgtcattagtcggagcatttttcagcgtgacagcttcgatcatcattccatgtatatgctacttgaagatttctggtatttacaggacgtttaactgtgaaatagtgattgtagctgtgaccatattaatgggggttgctgttactataatcggtacttacacatctgttcttgacatattagtgaacatgaaaatgtaaaaggcttgtcttagtataaggtatctgtccatgtagagaaattgagacttttcctctgtcaattttcggatgacaaagcaaataatgcttaccagttttgtaagagctatctttagtgattgtttatatgagtttattcgaattcttcttctgtgatttttttcatttggacttattcatcggactaatcagaattgctttcccaatgctctattccaagctttcacatttacagtcataataagagaaaaaaatggtgaaaaaaggttataagttgatcatcttcatgtgcaagtttagtacatcaagtagttggtagacattgacatagtcagcttctaaatcatagccagagatgaatcgacgaatcgatccacctaactcgatacaactctccccagcagcttttttcatcctcccaactctcataactcttctaacatcagctgcttcattccacatcccaacttcagcatacatatttgccaccatcacaaggttcccacatcttctaggctctaattcaagcaacctcttcctcactttgtctcccacaccttcctcgtcattgacaccacgtgcggtgcacgaactaagcagtgtcctccaaacaatgggatcgggctcgataggcatgttctttacgaaagcataagcctcactcaaacgaccagcgcggcctaaaacatcgaccatggcaccatagtgtattagcaatggcttaattccatgagtatgttccatttcgcgaaagtaacgatagccatcttggacgagaccggtgtggctacaagcacaaaggacgccaagaaaagtgacgtagtttggcgatatggaagagttcatcatctttgcgaaaagggcaagagcttcttcggcaaatccatgttgagctagtcctaaaatcatagcactccaagtccaaacatttctctctttcaacctatcaaacagtaacttggcataatccaaagccccggatttggcgtacatgtcaacaagggaagtaccaagtttgcaatttacaaccaaccctcttccaatcacatgagaatgaacacattttcctaaactcaagttcccaatctcagcacaagcagaaagcaagaccaccatagtagtctcatcaggctcaaacccatcacctctcatttgaacaaaatactcaattccatcactaaaccaagaattctcaacacaagcagttat

SEQ ID NO: 227761 - DNA, 2737 bp, Cannabis indica
aatagtttttttttctttatatccttcacgatatacatatcacatacaaacgatataccttagaccaatataaatataccataaacttaaactaatatactattaaatgatttttttccacgatatataatagcatataaaaactatattctgcaatcataagcataaatactatagtgaaaaattaatataccaccaatatagtggaaaatatatatatactaaaaacttaatttaatattccacatgttttttttttctttttctttccttcatgatatactaatgaacataaagacaatatttcctagtgaaatataactatacctcaaacttaaactaatattccatattttttaatttccgtctttcgttcattatataccatagcacattaaaataatatactacaatcttaaactaatatactacctttcagttatttcaaaatatatatatactacctttcagttttttttaatatattattgcacataaaaacgatatactattgtgcaaaataactataccaaacacttaattattcaaggttataattgtaattttatcatcaaatttttaactaaaaggacattttgttaatttttttaaaaaagggacatttattaacttaattgttagatttagggccattttgcatcttggccctttaatcaaaggtgacatggaccatagactcatgaattcaagatccaataacttcacgtgaatttattaacaaataatttcattgcttgattaatttttcgggattacactatagactcataattgcactccgaaattcacagaatgctttgcaactaatgtacatacattatacaaccataattttcattcattcatctatagatgatctactaatgagttgggtccaaattattattttacccttcatagtattttatccttaatattgttaagttccttgtaaatgatatttctgaaaatataattacagaaatgagatctctattatttaatgtcctgaacaaacctatagaatatcatcatttcacttcttattatagaagccataaatttttatatctttaacactcccactcaattgtactatcaaattttcaaaatttaagtatggatggataaactagtaacaaacaaatcaaatgacttaaataatacaatcagttaaaatactaatcactcaaaattcaaattgaattgacctacaatcaagtatataatatgattagattaggcaatgatatatttacttatttcaactaaagttagtatcggtctaatttaatgtaacaaatgtattatacatgtaatcttatctatttactagtgtcttagaaataacataacactaattatgtaagtagattttatcgtaaattagttagttagtataaatcttatgtagtaattaattttaagactaatttattttgaacacatattataattcactatgataacttctctaaaattacaaatatttatatgtactccattaatagatgtacatattaaacaaaaaatcatgtaaataaataaagtaagcaatataattggtaagtcaaaattaatttttatttaataatagaaagaagttacatagaaaataatctttacatagggtacaatgtaaagagtgtgtcctaaaagcatgtaagacatttattattttaatttaaataaatacaatggtttattattattattattatcataattattattaatattatatttaaattgttaaattattgattaaataatttatgtaaatatcagaaaatatgtgattttgtattagtacgagagaattaaggtgaaatgaatgaataaaatagttaaaactaattaaagttttgaaattctttaattggggttgtaagtgcgatttattagagtatcatgttggtacaataatctagattcaaattattgatgtggttaaacatctcggtaaatatattttacataatatgattatatatgacaagagtcgatatgaatcaaagtctttatacaaaaaccatttaataataaagactagtaatcatatcataatagatgatcatttatagatcaacctaaattctgagtgttcatgaactcatgtacatgttaattgaatttttaattcatttgttaaggtctctctaaagaatgaggctaatgacttttgtttagagatttaattacatggatttctgggaacatgaattaacaaaaatgaatctaatcattctcaatagattatatattggttcctctaagggttgattctaatactagatgatttttagctcaaatctataatcaaattatagattaattattcactggtgaattaatggtacttaaggaataagaagtaaattaaaagggtgaaatgataattcttccattctaatttatgaaccaatttattggaggattgaactattgtaagataattatatcgatggacaacttaagaaaagatttatgtaaaagtatatctataacataaagtgttcaattttgaattcatagtggaggaatatccaaatcaataaattaagtaatataattaaagagtttaataattgagttttaatttattggagcttaatgttataggtccatggtctccaagacagctgaatcagaaactgacaaaggtaaatacgagcaataagcaaaagggacttatatgataaataaaatattttactatgcggtaaatataattatt

SEQ ID NO: 227762 - DNA, 1385 bp, Cannabis indica
  modified_base (1367)..(1367): a, c, t, g, unknown or other
acaacaaatagttctatctcaacccaattcgccacaagcacaattgttgccccctcaaaatccaacagagcaacaactcgcaaggtcagcattttccagccatcctcctagaccaggcactgccttggacaagatcccaccaaattttttacaattatgtgctgagcacagaagttggtgaaatgtttactgtcaaactatttcccattatcatagacgatcttgtatggaagtccgaaatgacacacaatgttctttatgacaaagtccaaggccttctttgaggtgacagcgttcatcggctctgcctcaacccatttaagtaatcaatcgtaactatttcatatttaactcctccttttcccatcgggatggatcctaccaaattagtgcccgaaattacaaaaggccaaaggctactcatgagtgtaatttcagttgtggtgcacacataactttagcgtacttctggaattactcacattttttggagatactctatgcaatccctcttcattgtgagccaaaaatacccttggtaaaggattttctttgacaagcttggactggatgtgtgatctccacagaagccaccacgaatctcgtggattatagtgctaattttgattccaacaatgcacctcaaatatgacattgatagtccctgtcggtaaagctttccatccatagtcacatattggggagcttgatattggaccttcctagaggtagctttattcgtgggaagctcttccaaactcagaaagttgtaaataggtgccatccaagaatgagaattatcgataatggcatttacccctagacctcaatgctttgcttttttaggtgacaaactagcactactccatgttgaatgatcccgggatctgttacaaatttggggagcatatttgcaaatgaattttagtcccttgggacctgacaaatgttgtaacctttaaacccttgtagcagcttctgggacatcatgatataagaggacattttttcaccttttgtctggtactcaccagatatttggtttaccaccaactgggaatcactatgcactttgatatgttgggctcccacttccttagccaactttaagcctgctagcatagcttcatgttcagcttcgttgttggaggcacaaaagctaaagcgtggggcactctggagttggttctcttacagagagattaaaatgatccctgctccggctcctttctcatttgatgctccatcaacatagaccttccaggtgggcagttccgggagtggctcgtttcgggaggtcattcatgctggaacaatctactatgaaattagcaagggcttggcctttgattaacgcctggcacttntactgaatgtcaaactag

SEQ ID NO: 227763 - DNA, 1182 bp, Cannabis indica
catctgaaatgtgagtatgacaacataattgtcactaactaggattttgtccatgcagcattatgccaagcaacaaggggaattcgaatcgcttcatcggtccatgatgattggatttgggaattgggagtttgatccaatggatctgaagaaccctttccctaacaatgatgggtcggtacatctatggcaaggggatgaagataggcttgttccagttacccttcaacgctatattgctgataaacttccatggattaactaccatgagttagcaggtgcaggacacctttttccgaatgctgatggaatgggtgaagttatcttaaagcaattgttaactggagagacatagactgcttttgaattgaaagagccctgtttttcccattttgggaacttggatttatatgcttacaaaattggtgaaaagctcttttgacatgttggagttgctgtaatatagcctttaaaatgagaaaggtcacaaaatatgacacaatatcgacaaatattctaatctagcagggtttgtgatgtgtttttgctaaaccaagctttgacttagataaaaataatagtaaaccaagctttgagaaaaggcaattggagatgccttttacttaagttctaagcttctaataacttgttcacttaaaaatacaattttcttttaggaaactaaaaattattatttggggggctgcttttcccacccataactcattggagtcgagatgaaatttaataaggtataggcttattgcaaaccaacattgacctaattgccctagcacaaggaagaggttctcaaacctatgatcctttggtcgaatcccgaggttctaacaagttgggaggccaccccatgaaggcctcttcaactcactggtgccacaattccatagctctatgcctgcttcaccataggacaattcaggctcatcttcacctagttaagagattgatcttaggaggcgtttggttggaaggaatgaaaatataggaaatagaaatgagaatgggaatgggaaataaaatttaaaaatgcataaaaaaaaacttgataaaaaaactaataaattttttactttgttactattggaatggtcgattctatcccttttaaaatggaatagccattccaccaaaatagtacgaaagagcaattccattggaatg

SEQ ID NO: 227764 - DNA, 1693 bp, Cannabis indica
acgagaatcttaggaacaaccgtctcaactcggagcgaagctcggcaaagcgggcaactggaatgagtaccgagccactgatccacacactcgggatgaaagcaatggcaacactgaggcaaaactttcaccttctctccttcctcaaacacgccgaggcatatacagcactcggcccgatgagccaccgcctccccctcctccgccgcctggtgcaaaataatcggcatccctttaatcacagccgcgtcgagaccctgcgtcgaaggcaccggaccacctcctctggcagaatctatggggaagctgacgtggcggtaacggcaaatccatcgggcgtagaggactaggagagtgacgacgaggagaacggagaagattatgatgacgaagaagatcgcttggccacggatttcgaagttccggtcatctaggactgtgtagtgccactctataggtcggttgttgttatcttcggtataggccgtaagagttctcatcctcactcgggaactaaaaacgacacgtcgtttttgtgattcgttgtctgaaattcgtttcaatttaaattgaggcggagattttatttttggtgaaatgggcgtttcagacagaatttgatagcaagtttatactgttttttgtttggcaagttggcttattagatcgtggatgattttccttagatattattgtgcgaagaggaaaagacgtcactcgcgattacagcgcgtgtaagatacgggagagagctcaaccgttcgatcttaattagctctcagatcgaagtttggtgaatattcgcgtatggatgaaggttttaggattcaaatattatgggcccaggaaacttggctgctcttgatatttaaatgatgtttgattatttgtttatttttgggattttcacttagcttttaagataggtcttttttagttctttaacccttgtatgatctctttgagtgggagatatttttcttgttctgttaaaggaggataattagttttttaatacagacaaaaggataactatatacatacaacaccttttggtgcaaccaaactcaaatgaatatacgccacaattaatacatttgggttaatgtattcttttatttatatgttatgcaataggagtggggttattttgttttttaagtaagttttctaaattggatattttagtaatgcgtttaattaaatcttgttttattaggatagtaactaatgaggttcactttcttgtttgtttgccatcagtgatctattatcttaatagtcttttgggtcgattggcacatgagaattgatatactgattattcatcatttatatgaatttgttattaattagaattagaatatggcattcaatttgttgaattgacaatttacaataaatctctccacacttgatcactcaagactaagcctacactcatctaatgccacctcagcttgatctcaaccaactgccacttactctctcaaccgatttcaatagacactacaagaatagagaatttttatttcactttttccgttaataaaaataaaaaaataggataaaagatatattgagactttttatcccacgtttaaatttagcgtctcaaatgtacagcaaaattttttttggacaatggccctgtttagtagaacgttaagaaaaatatcaaaggtaaaaaata

SEQ ID NO: 227765 - DNA, 2473 bp, Cannabis indica
ttggtgaaggacaaaacaacaaagaaagttctgctccaaggagtgcttaaagatggcctataccagatccaacaccctcatcctcagtctcggtctgctctcatttccttaccttcaaggtcgacaaagaccatgaaatttgctagtgtttctgtcagtccaactgtctttaatgttcatgtaaaccgacctgtggtcagtgagtctttacattccaaaatcgatgtgtggcataggcgactaggccacccatccacgaaagttttacaacatgtttcagagtcaacaaatgtacaagtttccaaaaatgaagtgacaaacttttgtgatgcttgtcaatatggaaagtcacattctcttccctttaaaccatctcaaaaccgtgctgaagcggttcttgatttaatccacaccgatctacggggccctacacccctagcatcgagcattaaccattactactatatccattttgttgacgatttcagtcgatacacatggttgtatcctctgaaacacaaatcagaggcacttcttgcctttcaacagttcaaaactcttgttgaaaacaagtttgaacgtaaaatcaaggcccttagaactgatagtggaggagagtatcaagccttctcttcgttagttcaaaatcatgtcattgaatttcatcactcttgtccccacacttctgctcaaaatggacgagccgaaagaaaacatcgacatattgtcgagatgggacttaccctccttgccaagccagtatgcccttgaagtattggtgtgatgcctttcacacggctgtttacttaattaataggctacccacaccactcctctctcaccaatctccttatgaagtcttgtacaaccataaacttgactaccacttcctaaaaaccttcggttgtgcgtgttttccttgcctacgtccatatcaaacacataaatttcaattccactccaccaaatgtgtaaatttaggctactcggcttcccacaaaggatataagtgtcttagctccaccgctcgtatctacatttctcgtgatgttgtctttaacgaattggaattcccatttaaaactggtttccttaacaactaccagtctaaaacacctcttgtgatccatagctctcaatggtcttacctgcctatccccactcctactatgtcacaggtcaatgcaccccctggagctcctggcactcgttctaactctgttgtttttcctccttcagaacagcctgttgcttcaaatattgagggggagacagcaacagtaataccccgcgttaatgaccatgatcctgccattactgcctctcctatgaactcatcttccactgctgcatctgtgagtgatcaaccatctgaaccggctgtcacaacacctgttgctccataagctacccatccaatggtaactcgtgccaaggtcagcatcttcaaaccacgagttttctttggacaatcgaagtgggagtctcttcctagagaaccaagtagcctaaaaaaagccatcaaccatgctgggtggaacaaggctatgaactcagaaatcatagccctcaaagccaacaatacatggtacctggttcgtgcaacacctggacagaatcttgtgggaaacaagtgggtttataaaataaaaagaaatgttgatggatctctccaaagactcaaagcgagattggtagcaaaaggatttcatcaaaggcccgggattgattttggtgaaacattcagctcagttatcaaggtctcaacagtccgaatcgtcctaaccttggcagtaactaaaggctgggaaataaggcagctagacataaacaacgccttcctaaatggaaaaattgaggaagatgttttcatggttcaaccaccgggttttgaagaacctggaaaggaagattatgtgtgcaaattgaataaatctttatatggtcttcaacaggctcctagagcatggttcgacaaactcaaagccacccttgtaacatggaatttcagacaatcaaaggcggacaactctctgtttttcttgaaaacatccagggccatcatccttgtacttatttacgtcgatgatataattgtcacaggaaacaacatcagtgaagtcaatagcttcatcactcaactgaacaggttattttccctcaaagatctcggtgctctacacttctttcttggaatagaagtacacagggatgattcgggtttgtatctcacccaaactaaatatattgaggatctactgtagaaatacaacatgaccaacataaagtcgtgtcccacacctacagttgcaggaaaaccgatgtctgtatctgatggggagccagtgcacaatcccactatctatcgaagcatgattggtgcattatagtacttgtgtcacactcgtcctgatatagcatatgtggttaacaagctaagccaattcctccaaacaccgacaacaacacattg

SEQ ID NO: 227766 - DNA, 3086 bp, Cannabis indica
tttttttgccttgaaacctttcaactaccaaatactctgttcttcatgattctatctacctcaactacactcaaatgtcgaattctgttatcttccaaccatttctccgatccaacaaaatcatttttaagttgtttttctgacatcttcaacactttgaacccctcacttagttttggaaagaagccttctggcctcatacaccaagacctaaacacaccaaacaaaacctctaaatcactaccgaatctctcaactccaccatcataaaacttcacgctgctcaaaagaataccattgaatatcattctatcaatcccagaagccagacttctccacaccccaatgaagtctttcctgttcaaattgacttctagcactgacattttcccttgcagataatcaagtgccccaactaaagactttgaaacggtccaaccttcctcacttttttcctgccactgcctcttgttcttcatatagtctcgacatagagcatcaaaaccccttaaaattacaacatatagtttttcaacccactccattcttaatgcctccaacttttcagtctccacatcaaatataccattttcaagatcttcaatcagccctttgccactctcgttctcctcagcttgatcaccatgaattgatcccaattccagaaaaaacaggtcctcgcaccattcccttagtacagattccagtttacgagcagcattaatagatgttgccactttgattaaggcttcatcattagtcaaggcagtcaaaccttcagcttcttggcacctgaaaagcaagcaatccaaaaactttattaagataggggcaccagctgatctgagaaaccttgacctgagggatttcttaggaagtgatcgacaacggttaattatagctgataagtgccgtataaaagcactagtaattggaggagcattataatcgtcagggttagatgaaaggtttgctccctgaacctttattgtccaatttttctcgtcctcacaatcatttttcaatttatttagtatttctcccagctctatctttgcccaaaggtcaagccagtcaggccgatcactaaaaacagagaatgaagaaatcttctgcatgctctcatcttcctggaaggaaaaagagactccagaatgctctaacagagacttaatctgtttatcaaatgatatcattaagtcaataagatgaagccaggatgttctagcctgtgattgggtatccatatcattctcttcatcaacctgtgcatcatactttgggaaaatttctttagccaagtaagttgataaggaagatacattagctgaaatccattcttctctgcaactatacccggatagcatagcttcatcaaccagtggttgtaataattcatccatagagtctacataatctctagtcattttatagactagggcaaaaatgaattctggcttctcaacccagtttgagagatgtcgttgagatgccaagaacattggatttaccagctcctcaatcacccaaagtggctgatatatagcaacttccctactatagccttccagttgccgagattttcttcgtcgctgaagctcctgtagactgcacagagcaaaaaagttttcacagtactggtgtttgaggtccccttgcattgtaaaaagaggattgaggattttggctttgtttggggctgccgaagtcaaagatgatagtgaaggtggccacccaagggaagctagaagtgctcgatgatctgcaattgcctgtggtcttaagatggccaatgctcgatctactctgtggtcgactgctgaaacaagacgcccccattgaggctgtcttttagtgactgaagttaaaatatcttcagtcagtttcagagttttgatagcacgtaaacgagtatcctgtattaattgagaattcaagaaactataattaatgacctgatcctgaaggcatgatgattaaaaaaatttattaatgtaaacaaggtttctgtactcacttctgagtcttgtgttgcataatacttctttaagttttttgtcatagttgaagatacagcatcctcaatgtcaccaatcagactatcaagcttcaatgctgtttctgaaagatcaacagggggtaaaaaaccaattaaaaaaacaacagcataagaaaatttgacagagaccatacttcattcacatcacgattattataacatgtattccgatgaaggaaaagcttatatccaaaacacagtaacataaatatatatattcacagcaaaatatatatatgcatatgcattactacaattcatatgactagcatatgaattgtggtgcaaaatctcatctgagttccatggtcaatcaactgaagtcaataccaatgctaagagaagaaattggtcctcaatatgtatgtttacgaatattatccatcatatgtattttattcagaggcacccagccacctgaacacgcttatcttttatggtaggtaacatttgatttccataagaacttacacggtttgaagctcttagtctcctacaaggctttttgctccctcctaatgtagagacttctctataagtcatacttccttgaaaatgaaaattctagagcgtagaagttagaaacgcactatacaagcttccaaaatctcagtctgctaccattacaaactttaaaacagacaagatctaagaattcagaataacaatcaaagataaactcacgaggcctgacctaaatactactttcattgattttatgccaaggcatttggcctaagaagaaagctccataactttagatcccatcctccatttatatgaatttgggtagccacgtccaaaagccactatatgatctttattaaccacctggctgttagagttattattagagtaatttgcggcattaaatacttaagtttaaataaatacttaagtttaatttttaacggtaataatacttaagttataattttggaacttctgtaggtacctagttaaataaattactacgtggcaatccctgattggtccaactcataaaatttttattattttaaaaaaa

SEQ ID NO: 227767 - DNA, 635 bp, Cannabis indica
atctgagaagactataaattaccttagtaaacctgctattgcatagaaattggtaataggaaaataatcatattaaaccataatcaatagatgcaattaaaatcgaaagtcttagcttttattcattgttgattcctttattaatttacatgcttcttactttcgttgtttttcttgtttttctgattataaattctcttaaaaatttatttagctaaatagaagtaagaatttaattttaccatacttaactacaatcctcgtgggattagtctcactcttggtgagcattacttgtcaaaacgacacatatacttacgtgttgtaaattaccacaacacatacaaagtttccagggttcctgaggaggacaggaatattgtcgcactgacatcaaaagaaaacatgcgccaatacaacctccatttgttggattcttccaaaaaagctgctcgacccaaatcttctaaacccaaaaaattagcccgaggaaaggagaaactaggatgcccccagaggtctactcgtttcttaaggatgggatactgcaactaaacttttaatattccatgttgtgtgaaaaatttaatgaccagttggctgtcaaattgagcgccatatcggatactattttt

SEQ ID NO: 227768 - DNA, 2841 bp, Cannabis indica
caaataacattattagtccaaaacttgagtttttgtcaacataaaaataatcactatatatagaacttctctttcttttgattcataagaaatggtggcaagggaattcataaaataaatggcaaagaagaaaaaaaggatagaaagtcataacataccatacattaaaaaaaaccatagaccatagatattcaagttcaaacaaccatgccatccaaaaaacaaggtcaaataactaaaacaaagcacactaacacatagagagtcaaagacactaagccttgtaagcacactaaaaacatgaaaaatgattctaaaatatgatgcaagtgactaagaggtgcttgaggttgcacttcttcttcttattcactagcactagaaagcacttggacttctccatgagcttgtgaatcgtgtttagagtaaacacattcatcctcctcttcatcatacttgtaagacatacccttatatgtgtttgcacctaaaacgtcagaatccttgagttctaggacctcagtttcatcttcgatgagaatgcctagaagaggaaacaagtagctaatgagagcaccatagggtaaggcttttcttttttaggcttgtagacatcattgatcgttctaatgatgagatagcctaagttaatatttttgctttggacaaagatgttaaaaaggagaatttggtcaagtgcactaacttcatcttggtgtccctttctaggagctaggttgttattacatatgaaagagtttatgatttttctttggagagtgagattgtggcattttagtttatcaagaatatcttctcctacacaaactctagttgaaaaaaaggtgtggttatagttggcatcattcctaattctaggtctagggtcaagtaagataccttcttttggggcatctaggagttcattcaaagaatcaatggtaaggtaaattttactcccttgatgattcccttgatactaaggattacactttcaatttaagcacggaaagctctcactaccttagggtaaatacttatttaaatgcctatcaaggtttcccaacccatatctttacataaattgctaaactcaacataatcaaggatatctagatcacatttcttaccatagagtatgtctctttttgagcagtcttcatggaatctagtggcaaatttcccatgagagaagagctcatgcctagccgtggttctttgctcctcttgttgtgtagatgatcttagctttttttcatgcctagatgaggaagaaaccaatgagaaagtgaagtgattaagcgagtgatgagatttgagaaagggatgaggtttgagaaagagataagggaaatatgtttagagagagagaatgaaggcttccatttagggttagtagatcagagtggggagttgtaagtgtttaggataggttttatagcaaaataaaaggaatgaaatgacctaaaaacccatagccacgagttcctataaaaacggtttaccgttttctcagtacagtggctgaaaacaaaaaatgtcataaattggttttcacaagcccgtttgaccctaaatattttctaactcttaaaagatgataaaattaaaatgctcaaccaagaaaatcagaaaaatattgaaaataacgatttatggtagtgctctctatggaccaactttatgcactttgttacttgtgtgagaacatattagtatttatgtctccttttaccatatacatttattttagttatgtattgacatttggacccacatgggtgtacttcattgtccacttggtgtggagtgctcgctagttaaaactaacaagtctgtttcacatctttggaattttttaagcattataacttagctcattccatatcatggaccatggcagtgtcctccaacaaccctcgcagtagcattaactcaatttcgagtaaaatttaccagtcctatcttgtgagctaattttagacctaaacttcataattgagctatggctgtgaggcacactttgatttgtcttgaaattatctttctaatgcaagttaaaccatgtcatttggataaaaatgagagagtttatgcctatttttactgaaggcagtttatgttgtcttgtaccgattatgagcactaacatggcaaaacagcagtggtcggccatgcatgctctcggacctctcggagcgtgttttgactctttttttatggtgagttatattttgggagtctcaggacccaaaaacctcatttcgatgtccaaacccctaatgggagaccactgccaccagttggagttggacaatggcagcggtcggccatggcctgtgggaagtcatgggtggtgtgtctcacttgtaattgatatggatgttgaaaatgaaatttgaccaataaatccattttccttgtgtagtagccgaccactgccactccattatggcagtgctatccaattttaatgagcactgctatttccttatggcagtggtcggatatggaccttataaagtcttaggtgatttttctcatttgtatttgataaatatctattagaaatataacttcgccaacttcttgtgtaggggccgaccactgccactaggggtgagcaaaaaattcaaaaaaccgaccaaatcgaatacaccgaccatctgaacaccgaacaaacctacaccaaaaaaaccgccttcagttaaaaccgccttaacatggtcggttttagtgtcaatggcaaaccgaccgattaaaccgagaaccgaccgaacatacatattatatataatatatattatttttgtacatatttaatagggatattggcggcta

SEQ ID NO: 227769 - DNA, 3408 bp, Cannabis indica
aaaaagttacttttaaaaatgtagaaaataaaataaaaaatagaaaatgtcataatgtcagaaaatgctacatttagctaaagtgatacgtcaattagtatagttactattgtaaattagatgaaaaaagtgaatattattgtaaacttctcaaaaataatatcttagatgtaatacttgggctggtttatgggccttcgtatgatccaatctaagccttcaaaagcccattatcgtattttgtcactgtaatctgtatctgtaatctcataatggcaccaaaacctttctaaacccaaccatggcgatgatagttcctactctctcctttcaaaacccctctctttccagtctcaaaagcattggagttcgatcccgaacagccccgtttccctcttctataaccaaaatccaatcattcaatcccattcaaactcataactttcatggtttttcagggagaacacctgaactcttgttcagaagaaatttgagggtttgcgtggctgccaaggaggatagcgatggtggttttgatgaagctgagaagcaggctagaggggagagtactatgcctgagcggttcaggtacctgacgaaagaagctcccgaccctcccatgagatggcctttctttgtaggtagaataattacttatattctttctgtttggttgttgagaaaatataattgcttgaaattattttttgttgaaaaaaaaagggtgaagtgttgaactttagggtgttcattcgttttcagctttgcatattacctgtaatttatggcaattttgtaaaagattgaactacttattgatagcattttccaatggaagagaatagagcaagtatttttgcaacttaagaaagaaaaaataaaattggaaatagtcatttttttaatctttggtgactgagataatcttcatatgctaaggttcacaaatttattttggaaactacgggtagcatgaatttacataaattatttagtgtggcaactattttgtttatgtgtcttagtttttcatatgataaggttcacatattttttggcaactaagaaggaattcttcccaagtgtttttcctcattagcaatcctcagggttggttcaaaaaaagaaaatccttaagagttgaggaagaacgtgataaattttgatttgttagtcatctatttgattaaatgggggaaatgatgaatgtatttgtgcgtgtgatttagaataagagagcagaggaaaacaagcaagagataagtctgatcaataggaaagaaatgtattatctgtgaggttcttgatagtaggatactaatattttaaatttagttttttttaacctgtttgatcctgctaattaccctataatctagaagatgtatttattgaattggtatttgtttatttttattgatggtatcaaaaacagtagagaaattattccataatttttcttggtgtatctcttttgctgcttctacttctttgtgcctaaggttttattctttcattgtgttgatttttgatggtgactgtaaagtgataacaaatgagttctttatatttattatttgcttggggaaagagaaaatcttacatatcttcaaatgttaaaaggggttttttgttgtagaaattctctcacaccatccaaactagttttgtagatataacttctcttatgaaacattgatgtgtgtccaaatttcataaatcctaagtgaagcaaataacagctcatgagttgtactcaaacattttatccctggttttagactaggaacatttctttcaagaaggattgcactaaattattgcatatgaagatggcctaataatcaactgttactgtaaattattttgcagcggtggcttttctactctatgcatggagggcagttttgtttgagttacataattggaaaaaggctgcaatcgccattgttcattttctaggatatctctccaaacttgcattggcccttatctttcatttcttaggtgatccaatcacttcggttatcagatccattgagacgacattttacagcattcgatcattctactctggcattgttgcttatgctccagttcccgagctgaccacaattatcatactgtcatcaattgtccttgctattgcagaagccacagttccagattccatcaacagccaaccgtatatcctcaccttatctggcttaattggttatgcagctgtaggaggctacatctctgagcctttcttctggacccttttggtggggctctacggattttctagattttttaagaagagagatgatgtttcatcgtcattgcctgcagtagccgttctggctgccgttggagaaccttggattagagttttggtgattggttcatatttggctttagcaatttatcatcattcgaagaaacttcccgaaagggaggaagaagcagtaatgacagctaggaaacttccacttccgctgctgggtgttgccttagcgattggaattcgtactgctgccaagtgggctggttaccggcatttgacatggatgatagtatgaactcaaaaaataaaaatctatttgtgatatcccattctatctcaaagttttaaagtaggttttttttctttctttcatataatattttgctttttgttctttaaatttttctaagccgcatgtacaaaagtggataatccagagatccttgttgagtttgtctcccatgttattcgagctaatcatttttgtattatggtcatatttgtttcagcattttactgttttcttgataaatctgtatgttatttcaagcatatctaaaatttggaagaaaatacagtagtagaaggttccttttgaacattattaagaaacatgatcaatatcatgaatatatatgtagaaaaagaatcactctccatttacaagatccaaattaaccgtacttcttttggctagagtaagaaaaaaaaattgatgtcctctacgtgtgagaagagaaggaaataatatatgaatatgagaaagttgcgatatttgtagagaagagctctcaatcatttgctttaaatgtaaaattttgatgcatgcttcttctttcttcttcttgttattgttgatctcattgttgttagaggaaatttgattgcatacccactttactttacttgttttaatttttacctttaattttatatcctttaaaatatatctacttttatagatgatattcctattatatcctttaaatttatataaattatgtgttagacttgagtggagggtgaggatatattggacaaattactcacaaaagtgggtacatttgaatgaaatataatatgaaagtatttttgattgatagatacaaaaagcaagtatttctcaacttttcccttat

SEQ ID NO: 227770 - DNA, 3717 bp, Cannabis indica
ataatgattaagatcgccgaagtgagaaataaagacataccctgttggattacgtgatggagcccatagaacacatatcactaccaagataatataagcgagcaaagtccagaaagcagggatgatccatgctcttcgccacagttcgctcaatgggtcagtggcattgaagtacaactggagcaacaaaggtcaatagtttaaacctcaactaggcaactcacagaataaatcacttttaagactgaaaaacaatagaaacaggattttcatatttagaaacttgcagaagtcgttgtcaaacgaccccatttcattaaaatcgtattagaagtataaactccaacaaaatcaatatatatatatatatatatatagatatatttatatatattccttgctattatcttctttttagttataagacagtaaaaaggaaatatggtatcttaagaatataaccacttgctatttcctgctagctataaggtgtaatttggaaaaatgaaaattaaaggaaaaatatgcaggatagaagtgaaaacgagtaaaaacctcataaccaatccaaacaacagagagaagcactgatactgcaagggcattggtaaactttctgtagagctctagtttggccatacttcttcgaacctgtccacaaaagagtcacatagtgattttcacaaatgcaaaaaaagaaaggggggaaaatcagggaggaaggcatgcagttcagttagattttgattcaagtacatgattatatcattcctttcagcaagtttgtaaagaaacaatattctaaggatatgagaataaaccaaggaaattgtacttgatcaagtgttgagaaacgagctcaagcagtgaattaagtttttgttttctttcaccaaattattgtggtacttttataacttccaaaagagtttcaaaaggaatgtctgatgcatactcaatcctttttgaatgacatatttccatcttttgattgtctcaaactaaaagggataggaataaatatcaatctctttaaaatgtgaaggaacatcacaagtacctgaagtttctccaaagttttggataatgatgaaaatatccaaagaataaaacaagcatccagcagagctacgggtagcaccagaaagagccttgctttcccagaaaaatcgttgatattccccaaatgttcaacaagttcgagtgcttcagaggccacaaaatacgtcaaagcaaggagaattaatttagaggttatgctgcccagagttggccgtacgacaccatagcccaaagaaaccatcaagagaagaagacgggagattgtcttcttcacagcagtgagggttactgcccatatggttattcccattggcctgcttccagttgaattgaaatttgcatactcgaaataccagagggccatctcacacattccaagagcaatcacagctgttatatggtaatgcaattggattatatctttccaatattgtacaaagcggagaaaccaaacaaggcctagaacaaggtaggcgaaagacatcaagccagaaaatgtcatcagcggagccatcttccccggtaggtaaccatcaggattcctccacactgttcttccactgatgaccgtgccaatgagttctggatcacaaaacataaaatacagataatacattccagtactgttgatctcaatagtctgaatgggcatggtaagctcttcatttttcccttcaaagaaagcctggagtcttttaggtccgtttgggttatctagattttgatgaatgataacctctccaaccttgcaggaactatcctttgcaagttctggagtgcaacacaacgcatccgaattcaagtaagaacccccaatcttatccctgtctctaacctcaagtattatagcctcaactaagccagtcctctgctgcattgcattcttcagctcagcagaatgtttcgttcttcgaaaggtgacagattcaaacctaagtatagaaaatgtcattcaagaaattaaacttctaacaatatcatttgcactacaagcctctttgagaagtttgatcaactacaacatggagacttttccattgaatagaacaattgatcctcatcctttattccatattgaaacagaaacaaaatacaaaccatacccagtaatttctaaaaatcaaaattttccatgaaaacaaatataaccagtacataacagtcaatctactcaatccaatcattaaatcttagcattagcatttaaagtgacacttcaaaaaagtcaactttaccaaaatccaacaaaaaatacagaaaataaagaacaacccacttactattttcccgagaaccaaacagatcaaaaatacacacttgcaattggttcctaaaggaaaaaagattgagttgttacctgatgaaggacttgccattaatgggtttatcttctgaaacgagcttgtcattctcagagcggggtttggaagcatagagaccctcactaccgccatggaagaagaatgaattggagcgacgaatgaaagattcggtgtggtattcatggatcgaagcacccacttggaggattgagcagtagctcaggtaaatgaaggtaatcacgagtattttatacccatttgggagatcacaaccaaggatttgatgattcctccgagtctgacccatctttctctttgtctgtttctaagtttctctcacaaagctttgttatgtgttagtgttacaggacgtcgtcgtagatattagaatttgggtactaatttggtgacaaacgacactcaatctcattctctacccaaatttaatattttctattccgaaaaattacttaaaactttattattattctattattagtaatacttaacatacaaattaaatttttagtagtaaaactttttaaatctcacttcttgttagttatttatatttttcattcaaaaggttctgttaagtgacacaatggacatgccaatagatattagtggcagcaaaactacctaaactctataattagtgacacttaactacataaatcgatttttcgtggtaaaatcattcaaatctcacttctgttagtaatttactccttccgtccaaaatattatattcagtgtcatggtgaacatgccacagtgtacacaaatatacgtatagtaaatttttaatagtccacataatttaattgattaaatattttagaatttttcctcaaaaaaaaaacaaaaaattgaattataaaaatatattttttttctttttctttttgcctattcttctctttcttttacatttttcttcattgtaagcctaatttccacccgcgctccgtctctcttccattctccttctcgcacaacttctgcaagtcaccttcggtcaccttcggccaccttcaacccaaacgaaccccaaaaatgacttcctaaccttacacacctaaccctttagcctccctctaagtcccgagatccaacctttctttgaagtttctctttctcgcctcaacctcgccggatttgattctccttcttctgcaactcttcgccgataccacctcagttggaggggttcactgggttcgctagtgattgtccctgggttcgtcgtggtttggtgggtccgtcgcagagaagagaggaatggggaagggagatctggttgttccactcgtagagcactaatagagcc

SEQ ID NO: 227771 - DNA, 2364 bp, Cannabis indica
tatatatatatatataaaaaggataatctaaagttatttaaccaatttttcctttctacatactaattttttattttgttttattttttgtttatttattttaatttattattaaatacatataacaacaacttatttaatttgttgttggaaaatttaagagaaatattttatgttttatatttaagtgattttagtaatgtgaaaataataataattaatattaaataatctaatattaaaaaataatcaatccaaaataattaattcaattcgtactattacatattaaattggatttgaactatcctaatgaatggattgaatcctgttgattccaaagatggtcaattgacgtggagtcaagtaaacgacaataaaaacaataaattaaacgacaataaagacgataattatagcaacactagattttcatagaggttcaaccctaatttctatgataatagtttactcatcttttagttgtattatctttagttctacactcaagattacaaggatagcttaagaaactcatgagggcaaagagaattacaaataatttctgcagaatttcctacctacaaatgaaactgtgaaccccttccaaggagatggaaggctcatacttataaatgaaaaaggaatcattcaccattttatcgtctcaatctgcacccaaatttgtgtccttaatcagtgagatttaattgatctagattctctagcaatctttagcattaaatgaagatctcgacttggacttcacaatcccagggggagcccaagtgtatgtcgctcagggtatacttgtactcctaaatcagtgttttgttgtcttatttccttcttgcaaggcatttcttgtctttcgagtaaaccctttgcacaagagttgttctactgggttatgagtgtattaagataattcttcctctataacctgatggtatgctgcctaggtgtaaacttagaaaggaaatcttgaagttgttgaaatacttagttaaattcccatgcttaatcttcttttgaaaggtctcgaatcgttgagtgcggaagataactcgatattaaaaaattgcactccaaaatctactcgagaagcatgagcatgtcgcccaagttataaagccaatacatgtgtgcggaatagtgcatgctgcccaggtgtgtgctctccaccttggcaccccgaacttcacttttcttcttgcggagcgtatcataccacttttttgcataaggtgaattggaattgacgaattgcaccccaaaaactagttggaagggaaaggtatgtcgctcgggttttggaatactacctgggcggcatagtgtatgttgcccacggtttgaagctctaacttgggcactagagacttcactttttcttctcgcggagcatattagaccacttttctgaaaaatgtgacttggaattgacaaattgcatcttgaaaaccacttgagagacaaaggcttgtcacccagggtttgaattaccacatgggcagcgtagtttatgttgcttacggtttgaagctccggcgacatagcgcatactgtgcaggctattcatcctgagcttctcagattttgcttcttgtcttctacggggtgcacttcgtagtcctccttcctgatgatgtgtcctctctttagttacttgtcacaccatttagataaaatattgggttacatatccaaaatatgaaatccgcacttagtacggattaaatgtattataagcaaaataatgtgaattggatcacataaacacccttaagtaacattatataaatcaccatatccctatactttgtaaaccagtatttttatatgataatatcaataattatgaataattttataaaggctaattaagattgttttgcatgaattttttaaggtgttgaaattttccgtcgaattattgagattgttgaatttaaagatttttgtttaactctgtttaattttactaatggaagcctagcatgaaaagaagttcagataacacgatttggcacatattaaagttcggaggaacaactaagtagatatcaaaatttgagagtacgatttagtagataaagaaattattagtaaataattgaagcttataaaaatacacgatttaatacacaatttttatggttttaaataattcaaaaataaattttacataatgcatccaatccacagtgtttccaaaacaattttttttctctttgacaaaataaaaagggaaacttacaaaaatattagaatttagattaatttttacaaaaatactatcacacggaaaagttttcaaaaataccgtgtttttataaaacatcaataaaacacaaaacagaa

SEQ ID NO: 227772 - DNA, 1567 bp, Cannabis indica
agctaatgaaatttcttatagcgcaagaaacggcaccgtttcaactacatcatgctaaaagcttggaccgaagttttgacccattcccaagcccattaatccagaccataaaatctaaacgcggcaaaagcttcttcaaatatctttttttatataaatttaaatttaattcaatttaattgtatttaatgaagtttattcatttcctaatagtaattgaattagtactaattagtatatatatatatgcaaatactcgatggaaatccaaattattcatttctctatattttttcttctgttagtcactcttttttgtcactaacttatctcatatggctattcctcaagttatacatggtccacatattaatatatcaccatatgaatgtagtagtagtagactaacagatgaaatctttatatttgaaattcacttatttgcaaatttcacaagagaatttacttttttagacgatgatgaagataatttgcaaacttctataactttaacagatattgtctcacttatttattttgaagtgtttacagataataacaacactcacgctatagctacactaaaaaattcgtttgcatatacgcttcgtcttccttcttccacattttttctaatagatgaaattatcaattacagactaagaacagaatgggatgataattatttgagtgtgagagtcgatattgatgtttttgtcgatgaactacctactcctcgggtgacttttaattacaatgatgaagaatataatagatacagaatcgatcaggtaagacctcatacaattttattattatattttaaaaaataaatacgtagattttttgataactttctttaaataatattttgatctcttttatttttaattttacttttttagactcctgaattcttaacctcagaatataataatgacgacgacgaggatgatgatagtgatgttgacggtcttgtacatgatatgaataatattcgtattaattccatggcagcaagtaaggagtcgattgaaagattagagaaatatattattaaggataatcaagaatttatatgttcgatttgtttggaggatatgtcagttggtttggaagttattaagttatcttgcgaacacaaatatcatgaagaatgtattgtgaagtggttacaaatcagtagattttgtccaatgtgtcgatctaaagtagcttaaaaaaattaattattaattagtgactattgtgaaaaatattgaagtcatttttatatttgttttattactcaaagtttttaagataatactcataagatgaatcaagtttgtttatcttatattgtttttgtttttatcatacatttttatagattttgctagttaacattggttgtgttttcatttaaatttatcatcctataattagggccgatctaagcattttaggggcattgtgcaaaattttaaaattggactctttaaaaaaaaaaaccgtgtacataaaaactataattctattactagcgctttttttaggattctttcataaattttttatttatgta

SEQ ID NO: 227773 - DNA, 1398 bp, Cannabis indica
cactactcctacgctttctgctagtgtgcactgctgttgtctggcgtgcgccgattgtacactctcctatcgtgcgcacctcgtctcttccaaatccgcctaataacaaaaccatcaccaccttcgttagccactctaataataaggctcatcatcacacagagcccaacgagatcttgggtccaagcctccaagctatgtccaaagctcgtgtctacacagatgtcaatgtccttcgccctaaagagtactgggattacgagtccctcgctgttcaatgggggtaaaggttttgaaccctaacgttacagcctttctttttcatttctgatgtgtttggttgccgagaaaatagaatccgttaatcttttagctcgttagattaattcattacgaatgatttgaatcaagatcgtgtatggatgtgactacaagagatttttatatatatatatatcgaaagaaaactcttctgtgttattccgtttcggatctcttcctctgtattataatctgatcgtcgattccatttgagggatttgagaaagtatctagtttattgtgattcatgttcttgaaatattatttcattgatatggtatagtttaaaggggaggtggccagttctgctccccaatcccataattttttatactactttgagttttgagtatcctttttcatatattttttattgtttgattgcctcttttttaattctgcaattcgattaaaacttgcttttctgtgtgctactttcagtgatcaagatgattatgaggttgttcgcaaagtaggaagggggaaatacagtgaggttttcgaaggcataaatgtcaatagcaatgagcggtgcattatcaagatccttaaacctgttaagaaaaagaaggtgaagtattaaactttgggcaggttgctgatgaaatttttgttaatatatatggtttgattacattgttttgttgaagttgcaataatctttgtggttgagaaccaaaaacccaagagaaccttgttagtgtttgaagttaattttgtttgtgaataatgtatctgcagatcaagagagaaataaaaattctccagaacctttgtggaggccctaatattgtcaagcttctcgatattgttagagatcagcactcaaaaactcctagtttgatatttgagtatgtgaacagtaccgattttaaagttttgtaccctaccctcactgattatgacattcgctactacatttatgagcttctcaaggtaattcattcagtaccatttatttactgcatgaatgtcttgcttcatttagaactagaaatagaaagaaaataataaatcaaacaaggaaatgaaaatggtagttttttacacttgatgtttagctaaatgacccaactt

SEQ ID NO: 227774 - DNA, 3109 bp, Cannabis indica
aaaaaattgaaaaaaatattctaggtgtgaaggttgagtaagaagttaatagatgaaattcctctaaatatataaatgaatgaatgaggagtgctaattataattttcgcgcctgaaaatatatgtcgaaataattaaaggcgaaaactctctctctatatataaatgaatgaggagtgctaattacaaaagcaatcgcaatttttgcaaagttatagtgactttaactaagcttaaaattaaagggttgcatttactgttggtgtagtggtagggattgcctttacgagtatctttctctgcttgggtcaagatttcaaaactccccacaacccctctcgaaaaggattaaagtcttggcccttctaaaggttaccttgtcgtatgtgatgtcatctgtatgatagaaactatttaggtagttacctagttatcgatgacttaaggtgaagtataagcccttatagttgacatgtgatctttagaattgtcaaaataattgaagaagaatagaagagatttgcaccgtaacaaggcacttttgataagtgaaacccatcttaaataaggagtttagttgcaattacttactacataagtcttatgtatcatatttgaatgtaaatcctctgtgcatatatcattactcttataaaaaaaaatattaccaattttcctttttgttctttatctttaaaagactttagcttttcaatcacaaactcctaatgttttttttttttgaaatgagagctgcaatgcaacaaagggatttaagctctcttttcttattaagaagcaaatcaacacaaaaccattaatcctacatattaaaactcagtatatgattatgaatataaacttgagtaagagaaaaacattaaaaagaaaaattaaaggatgaataattcattcccaaataattaacattacaatgacagcaaaatttttgactcaaaagtaactataacatgttctaccttagctaccttgaactaactttgacttttcaaatttttcaatcacattagccacagaacagaatagtcttgaatccaaggctaaagaacaaaccactgactctatggatacgagttcttcatgaaacccgggatgcaacaccagagccgaaaagttcccatccaacactaaaccgagacatcttgcaacatcttcgagcttaggaacccaatcacaagccttcaaaccgaacaaggttgatgccttttggcaaggaacagcttgaggaaacctttcgtacttcttcagccactttcccaaataccgaatcaagctcttcatctctttcccattcaacttgctaaaggctgaagataagacaacatcatcgatattcactgatgccaatagataatgcaaacacagctcttgagaagagaaattatcatatgccaccatgagcaaaaccgcagcctcctttgcgaggatagaattttctaccgagagagttttgtcggtcgctttctccatagcaaacagtgcttgtttctcccattcgtttcgaacatttagcatggtattatcactagcagcttttttggaaaaactaaggaaatacttcaagatggcgagcaactctgatgagccgagatcagatgcctgtttaatgcaatgacaaagtaggtctgatctctcacttgctacgagtttaggaaccaaactaggataacaagaatttacaacaaggccatatgaaatcaaggtctctaccaattcccaaatctcaaaaacaatgcaggcttccaaaaccaaagcagcaacatctttgcccatacagaaccctactttctcaactaagaccttagtatacccactgttggaagaagcaaccctaatcgaaagtccaagtttctcattaacattctcaaggaacgacttcagaatctccaaaaattcctctttagcaaaagtagttggatttttgagctttccctgaagcttagtaaagaaatgcttgcacaagtcaataatctcagcatctaattgagagattttccatccggtaactggaacagcgagattggaggcacacaattcactatcttctagattcaaattggggaaaatggaatccgggtcaagaacaactgggtaatctggtggagtagtgggtgattgggcactgactgtggcctttgttatcagttcaagcaaagtcattgcagcttaaaatggccaaatcttgaactttcccaaatctgtattcattcaataaaagaaatgtatgaagtcaaattaccattcaaacccaaaaatttaaaggcctaatttggaatcagtaattggataaattacttaattgaaaaactatagaaatggaaaaactaacaatagacaacaatgaagaatatggcaagatttaaccacttttaaccttaatccctagtaaattatttcaacattgaagcatatctctcttattccttatctcttacctattaacaaatgtatatctaaccttattttgttttgcttttaacagattcttgtgttaaagagaatatacccaatgaaaaagttaaatttaacagtattctatattacgaatttactaaacacaatcttaacagcattaggcatccgcagcacaagttacaaaatttacaacatatccatgaacttttcagaaccattctcaaatggaagaaatatgaaattcaaattaactgaaagtgtccaattacctttatacagatactttaattactaaaaatatgactacaacagtacaagcacatttcaaaaacactaactatttttcatcttgtgaagaatttttcgaaaaaatattgacactctcaaataaattttcaagcataaaactgtatacaccacaaaacaaatcattattcttaagaataggaatcaatcagagaatgtctttgaaatttagaaaacatcgtattcaagctaactaatcagattggagataaacagtagcactattcgaaattcaaagctaattcaatacgaatcaacaaaaaaataacataataaaacaaataatcgaaggaaaaagaaaattcatacctatgagtgaagtagtgattatagattttcagtaactgagagagagagagaggagaga

SEQ ID NO: 227775 - DNA, 2399 bp, Cannabis indica
  modified_base (2315)..(2315): a, c, t, g, unknown or other
ccttggtgcgtcattggtgacttaaacaatgtgacaaatcaagatgataaaagaggaggaaatgcttaccccgaatggcttaataatgatttcaatggtgcacttgctgaatgtaatttatatgattttgatctctcgggttatccttacacttgggagaagggtagaggcacacctaattggatagaaatccgtcttgacagagcccttatgaaccaaggatggatggatttatttacttcagcaaaactctttaatttggactggtccagctctgatcattgcccgataatgctgatcccttttactgaagattacactgctgcaaagaaaagcttcagtttcgaaaatgcgtggctgagagagcctatctgtactcaaattgttcgggatgcctgggaattctgtttgagtggcagtataacagataaaataaaacaatgtagtttggttcttgctgaatggggaaaagattatacaggcaacttcaaagaaagaattagcaatctaaaggctgagattcggaaatggagaaatggcagagatcttatttccattgaaaagttcaaagatgcagaggcaaagctatttgaagtttatactcagcgggaggtgttttggaagcaaaggtctaagcaattatggcttagagaaggagaccaaaatagtaaatactttcatgcctatgctacatcaaggaagaaacataattcagtgactaaactcaaagatgcacacggcaactggatcgattggaagaatggtttgtctgatgttattcttaactattacaatgatctattttgctcttcagcaactaatacttcccctgtcacaattaatattccttctatggtcacacgtgctcagaacgaatcattacttgctccggtatctaacgaggaagttcgaaaagatcttttccaaatgcatcctgacaagtcgccaggccctgatggcatgacaccaggattttaccaacgctgttggagcattgtaggatctgatattattaatcttgttaggagtttcatgagaactggagatttgcctcaaggtctaaacgacactaacctggttcttataccaaaagtaaagagcccatcttctatgaatgaacttagaccgatctccctctgtaatgtcgtgtacaagattatatctaaagtaattgcaaatcacctcaaagaagttctgccacaactcatatcaaccaatcaaagtgcttttgtcccggggaggttgattacagataacatcatgatttcttatgaggtaatgcattacttgaagagaaagagaagaggtaaagaaggctttatggctctaagccttgactttagtaaagcctacgaccgtgtagagtggcaatttctgaaggatatgatgtgtaggatggggtttgatcatcattggatacatctaattcttagttgtgtctcctctgtccgatacaagattgttaatagtggtagggagatgggccctatagtgccttctcgaggtatacgccaaggtgacccgttgtcttcttactaattccttatatgtgctgaaggtttctcagctttaatcaaaagctttgaaagtgccggatacattaggggatgtagagttgcaaatggtgccccagttatctctcatatgctattcgcagatgatagttacatctattgtcgtgcaaacgagagagaagcctcaaatgtgattcggttattgaagatgtttgaagaggcctctggacaaattgtgaatttcaacaagtcttctatcttctatagcagcaacaccagtatcgttacaaaacaaagaattggccatcttatgcacatcaaagaagctgatggaactagtctgtacttgggactaccatctttagttggaagaaacaagaaggctattttgggttttataaaagataagttgcaaaaaagaattcaacactgggaaggtagatttctgtcgaaggctggcaaagaaacattgctaaaaacagttgcacaagctttcccaagctatgcaatgtcagtttttttgttacctttagaaacctgtcgaagtttggaaggagtaatgagttctttttggtggaaatcttccaaggacaaacatagtgttagttggcatagctggaagaaattgtgcaaacacaaagccgttggaggtttgggttttagagactttagagagtacaatctagctttattgggcaaacaagcatggagacttttgactgagaccgactccctggtttgcaaaatctacaaagcaaggtatttccctgatgatacttttctaaatgcttctcttggtcntaatccatctttcatttggaaaagcattttcgattccaaggctctcattgttgcgggtgcgagaattagtattggtaatggttt

SEQ ID NO: 227776 - DNA, 1961 bp, Cannabis indica
aattcatcctacacttccccacacatagacagtattccacattaatctgttgtcacttcatttcttttatccagttgagaacttctttgattcttaaagtctgtgtaagaatcagtttgaccacaccatgaactagccttgtctgaccctcaattagcaagctgtttgaatcttgagccactaaaccaagaccatggcttcgtcctccatcaaatagagcaacgttcacattaaccttgatactattaacctttggtggaatccaatactcactccaatggatgactaaaccaaataaatttctactctaattaactcaaccagaaaagtaaatcattagaaaaatacttttataaacaattttttatgtcaatatatagtattgaaaaaaaaagcatttttagagcatctcatgaagtgaggtgtaatacctaaaaatgtaaaaataaaataactaaacttatttggtacaccttttatctttttatattgtattagaatattttaatattatttagtataaaatatatatttgatattgacttatattatattatacttcgtataaaattatattatctttaccgattctgacctaaatcaatctgagtctataggatctaagtccgaatctaaattcaagacttgagttgggattcggggtccgaagccgggtgctcggcacaatagatatcctttaatatttttctatatttgatatgaaaaatgttagaaaaaaccagtaatttctaacattaggtattgtattactattaatacaattaaatagtaacataataatgtatattactcattaatctcacactttacctgtatattactcccacactgataaaatataggtgcaaaatcattatttacaccaaagtgtagtacctggtagtttttgccattaaactttctcaaaaaatgattgtttgcaacatggactatattgagttcaggtgcaattagcaggtgataacttttacgatgtgggataacttttttctttacttttcacttagatatatatagagagagttgagaatgagttgtttgagttgtataaaaaaaataagactttctctattgttttattacttggtaatactagtgaagaaaattcttaacaaaatcttcctaattaatctaaaaagctatctaaccttttgacaatacaaaaaacagaaagatctccaacaacaaaagcttccaagttaatctaaattttgttcaaatacaaaataatggttgtatgtgcaacctatatgagactatgagagtagtaggagcaggaccaagcttctattcttaatctaaaatataaacaacaccaaccttctaacaaaaaggtgttgatacatagagagaaaacccacacaaagcaaagagccaaattagaaaatatataaagacatttagctagctacaaggtggtaccatgtttttgagccttttattacaatgtcaaaccataaaagccaaaataaacaacaatcaaaatagaagcatatgaagcaagcattttggtccggtacgaaaaagtatagggtcgtgtgggacagggcgattttgggctaagatgagtcaggcctgcgcttaggactcactttgccaaaggccacataatcatagaacaaatgcagttaactctctcctaataagcttaattcaaacacgacacaaaaagatgtaggcttaagtaatcaaacacgacacaaaaagatatagacttaagtaatcaaacgcgatacaacacaaccaaaaactgacaaaaatggttgtttgcaacgcggaagagagctcagggaatggaaggagtaaatagtaacaaaaaaccgacaaaaatggttgtttgcaacgtggaagagagctcagggaatggagggggtgaaatagccgacaaagcagaaccattgttgctggtgattgtttaagaagagcctctcactctctcc

SEQ ID NO: 227777 - DNA, 1838 bp, Cannabis indica
tccatttgacgagttgggagagggtttgtcttcttaaagcttatgggggtcttgggtttaaagatggtaagaaatagaataaagcttctcttgctagatttatttgggatttaatgaataagatagacttgtcgtgggtcaagtggatcaatttggtctatcttaaagggagagatttttaatcttataccttgaagaaggattcaagttggtattggaggaagctttgtcgtttgcgagatatttttgaacaggttgacttgaccgctgctggtcgtggtggagtgtttaaagtggtgaaactttacaacacctcgctgcaacaaaatgttgatcccgctgctgctgcaatttggtgcaatttaaatgtaccgaaacatgcatttcagctttagcaaactgctcactcaaggcttcttactagggacatgttaggccggttcaatattcatgtggctaacatgaattgtgtggtgtgtgaggttgaaaccgagatccacaatcacctttttctctgctgctaactgtcaaaccaggtggtaaatgcaatctttccatggctgggttttgaaggatggaccaaaaagtttgatggttggaacaagtggctgtgtagcacgagatcgaggcttttagacagagttagagtgatcgtgttggctgccacggtttatcatatttggaggaatcgaaacaaatgtttattttccttatgatgtgaagtataggctttacctgataaaagataggaaaggaacaagagtggagaaaaatttacttcaaagattgacttgtaattattagcttgttcttcttgttgcttctctttggagaagttcatttggttgtatcttgtagagttgatgaatgaagatcctttttttcttgatcaaaaaaacggatatatatttttatgtaaaataggaattattaaaatgggatacagctataaaatttgggggggcaaataaaactctcctttaatctaacataaacatagacttagctatatattcagtgaggagagggtaaaattatttagggatttgttcatgtatatacaaaaaagataattaaattacaacaatacttatggctggtcctatgaacattaatacaacccataaactaaatattacgaaaataccactttttctactactttaattgcacagaacgaaatagataatctcatgcacgcaaccttcgatcgaccaacccagcaacccaacacaactgaaacgaaacccaactagaagagaaccacaattaattctagcgacttaacctgagaagacaatcgagatcaatcaaaatatggggctttttcaaattcatgaaaaaaaaaagtacagaaaaactactacaaaactaaaattcaaccataaatctagtttatttcgcataaaaactaatgtcctgactttaatttttagatccatgaaatgcagatatcaaaaagttgaactgaagttccaaacaatccaactcaggtatagtccaaaaaaaaattgtaccaatactatagttaaatgtttatctcgatgtattttcgttattttccaaatttctaatagtgaatttgttcatattaaatcacgaaaacaatagtaaattcacatgaagatagagtcacatacgtggaaacactattctggttttttatgtttcataacagttgcataatattttgctaactctctgaaacttgacatatcaattattacaaactgataacgatacattagattttatcagatttgcaagtgtttcatatcgtcaatacaatataaagctctttaaaaaaattataatatgtttaattttattaatatact

SEQ ID NO: 227778 - DNA, 2437 bp, Cannabis indica
aaaaaaaaaaaatgttaatgtgatgcttggtggatataaaatgataaaagttggaatatatatttttagtaaaaaaaaaaatatttttttaattaaaatataatttcattaaaatgaattcacgttctaaatacaaaagatattgaagattaactgaaattagaaattcaaaaatactacaacagggttgataccgaaagtgtttaacaatataatgtgctacttaatttattgatcgtcttataaaaaataattaaacaataaatatcatagataaaagaaattggcagtccccaacaacaaagccaaaagttaaacacattgcaagattactacaaatgacttgaaccaaaaccataatgccacttttggctcttaacccaactaagagtctcttaaatttttattatctcaatgacttttggcctatattggtaaaaaaaattattattcttttttcttcaacaaatattattgagtataagtattagatatattaatattaagttgacctagtgctaaggtctagcgcccaggttgacatattgtcagcttgggccattgctaaacatttttcacgataagttttttcggcatattctctgtgttcaccaacaattaagatacaagtgattttaggaatcaaatataagcatctatcggtaaaaactaggactcagcgcctaagttgacctaatgcctggtcctagtgcccaagttgaagttttgtcaacctgagtcagttcgaagtatttttttcttgtagaatttttcttgttttgttccaaaaaacaagatatgagacttgaaatcaggagaaatattgttcaagtagtgagttatcctcgaggaatcaccgggcgccagtgtgcaaacacactaagcgcctaggttggcattggcctggggcatgctgctctgtccttcaaataaagattatgttctaggtatcagtcttattttgcccctaaaataagatttggatgttttcgtaagtcaatatctcatgtacatgtgtcatgtgcaagtccatcgatatccatgtacactagtgatcacctgagtgtcacctagtcgtcattagttattcattaggcatcacccgtgcataccaagtaaacttaccaagagaacttctccaaagtcaaagaataaactaatatttttcagtttcacaatgattacggtcagccggtcatgatactaataagtgtaatcagttgtgggacgagatcgagttcattatctgtcaaaaacatgatgccctccagcaatatctatggggttattcgcggtacgaatggtgcgggttgtaacttttttttcaaaccaaactccatatgtggtttttgtaatttctcaaaccgcaactgcactacgagatcttaaaaccacacagtgaaaatacagtatagtgcggtgcagtttgagcaatttacactatcatcattatcgaacattataataaaaatttaaaaatacaatctataaagttttagacaatacaaaaaaaaaatacttaataaaattttaacattataacatatatattaatcatcaaaggtaataaaataaattgtctctaaaaaataatgtaagatatacatgtattacatatatttgttcttatatgaaaaaaataataaaaatcatattgtaaaaattggtaactttacaatgtatagtgcggtgcgatttgaaccgcaattactaaatttaaaatcgtattgcaccacactctacgatttggggaaaatgtaaatcgcagctgcaccgcaaaagatttcaaattgcattattttatgcagtatggtacggtgcaggtagtttgatgaacacccctaggtatgtacgactaacaaccctcaagagcatgtcgcacctctccaacctgcaaccattgcaggacggttagatgtgattgttggaggcccacatatagctggaaacttgagaaaagcattggagaagtacgtacggtcgatgcgccatgagcattgtgtcaacatgttggaagttgaggagagacctcccaagactaaatactttgagtgtgatcatatcacatttgcagagtctgacattactcatgtatggtaccctcacaacaaccccttggtcgtggagatacaaattgccaacatgatggtagcaagagtgatggttgacgatggagagtcatccaacatcatgttcgaataaaccctggaacgaatgagtttgtctttgaaggacttggagccatacaagcagctaatgtatgatttcagtgaagcgagcattgctccgtgtggcaagatcaaattgccactgactgtggaaaaatccccacatactgacactataatggtcactttaatagtggtcgatacaaaatctttgtataatgcgatgacagggaggcccagaaaatgccattcaactctatcaaaggctt

SEQ ID NO: 227779 - DNA, 3342 bp, Cannabis indica
taagaagttgtgtagcttcttcttttaaaacacgccttaacaaaagtagagagaaaccttgtcggtacattatttatctacaattaaatactatacaaccttcctcatcatcttttgagcctcatttttgtcacttggaagatttctagtttcaagataagctaaaattggagtcatccaggtaggagtattgtccatcatttttatttcttccgtgcaggttatgccagggtcttccaagaattgaactggcactagttttccttatcagccactatgttgctcgccaaccgtgccaatgcattagaagttgcattttcctctcttagaattttcctagtggtgtattctttaaactgagctaggatgtcttgaattttgctcaaatatgccattattttttctccctagccaggtattctccaaagaagtgattgacgaccagctgagaatctctacaaatatccaggtaatcagcatgtacttcctgagcaagttgtaatccaactatgagtgcttcatactctgctacattgttggatgttgtgaatccaaattttactgctccatgtagatgatgcccctaagtgtaatgagggctattcttgcactggataattgatcagtggatgattcatccacatgtaatttccagactagtctttcatcattgctctgctctagcaagggatccttttctttctttggctcggtgtcattttctaactctgttatttcattgcgtgtgcactcagctacaaagtcatatagggattggccctttattactatccttggctgataagtaatttcatactgccccaactcaatttcccatttgagtggccgctcagaagcatcaggattttgcaatacttggcataaaggctggtcagtatatacccgaatagggtgatcttggatgtatggtcataaattcattgatgttaagagtaaataataggtcaatttctcgattagagggtattgactttcaccatctattagccttttactaacattaaagaccgaatgttgggtgttattttcttcttaatcagcacaatatttactacaaatttggttactatgaggtatattcctaattcttctctgtctaagggttttgatatcccaattcttctccgtccaagggtttcgataagataggaggttgttcgagttacttctttagctcttaaaaggctctttcacactcctcggtctgttcaaactttttacttcctcgtaaaatattgaaaaagggtacacacttatttgttgattttgacacgaatctgcttagtttggctatctgaccagttaggattcaaacttccttgatttttgttggcaatttcatatccagaagggcttgaatcttctcaaggttggcttcaattcctcaggcattcacaataaagacaagaaatttacctgagcttactccaaaggaacatttgaggggattaagtttcatgttgtactttctaaggtttttgaagcatatgtccaggtcctctatatgaccctagcctttctaaatttaacgagcatatcgtccacatacaactctattgactcaaaattttgtcaaccagcagcagagccatatttatgatggacaatcaccacgtgtaaataagaacaataaatgataaaagagacacaaagatttatagaggttcggcccccttatttagcgggtaattatccactccccttttagttgtattgattttagagataataccatgcaaatcatagatgaaaaccttatgaattctagctattgctctctttgattgatacaacggtgagaacaatgctgggcagatcaagaactaatgagttcttgttaatgactaaagaagatatgacttagtgtgttggtggcatggatgagatatgagatttaagagagggagagagaggggcacgtgtatgaggcttaagaaagcctttgtagcagaatgacttaggtttttagagagacctaatgccctttatatagtgtagggcttacaaaagatctaattcaagtaggtagagatatccctcaaaatgatgagatatcacctctttttcacatataaatatacaaaaaaaaataaccaattaatttctcataaaaaacaggtaaatatatgaagttgaaccttatgggttgttgaagcaaactcgtagttgagagtgtttgtccaggttgaaagctacagagacaccaaaagtgtttgctagaagagcagttggctggtttatgttacaccgtggccagccaggtattgctcctacaaccccaagatatgccttccagctttctatgtgcttgtcaacctttccatgtgcctgtcagctttggtacgtgctggccagccttaatatgtgttggccaaccttagtatgtgttggacagtcttagcatgtgttggccagccttagtatgtgttggccagccttagtagcttctttgtataattatccttacaaaggtcaggcttccttagtcaaacaggcccttcttgttctaacagataccttattggttggccagcttatactcaaaccttggccagcctataaccttcctctggccaacattttaaatttgaccagaagatcaagggcactgttttgaggtgacaagggtcatcctcttgttcggtcgagttttaattcggtgagttttagatcagttaggatttgtacgaggctctttagttgatctatttgggttgcaccactagatcacagcaaaataaatgtttatgattatcatcataccatatctccaagatcaccatatgtatgtgttggaataaattttactaggatctagatttactaaaaagtatgcttattaacatcctaaatatgaatttctaaaataatagaatttaaacacatataaagttaagaaatcttacattgattgtagcggaataatatgactcctcccacttagatctctaacccttattcctttctatcgtagagtattatcaagatctgagcctgattctccttcaggttattggattcttcacattcttacacactatgattgagtactagactttttatgggtgggtatgcactcatccactataggctcaaaattattaaagaacaatcaaggagattttgaaatagaagaaggaagaatgaggtctcaagaactctagttgtttgataaaatgtaaactaggttataagagttggatgagaatgagaccatcccattccttttatactattttacctagggttaggatttaattatatagaataacaaatgataaaataatagcaaaaataagcttaagtggccaaccatataga

SEQ ID NO: 227780 - DNA, 4426 bp, Cannabis indica
accattacacttattgggatattacaagtctcgtaaataactgatacatggacccggttcccaatgaaaaaggatggcgtgccaataaatagctccagtagagttgacctcgcatgatataaacttccgagaaggtgcgaccgagacagtgtctagtcgcacactatgcacaacatagtcgaaagataagcaggactaagaaaaattagtataggtcgtgcatatatcgattatatgcgacgagtaagtacatctctcatgcaacacgtaaagatgacttctttatataggtttggttcgaaagactagtgtgttcaaaaactcgataggaacccacacactactacaaaaacccctttagaggcggttttttttagcccttccagcgtcgattttggcgaaattcgctaccgacgctgatcagggcgacgctaaagggttaataaacaaccgatgccatatgtactttatggcgtcggttattaactaggaactcacaaacattcattaattaactaagtaggcccgaacgcccattatgtgggcagaacacctcagagaccacgagctcgtgtgttcggaatatggaaagttaaactgcaacttgacatgtcgcacacgtttaggcaattaatcaagaacggacgaaattgttcttacatttattctttaaacatttgtattaattaaattatgtaattaatgtaataaacaatcctatctaaccggttatgtcaaattaaaagatacttgctttctatataaatgagtgatttaaatcaaataaattaggctgaaactatttacaaaagcagactaagcaaaccgagccttaattgaaccactatgcatctttgtgttatttagtgtttactatctttgttttgtctatttcgttgttaattctttgagtattcatcattgtaggtgaatactcgcatatctactagtgtatattcttattttacttgaatagtcgctgctatttttagtgttgtctaattttcttcagcaacattaaatatctattaaaaatatcaaaaatatatcaatgacatcaaatattctttaaattatcccccatcacattgagatactcttgtaacacaagtctcatttctaacttttactcgggacttaacacaatgagagaaggggaatatatgaagattattgatgattatatgagtacttgttattataattacagtttaagatttatgattgtatgacgtgttattataattacagttttagttacattattcagtataaatttaaaatttaaaatttaaaattctttcccaattcccataatacagcactgccatatgcacatcatataaatatagatttatatatacacctgtatacaaaaaaaaaaggtcatatctttatctagtggcaatacaaaatgatgaataaataacacactgatgtttatatagtatagcactctttgtatttctaatacttatcgttattttcgataaacgtcattttcttcctaaataaacttataattataaattttcaaaccaacataatattttcttaattaatctcaataatgatagattggttagtctaaaaagccttcttacgtataatattcaattttaaatgcccactgttgttaaattagtaaaattgaatgaaagtggttaaaaaaaatctttaaattcaacaattttaagagaatttttaacggccagaaaaattcaaaagactatatatcaaagttaaggaagtaaaattcttaattagcttgttattattagtacaactaaatatcaagtaatttaatagaataactttttaagaatatctctaattaattatataacttcacatgagtgatagtagacatcactagtatacaatatcaatatttatttattatatgtgaaacatataatataaagtattattattgggtactaattatacttagttatccatatttctcaaaaattattttcttaaactatataaaacctgatattcaattatattaataggcagcaggtacattttaacatttttccataatatattattctctacaaaactatttcactcggtttgaccaaatcaaaaaatcttaaatatataagagaaaataaaataaactacaaaataaaattgaccaagactttacattggtatataattatatacatgcacaacaagaaccttaattacattaggaaaataagagccaataaagagagcattatttggattttgaagctcttttgaacattattctcaaaaaaaaaaaaaaaaaagactcctttgaacatttccattttggtgaaaataactattgctaaatagcacgattggcaagctccgagtataatttgcatatataagagcatctccaaggagctcatcaaatttggtgttgcactattattaaatttggtgtcaaaaattatttctactccaaccacaacaccaaaaattacactaaaaaatattacttattattatattaattttgtaataaaataaaaataattatagtattcacatttaaatttacacacaataatttaaaaggtatttttacaatacaccccttcaaataaaagagtcactcgtgcaacagacaatttaaattttatttcggcttgttacattttttttttgaattttttcgaaattttgcaggatatcttaaataactagaatgtacagagttgaaacagtctatttcacgcatctataaaataaaagagttttgcgtgcaacagactgtttgaaccttattatcggcgtgttaaatttttttaaatttctcaaaattttattagatgtcttaaatagctataacgtaaacgactatataaaaattaagctaaaaaattttctcagatgcaacaaataagagtgcatcgatggatctattttaaagaagtacattgtagaagtaatatttttaatcttataaatacaaatgataatatcaatatttataaatataaattaaataataataataattattacaaaatgaaaaaaaaaaaaaaaaatgtcgtagctacagtgccacagcatatatgccgtgcactgtagccacacggcatatatgatgtaccgtttgctgctacgttggagggattacacacaccaaatccaaagtttagtgcctccttgcacttgctctaagagaggaagagataatgatgatgcagctcctaatcagtttattaatggtttcgacttaaaatatacggtttgttgaaagaaatttttaaaatataacagttatataattatatcttttttactatatttcgttttatttagcgttaaaaattaatagtttgatcaatactaaattttaccttattttactaaaaactattaattttaatattataattttctagtttttttttttgaaaaaattattacaagacctgataaaagtattaaattaattaaaaaaaaattaggtaaaaactaaaaattttcttgaaaataatattttcaaactttattttattataaacacatattaaaagattgccgaactaaaataatttaaaatccaataaataattttaaaaaattaagattttgtaaaaaaaaaaaaaaaaaaacaaagcccatttatatttacaaattcatattttaaaaataaaaaaaataattagaaattcaataaaaatatatatttttaaaatagaaattaaactaaaaaaataatgttatatttacttaaataaatctgaattttgaaaaaaaaaaaaaactaagaactcaaactacttgtttgtaaatttttaattagtacttttttattattcttaaataaattttttaataaaaattaattaattgtttaaatcgcttaaatggttttaaaattttaatttcttttttaatttttttaataattaaaaataatttttcaaagatttaaattaaaatttaaagatttataaaaaaaaaataataaatttttctcgtttttatttaaaagaatcacgattaaataattatcaaagtttaaataataaagcttagaagacaaaattaacaatacttatcgttattttcgataaatgtcattttcttcataaataaacttataattataattttaaccaacatagtatttccttaaaattaatctagttatatatttttttttttttattttgtaacatcaataatgatagattggatagtaaaggtcatcttacgtataatattcaattttgattacctacgtctctttgtcatcgtattccaagaaattgtaaaaaaaatgtatatagatggcagagatacaaatactaatactaaaaagtactatagttgtattgtacctaacactctcttatattttagagcattgttattgggcactagtggtgcccaacaccttctataggtgtcaccctatgat

SEQ ID NO: 227781 - DNA, 1870 bp, Cannabis indica
taaattataattaaaaaataatttatgtcatttatattttatttatacacaatatattaaattctaatcttataaacataaataatactacaaatataatttaaaaaatgaaaagaaaaataaaaaggaatgttataattacaataaacatgatgtaaattatgctgctaacaacttggagataataaattatgcattgctctacaataggaaaatgaatcaattctatttgttgagacttgaacaaagtaatggaaattgaatattattaatttgggtggtgattccaaatcacttatcatttatctaactatatatctctatctagggattgtgcattattttcttgtgggtagttgaaattttctcatatagtggggcatgcacaaaatgtcgtgctacgtacatcgatgacatagcaatagctagctagccatgaccctatccatagatatataatatatatatcaactaggtcattatatctattaaacaatacctaatatctataatatcattcatacattatattatatattcttttcattccctatggttaggcaaacattatgatctatgtaatattagagctcgctatataatgctatatatataggctatagcattatatattatatagtacacacaatataatatatatattcttagaataataatgaaaaaaaaccaaacaattataaaaaagcaaagtacagtaaacaagagagaacttgatttgtagatgtggtcatatttttaattaagaatcattattcactgttacactaaatcttcaatcattctagtatgacataaatatgcatatttaattatattatagcagccgtttacatatataagtggaatgaatgaacctcgtgtatatatatatataataataatgcaacattaaattaatattacatttctctataaatatataaattattatatattcccatgcatgcactcaaatttccatttatacatgcatgctcttttttttttaatcattcaacataatatacatattttttttttataaagattattcaacataatattataggatagtggttaatatgtgattatattgtcgttgataatataatgcgtggtggacccacattgttgtcttggttttgaaaaagcaatctttgaaaccaagctaaaaatcgaacaaaaatcataggaatatattgtagcactatttttttctattattttaatacacttatacgacaaactagtttttaaaattaaaacaaaaaaaaacaagtcacatacagcccccacttgtaggtatagttttagccgacccaaacagggttttcttctggaggtagccgactgaaaaatgtcgtgcttaacagaacactgtaaagcctgttcctctctgcctcatatatgccttagaaaaaagaaaattataattttgaaactgttcccactctgccactcaacacaaaacctctcttaatactttctctctctatctctatactttcattctctcaatatataaaccctctcactacttcctctcctcaccttaacacaccaagccaaaaaagaaagaaagaaaaaaaaagaagaacaaaccaaagaactgttttttatattatcaagttagctactttcactctcttcttcactactactcatcaattctctcttcacactgtataaatcgaaaaactaagcctgacccagttcaattcagccaaaagggtactcgagaatagttttacattttccagatgccatctgagaccggagaactgtgccgccggccgccaccgccgttgaagactcaaaattcaggaaacgctggctcagcaccgcctcctcctcctccgcctgagcaaga

SEQ ID NO: 227782 - DNA, 3334 bp, Cannabis indica
attaatggactaaatttgtacaaattataaaggggtataaattttgatataggttgtattattagggtcaaaaattgaaatttcccttaggatatttgcttcataaactttgacatataccaaatcatgtcctctaaacttttaaagttgttaaaaatgccccctaaactattgagattattgaatttttttttctatatttaatgaaaaagtctaacatggatgaaagtccagagggcatgatttagtacatgtcaaagttcgaggggcataatttggtagaaatcaaagtctggggagcatgatttagtatctatcactgaaatagtaattaaaattgaatgaaattagacaaaaatccttaaatccaacaatctcaatagtttagggggtatttttaacaatcttaaaagttcagagcacatgatttagtacacgtcaaagttcaaggtcaaaaatcctaattagccttaaatttatatccgtttcaatgttaaaaagctccatctatattcatattcaatgaatggactaattggtggctactattcatagtctaccactataagtagttagccccctcctttctatactcactctttttaactttaaatacttttctattcttgtctattgtccgaaatagatttttgcattacctcattttgttcattttacccaaatcaatcttttccttatatttacaaatatattagctagctatcaacatgatccgcagggggctttggttacacaatttggttccatcttttagagttggtgcttcttcctcttcctccactttattcaaggttataaatttttgctcatctttctcttactttttactttctattacttggtttggttctcaagatctttttgtacttataataataataataatcattatttaaaaaatgatcataaaatagtcaaagactatgtgatagtttgtttcttgttttacttaagagaaaatgctaattatattactactctttctttgttgtaattgttttgcagctcggatatccttacaataactcagcaccttattatgtggaatcctcaaaacaatcatgtgaattatccagtaagaggtatacaatattatgtatatataatgtattatataatattatatcaaataatattatatgtcataatattttgtcatagtaatatatttggtattattaagttattaacttacatgtctatacataatacctatttatattaatataaaggaagtacaaaatattggtgatatgctaatcttcttccattttcaattatctttaatttagctctcaaaagatcactattcctattaatatgttaatatataaaaaatatgatatacaactctatttaatataatattatacaatgtaatacaatttaataaagtgtatcaaataaactaataaatatatatatatacatatcttaaaaaatatgagataattaattagaaagaaggattaatataatttaatagtttgacaaatctcctcacaaaaagaggtcccaaattatatatagggtaaatattattttggactctgtgtttcgcaaaaattattaattagaccatttattttgttaaatgacaaaatgaaccctgtattttctaaaatggtacaaataggaccctaaactaattttttgtcaaaataaaatttaataataatctgatctaaaggtgttatgacaaacatgtttacattttctgtatctgttcgtgttaggaattgtcttcaagttggttatattaaaaaaaaagttgtcaaaaattaagttcaggatcttatttttaccattttggaaaatacagggtttattttgtcatttaacaaaacagagggtccaattaataatttttataaaacacatagtccaaaaaggtatataaaaattttgctaaaactgttcctaagaaaaattataaaaattgtatgtatataaaaattgtacttaaagatttattgtttttttaaaagatatataagagtaaattggactaaaatatctcagaaaaattatacaatgtactctttaaaataagtctagcgatgcatctctatctgttttggtatttgggagaattttttagtgcaattttttcatagtaggttatttagaacatcttgtaaacttttgaaaaatttagaaaaatttaacatgctgaaatatggctcaaatagtctatttcagacgcgtacaaaataaaaaagtctcgcgtgcaacagaatatttgaattgtgttctcggcgtgttaattttatttttgaatctctcaaaattttgtaaaatatcttaaataactacaatatagatgaccataaaaaattagactaaaaaattctttcgaatgctaaaacagatagagggtgcattgatagaccccttttaagaggtgcattgtagaagtatctagtatctaatattttcaaaatgttacattatatacttttttatttttggtaatttgtggcaaaatctttaaccttcttttttttttgttggcaacaccccataaattcacgtttaaaaataaatttgaagtgtcagttaaattttaccataaatgtcaactatttaaaataattttttacaatatttgaataattaaaattatttagacttataaatatatcacatatatacagatagagtagccgttctagtgacatttaatggtaaaatttagagaaattataataaatgaccctaaattataacactatgtaagtaaatatccttattataaaatttatagagaaataacccttttacactatttattatttatgtagtcttttgccacataaaaatttcatatttttaatgttcaaaatatatttttatctattttgtttagaattatagaagcatgccacataaatatcatgatatatctatattaattttgttaaaatcttttttattttaaagttatgtcgagttttttgatttttttatgattgttgtggattgttggtgttagagattttattataatggaagataatcaatatatattataactctattgtaaaataatataataattaaaataagagattgattaaatatatgttacaatacatatatgcactatatatattatatatatatatatgaaaggtagaagaaatgaatagattaatataagagttttttgaggcaaaaccttcttaagtgaccaggtttttgcaactaatccccaattctaaaattttggtggtaaaacatcttaaatccaagttctgttagcacttagccctttctatccatttttgggtgttaagtgccaggttggaat

SEQ ID NO: 227783 - DNA, 2464 bp, Cannabis indica
tgtgaagagataattggtgacctggctgcctactggatcatgacatggctgcctatgtggctcctaagttttaggagatattgtcaggggaatattctagaatagtacaattctgttatctccttttctgtgcattctaatcatttgtgtaatattccctttgtactatcttctgccatctgtcccttattcaatggccaagatcatctcatgtaatggttaaatatcaatcgaatcactcatgccaattgagctgagttttgctattttcttattcctctgttttgcctatttgctgcaatttctacttggtatcagagcaggtttctgctgcttctgctatggccacagatgaatctcagactccaggaagaggtgcaggacagactccctctgtgaactcaggtatggcagcacctgggtcatcttctgcaagttcagggatgatggcaacacccttcagcaacaccctgagtcagcccttcactatgaagctggacaggagtaactttcccttgtggaagacaatggtcatgaccattattagaggacatcgcttagaagggtttctcaatggaagcagatcttgtcctccagagtttttgactgctgagaatggtgaaacagaaagtccaagtccaaatccagagtatgaactctggataacccatgaccaactaatgatgggttggctcttcggttcaatgacagaaggcatagcctctgaggtgattggctgcagatctgctgcaagcttgtggacagctcttgaagacctttatggagctcattcaagagctaatatggaggatctaaggactaagcttcagacagtaaggaagggctctcagtcgatgactgattatctgaggcaaaagcgattgtgggctgatactcttgccttggcaggagaaccctatcctgataatttgcttcgaggtaatgttttgtctggtttaggagctgaatatctaaccattgttgtgccacttgaagctaggacaacactctcttggcaggaactctctagcactcttctcagcttcgacagtaagctagagagactcacttccttctcagcaaattccaagcagatagataatcccactgctaatatggctcaaaaaccatataatcctggctacaactccaatcatggccgtgggagatctggaaataactacaatcatgggcgtggtaataacccgcattctggaatggctcgaggaggaggcacaagaggaagaggaagaggaggaaggcacaacaattctaaaccaacatgtcaggtgtgcgggaaatacggacattcagctgctgtgtgttacaatcgatacgatgaaaactacacagggcagccaccaaacagtgaacattcacaagagaagcaacaacaatttgctctagttgctacacctgaaaccttgaatgatgaaggatggtatgtcgacagtggtgccagcaaccatctgacatctgaagctggaaagattaacaacaaaatcgactatggtggtaaggacaaagtgactattggtgatggtagtaaattgcacatttcaaagattggtaacagtactcttactactcttaccaattcatccttagtcttaaaagatgtgttacatgtaccctctattgcaaaaaacttggttagtgtttcaaaactaacacaagacaatgatgtgtcaattgaattttttgctggtttttgttgtgtgaaggatcgaacagggaaggtgattctaagaggaactcttaaagatggtctctacagcttgggaacatcaaccaattgctcatctgtttgtctcaaccaatctcatccatgttcgtattctgtccaagttcaacctactcaaaatgttttttaagttccctaaaggatacctagcacaggaggctaggacatccctctctacctgttttaaatcaagttttaaaaacatctaatgtaaagagttcaattaatgagaaaccatggttttgtgatgcatgccagtatggcaaatcccatgctctgcctttcaccatttctaacagcagagccaaaatgttgctcgaaattgtccatactgatctctggggcccagctccaattgcatcacacacaaactataagtattatattcatttcatagatgatcatagtaggttcacttggctatttcctttaaaacaaaaatcagatgctcttgctgctttcattcaatttaaagcacttgttgaaaataagtttgaaaagaaaattaagatgataaggtgtgattggggaggagaatatgaatctttctctgaattagttatccaaagtggaatagaatttcaacattcctgtcctagaacctcagcccaaaatggaagagccgagagaaaacacaggcatattgtggagatgggcctgacattgttagctcaagctcatatgccactaaagtctggtctgatgcttttcagacctctg

SEQ ID NO: 227784 - DNA, 1129 bp, Cannabis indica
aacaaaatctttaaattcaacaatctcaattgtttagagaaaatttttacgatctaaaaaattataataaaataatttattacatgtcaaatgtactaaaagtagaaatccaaattagaccggaaaaaaaaacaaaaacaaaacacaatagataaagagtgagggagggagacattcaaatgcttttaccattttaggaaagaaaaaaaaatgaaatagccgccaaaaaaccaaacgtaacagaggtgaaaaagaatatccacgtggcgtgacgtaattggacaatttcaaaacatataaaattaagtctccttcttcctcaacaacctcatcactgtccgtacacttttcttattttaacagggcaaagatattttctctcttccccaaatttgcccgggaaaatgatgattcaagcccatgtctccttccgaaaccctagcttacttctcaatcctcttcgtcctcgctctcaactctcttccaccttcttcaatcccaacaatcctcatttcggcaacaagaccactactctttcccttccaactttacgttttcactcccgccgtgcccggatctcgcctgcttgcaccgccgccgattatgacgagcaaaattgcggcggagaagcggctgtggagaatgtggatgttttgggtgagggaatgtgggagcagattaaggagattgctatgtttactggacctgctgttggactttggatttgtggtcctcttatgagtcttattgatacggttgttattggtcagggaagttctcttgagcttgctgctttaggtaagcaattcacaattcagttttttgaaatttgtttggattttgatgaatttgggtattgattattggttttggtttacgtaattttgattttggattttgtatgttcaggtccaggaacagttttttgtgattatttgagttatgtattcatgtttctttccattgcaacttccaatatggttgccactgcacttgccagacgggttagtttcttttagtctttcatgtgataccttcaaatttatttaaaatcttttttcagttaagacaaattcttagtgtcagtcttttatgattctacatcaaaaactagaaggaaaaaaaaaaa

SEQ ID NO: 227785 - DNA, 5082 bp, Cannabis indica
taacataagcaaccaaacaccttaagggaagagtaatatggtttgacattgaaaagaacttttagaggagagaaattgttgagaagtggagagggcattctattgatgagaaatgcagcagacctgcctcatcccagaatttaagaggcatactagcctaagctagaagagttaatccactctcaacaatgttcctatgttttctctccacaactgcattttgttcatgtgagtgagggaaagagattttgtgaacaatattagattgttgcagaaattgggtaaatgattagtattctcctccccattcagattgtattttcttaatgggtaagcctagttgaagctcaactttgtttttaaaagtaatgaatgtagatagggcttcatttttggttctcaacatgtatatccatgtgtgcctagagaaagaatcaagaaaactaatgtatatctatacctagatgaagaattaatagggacaagaccctataaaccagaatacaacagttgcaatggctgagtatagacaattgtggatgtagggaatagaagtttgtgaagcttcccaaggcaacatgcagtgcaaagttgagtaaaagattcattatttatattgctaagtttgatattacaagagttaagtacttgttgaacaattctagaatgagcgtggccatgtcttttatgccacaaagaaaaaatgctattttgttcaaacaaggtacttgaattacattgagtgctatcaagagtagacttgatgttggtggattgaggcagagaggtctgcttgtgagtgttgagaaaattcagttgatttgaatcaaattagtagagacctttttcaagcttcccaacaagcaaagtcttcaaagtaacccgatccttgacaagacagtgaaaggggtgaaacttaaagaaaaccccattatcttgggaaaactgagacatactaagaaggttttaggttatatcaagaacatgcaataaattattgagcacaagattatgagagtgataaggggaagtaaatgaagaaatgaccaatgttttgaatacacaaacctgctccattgcccatgtgagcctgctgatcaccattataggtactgctagaggtaagattctattcatttggaataaggtgatgtgtagctcctgaatctgggtaccagttaggatcattgaccacttctggtgtagcatagtaggcttgcatctcaggtatgttggcagtggcatttctagcaatgttttgaaaagattcatgccttgaaaacgacttatcaaagtggtaaacattgttgaatagtgcatccaagcttgtggcacaactgacattgtggtttttgaccccaaactgtagtaaggccatgaccaccaaagaaacctcctctaaaatttccaaattggcctcctgatggtggcatagaacttctggatgcggaagcaaagtgaccaggtggggtggactgcatcatggcaaaggttgcaccattgccttttgacatagaaccaaatctagaagaaaatggagaaaaaggttgagaacattgacctcaacctatttgattcttggtgagagccatatttgcttcaactttagcaatatcaagttcttttgcagctttgtccaactgaacttcttgagccattaacagtgcctcaatcacaacaacattatatgcatctgttctagtattgacagagataatgaaaacattgtattcagttggtaaaccattgatgatcgcttcaatgtgatcttgtgatgtagttggatgacctatagatgcaagagtatcaatgatactcttgatcttgagaagaaaatcactcaatggagactgttatttagtgttgcaaagtagagttttgtattgatcgatcttggcacgattgagagaagtgtaatattctcgaagatcgatccaaatctgagctgtagaaatagatcctaccattcttaggagcactttctcaaacatggatgagagaagccatggcacgagaatgttgtcctgttgctcctgatcttcatattttggactcagtctatttgcacaccgatcttcttctgtgagatactgcagtggagtaaggttaagatcaagaaacttttgtagtcgactccccttaatggcggcaagaacctgatgcttccatggcaggtagttgaactcatcgagtcgaacagagaacgagtgagagaaagagacaagactactcttaggaagattagtagtgttgtgaggtaaacccgtttgttgacacaaacttggaggaatcgacgaacctccattgttgattgctgaggtctactccattaagaagataatagaagctctgataccatgttaatgtcgaaagcaaaagaacaatttagaagaatgctctgttttcattactgttcagaaaagaagatacaagagtatatatacacattgaatgagttgaaaactcatcaacaactaacagaaagtcagttgacactaactaaaaaccaaaaaagaaaaggctaacaacttgtaactgtttaactaactaaaccaatcataaaccaggtacccttaacatctccttattatacagtccattactattaaaccaaacatctccttcttattacagtccattactattaaatgaaacatctccttcttattacagtccattactattctcgttaccattccaattataatacaatgaactaaacaccaccacaataacacttaaaaaagaaaataaaaaaatttaaagccaagaggcttttatattcataataggacatcactattcatttcattgtccacacttttattatatacacaaccaatacacaaaaaccacgttggatcatttcatgattcagtattaaataaggttagaactctccatatattttcacaaaatatataaaaatataaataaaatcatgcatatatgtgaatgtgacttcttcttcttcatttttttctttaataaaaaaatatagctaagccaagagccaaaagtctttgtgtcgttttgtggtgatcaagtagcctcctacacgtctgttttttctcctcacggctaaggccatgcaagtggcattctgaatgcaatactccacaacaccgccccccacgccgcctcggccactgttcccagctgaccacatcatcagaagtcgccatgtcgtcgacctcttcttttggcccaaaaccaacatatcaacgctttgcttttttgcttcttccaatatcattgggcccttttctttgccctctatcacagtaacatcaatttccacctgtcaaggaccaaccgtgtgattaaattcaacaacacttttatttttcctcataaataataattaattaactacacagtcgtcattcattcaaagtaatcaagtaactagagtcaacatgacctttaaatcacacattaaaaaatccaacaaaatttgagattttagttagacaaattaactgtaaagtgatacatacgtatatatataaagctcaagaaggtgataacacagaattattgatgaacattaatcaacaaactataattatgataactatactaaaaggaagtgcatagcattattgattatattatttacccacctcggtcttctttgattgacacatattcttaagagcttgaacaagttcaaaagccttcggagctttctcctcgctcaattgctcccctgttcctgttcctgctaattaaaataaatctgatttagttattctcaatttttcacaaacttaataatctacggagaaaaattatgaaggaatataaagtagtaataagctcaaaaaccttttctagataccggtttgataacatggaggagaactagcttatcctggttgggaatagaatgagagagagcccattgaagagctcctttagcttcgaagctagaatcgaccacaaccatgatcttccttccaattcccaaactgggtttcatttcattttctgtggttttttgatcatccccagcaatgccatcagagccttgatcatcatgtttttgagcagccgctttaagagacttctcttgaaacttttgttgaataggtggagatcgaactcgaaccagaggcctaatcctgctgaggcagaagctcggcaactttggacctgatcttctacccatatcttgagactcctacggagctagagaaagagagagagaaccagaccagttattgttattaacagataaagaaatggctttaattagggagtgaacaaagttctagatgttggtccctgagggccattgttgttaattgttatactctgctttgctttgcttttggctgtgtaatcatgtgccagtttctttgtttcttttttttttccttttgaattaaaagaaaagaaataagaaagcgtttgtgtgggggctattacggaacgtgcttgtcatgaagttgtagggtcagcccttaattaaagctttggccagcctcttcacccttaagctttttcttacaagtcttcttagctgccatggatgtcccctgtctcaattacgattatttttcccctcattaacaaaataaacatgtaaacttattaattattcaatgacaaaaaaataaaagaaagaattattaaaagttttgccgctgaatttttgataggtaccgcatatactatgtttgttaaaaattgttaaaatataatagttccatgagcatgcccttctgctagattatttgatatcctgtattttaaagtcatacatatttggtactttaaatataattttttttgataaaattttatcaaatacaatcactctctaaaatttgatgaattttgaattaaaatttaattatttgattacatataaccgtcaattgtttggttatattgataaaattttattgtttaaattttattttaatgtactaaatatgtacaatttgaaaatatgaggtacaaattaagtaatattgaaaagagagggtaacaaatatattttccataaaaatataaagtactaaatgagtatatttcctttattttaaggaattattttacaaatatacaaaa

SEQ ID NO: 227786 - DNA, 1731 bp, Cannabis indica
aaaaaaactcataaccctatagtgttatttatttatgccattaaaaagtaaactataccctcaattcccatatttatgaaaattctcctggtctcagggtacgttaccattttttaaccctaattactcctatatcaacccaagccttcagatcaaataactctcccatttaacagctgtcgtacatcgtacatcacaaaatacattccgtgaaagtacattacgattacgggacctataaaaatgtatgaattatttgtataggtaatttgaagaaattactagccagacaaaactattttgttttttgaaggaacaaacaaaaccacttaatttaatattattttttttttgaactcacaatttaatattatacaatcttgttaaactgtctcctgcaaacaagtcgcttcaataattgaacactgaaacaaaagacttaacaatcaacaatgaacagtacggttgtttgttagccacgctaagagcacatttcacacttcttcattagcatccaatattataaaattctctcaaagaaattagaatataaaattctatctcaaagttaattagtaatatttatacttttataaataacttaatatttttatatttaatctatatatcataatattgtttaatattccttttaagtgtcttgcattatctaaatagatgtagatccaacgtatgctaagaatacaactctaataccacaacaaaaattatgaaattgcatgtcagaacaaattactgataaataaaataaattatgttcttttatatattatataaatgattcaatatttttacatataaaataatattagacaatatttaatgatagaatctcataattaggtaaaaaataaaaatattatatgcgatgcatgtgagtgcttgagtactagatcctttacttgagaagcttagtattcactatttagattgcataatttgaattagtagaaattacactaaatatagaaaaaattaaagactttacttttttatgatatattttttttaatgtagtggagttatggactttttgttccttttacatttttatgggattttttatgccataattttgtaattaagttttcaactaccatattttatagtttttcaattttgaaccaatgtttcctctatgtctctcgttcttgttctccctcgcctcacctcgcctgaggcccaaagttccatctcaaccaccttcgtgttgtacaaaatcttccactaatctacgtcgagattcgtggaagactagacctccggtcaaggatcgacgacggagttcgtctagtctacgacatgattaatattctaagtttaatatttaaaaggagtttatttttttttctacattagcttgttggtaggtgattatggctttcttcgatgatcggcctaagaagaagaagcagctcccaccagtaattggtatcacaaaaaagtcatctaagagattattggttcatggaaccaatagtcttgcttctattgagtcatagtccacgagtctttgttattaatgagagtatttgtaactccctaaataattaggcacgctacccaagatacttatgaaaccctaatcccctaaacgggattactaataaaattagcacagaatttaaattttaataacaataggaatgagaataaacttgtaatattttaaactttataaactaaaattacaaagttgggatccaaaaa

SEQ ID NO: 227787 - DNA, 3185 bp, Cannabis indica
aatttattttaatcccagataattactctttaatataataataaaaaatgttgagaaaccgtaataattgtgggacaaaatcacatgcacctacttatctttgtactcacaaaaagtcatttaaattagtttattggcttctcacacatatgtcacacacatatttgataggtccacatgtgactactaacatttacaattatatttaatgactacaacaacgcctatggatgtgtatcgtagaatttaataattgccaaaaagatattaaaatactgagctcaatttttaaaaaaagtcaaaactatttggcttatttttaattattatattttatctgtattaaatgcacaaacatgggttgtatcgatcatagaaaacagcacatatttactgtatttttgatgtcccaacaattcaacggaactttttcatttcgttttttggaaattagatgtaggagttggctaactcgactcgccaattcccgtacgaaccggacggctcgtaaaaattacagacagccaatcaaaaagcgttgactgaaccccttgacatgacagtatggaaaagcaaaataatcataacaaaacaaaacaaaacattaaacaagttgtttaataatccaggtgggccgggcccactatatgaagcccgcatgtgaatggagcgtgtggtttacgcgatgtgtttaataattgggttagcatcgcaataaaaaatgaatcaaaagggtaaataaggcaaagcagaattcctaatttgatacatccaagaacaagtggatgttactgtactgggagaatcaagactcagagccgttgaataagaaagttaaaagaaaataaattaagtactgatttaaaaaacaaaagaaaacaacaaaaaaaaagtttctgagttaagagataaaatacaattaaaagtaaaaagttgatattcttttttcaaagtaccacggaaaatgtacttaaaattctctatcacatatcaggcacaaagaaagagaagagaactaaagagagtctctttctctctctctgaaagctgaacaattttagtagagaacaaaagaaaaatagataaataaataaatctgtcagggttaacgaaaaatataaatataaaaatgtaattgtagttgtatgtactcaagtaactcaactactctgtctttcacatgtttagatcctaactcaaactgtcaactatactttgtaatggatattggggtattgttttgccaaagatatatgatatgaggtgagaaaataaaagggaaaaaaatagggtaatcgtaatttaatttcttacgaaaaaaaaaaagaatcgtaatttaattcaatacccccacgaaaccataaaacctctctcaaccttgacaaaaaaaaaaaaacttctgtttttaacttggaccctgctttcatgcattgaaaggtgtgataaaaaagtcaaaacaatatcgatattcccagcagccaaaacaaagctcagtaagccgaaaccatggagtcagtacctaaataatttcacaaaagttttccagatccatttcttttaatttgggtttcaaacaaaatgaaaaagaaaaaaaaacgaacatgcacatacacacgtatatacacaaacataaacccatacagattttcaagagaaaaaatgcaataaaaaaggtggagggatataccagatcaacagtttcattcattgatctcctccagggagatcgctttgtcaccccccatcttcaacacacggtaaagaatctaacacagttcgtataaatatatatatatataaggtaaaagtgagggaaagtgaagagcaatggatgatagagaatgctctctatcccaagtaagaagaagaaatgggaatggtaatgaaaatttggctcagcaagaccctccttttaaatctctctcgtcagtgtaagaagaggcatttgtgtctaatgtcaatgtgacccgccgtttaatctctccccaagtgggcctcttttttaaacaatttttctctaatctctttctctctatatattattattattattttctctctcttattaccggtgactcgtcagttgctgctcattttgacaatgcatgcggtttacaacatgccccttgcgtacattacatacatagaccctctagagtggggcccacgctacgtaattctcctactacatatacatagttttaaaaaggaaaaggaaaaaatcatattgaattttttttttctcattattaacttttttttttgaatgctattaactttcttttgtttgttcagatttttttagaattttttttttaaaaaaaataaataaaaatttatgatgaaaactaatttagatttattggaaaaagaaaatattttttaagcaaaaaattatataaatatgtaatttaacatggatttctataactgcgtgctaagttcctcgtaatcatttctttatatcaaacctaataagtagtattgtatccctctagaatttatcccgtctcactctgtcctgtaccagttctcctcatccgtgtgatgattattctaaatttctctttaattcatcaaatctctacattaattttttttctgaacttccacttattatctaataagtatgagtttgggcatttattagtcttttcgattgtctttggttggttgagattgtttcctccatcattttttatatttaggtagtattttttttttgacgcgatatttaggtagtatttggttagaatgaatgaaaatataagattaataggaatgggaatgagaatttgaatagaaatagaatagaataaaatttaaaatgtataaaaaaattattaaattttttcaaatccggcattaaaatagtctttccttatattttaaaatggaatagtcattctaccaaaatggtggaaagatcattccatcggaatgatattctaatggttttaattgcaaccaaacaaaggaatggaatgaaaattgtttcctctccattccattccattgcattgcattgcctctaaccaaacgccaccttaaatgtcgtcgtttcctttcttcaacgaattttgacaatgatgaagtctagcggaagaggatcttgcctatggaaacttggtagattgatagatttggcatcttttatcttctcgagaagactctctcaatccatg

SEQ ID NO: 227788 - DNA, 2496 bp, Cannabis indica
atatatattaatatatacttaaaatcataataattttcaatcaacaaatgaactacaaaatgtattttagttaatttacgaataataataaataaaaattgaaaagatatatatgtatatattacaattaaaaaaagatacatgcttgttatatatattaaagagaatgggtagtagggtatgaaaggagagcagcataaatacctaatctttgtaaattaaataagtccaaatataacaagtcaaaattaataggtttattaggtgtgttgtctgcggctagttgctgagtaatatatgacttagtttcacaagtttctaaaaagtgggaacatatattaccattttcacacaccatgctatatattacttctatatatatgtctgtgtggattgttttgtatatatgacacttttgtacttaatttcttgtaacattataagattccaaaatgataaacctttattattattattacttggaaaatcatttctaattatccttattaagtaggagtgatttcactgatctcattttattatgtatgatcattatattatattggcatatgatttgtagtgttagcttacggtaactaaataataagtttgtttgagtctctatcatatttatttacgtacacaccaatttgaccatgagagcattttactttttataaaggggaaaaaaaaagaaaaaaaaaattgacttataagagccgaaaagctttgggcaaaaagttattaggtttagcttttcataaaatttcaactactactactatgccttcccacaactttttcctcaaattccacacacccaaacagagagaaagcacgtgagtgaggccataggattggaaatattggtaaattaataatattaataataataataataattttccaaagcccaaggtgagtgtactacaacaatttactgtgtatgtagtagtagtggtatagtagtatagtagggcctagtttttcttcttaacattacttgaaataaacacttcataacaacacctttaacttagattatactccggtaatagtgttttcatttttctttttcaacaataataattgagttattattatataacaattgcaattgcagacaacctgggtttgaatatgcagggatttgacattttacgtgttgtttctttccttatttctcaaaaaacaaaaacaatgaaaaatatgttaatttaatgcacaaatttcaagaatgtcaaaaaaataaaatgcgttgaaattcgtagccagtatcgtcctctccgtttgtcactatgatgtataacattgagagagagagagagaaagagaaagattttataaataatttgtggggtgggaactgggaagtgaatgaatagggggcatatataggccatggcagcacatcttacgggcacctctttttgaataaaaacaacacatttaatttggaacttaatcaatcaattttattctggtgtaccattattaattaattatcatactcaccaaacaaaactaacttaatactactaaaaaactcattgattacccaaatcccatttcacaaaattacaaaagaccatttaattaccactaatattggtaatttatagaatgacacccaaaataatccctaagggcatgtgaagtaaatatttaaggagaaagaaaattagtatagctgccaaaaatgctctgcttttgtgtgttattttgctgaagaaaaagaaagaatatatagttgacccatgaataaattgttggataatatcctacttttacttccgccagaagacagttcacgagccaacaaactaaaaataaaggcattcatacttgttttctttttatttcgcactttcttttttgatcattctctaattctttgagaacgtgatatatatataatcttattcttatataagttgagataatgaattaaaaaaaattaaaaatgtcatttatattatacttttatataattatatatttgtgtatacagagaatcaaaattccattgtgtacgtggcttttaaaaacaaaattaatagccagtaaatgttagactagcttgcagtggtcaaagactacatatttatataaatatatatatatatatttgcctaaaattactaaaatgttagatcatatatgttatactagcaataaataatagatctggttgaaaaaagtttacatcaaaggaaataaataaatttggtgaaataaaaagaatgatgtatgatagtatctccttgcaatataaattagtttatgcatatttactataaaaactcgtcaattaaattttagttaaaaaataaatataaagaggtgaaaataaaaggtttaagacaaacttagaatattaagggaaaaaattggtgttatattgaatctctaaactcccttacaaataattatgttccaaccttctcttcaataaaagagagaggtatttatatataggaagttctaatggctcca

SEQ ID NO: 227789 - DNA, 1831 bp, Cannabis indica
taaactcttatgtgtttatttcattattttagaattcatattaggatgttaatcaaacatacttggtagtaaatctagatcctagtaaaataaattccaacagttctatgggctaaaacttgtagattagagtgacaaaggaaaaaattagctttttcaccaagtttttcatttatatgggtggcaacggcttaatatgttttgaaatggatggtccagatcataccaatcaaaagctgctccatccaccgactggggactcgaaaagtttgcatttaatgttccttgggagaaagaacaaagtattcattacttatcatttcatagcagcaagccaaggcggcacgcaccagccatcttttcaagtcttgctgccactcactatccacaaggaatgcgctagaacctagcacgtaagccccacagcttcacaaaatggacaccacattttaacaaaatgatagtagtatcacaacaacgggatatatcaactcttcaattttccaaagtaacacggaaggttgcttcaacatttcaagatatttctggcataccatgataatgaatccaacattcgaaaagaagttgcaagctcccatcattcaagagtcctaggagcttgtgggtaattatatgtattcctgaatgcctgatacatggaaatcacgaaagggtgccaccttgggctatttattgtcaatgtgtactttttgcttaattacattaaagagactataatattccagaagtcattcaaaggtccccaatgttagtgagtgaggataggactctaggactcttactatcaatcctccattggggacaatcagagttatccagagcttcaagtattccagaaaggtaataggtcagtgtgatccaggaaggctttggcacgttgatctcgaagcttattcgaaaatatcctatccataacccaaagcaatggttattaatcctttaacaacgaatcagatcttatcccttgcgtcagatcatggtagttatcgtacgtgcctctaaagcccctttttctccaacaacttgtctaggaaataacttttcaaggtgaaacctttgagtgacatgtgtcctcattcacatgtaatccttcatatcagccgtacaccacacaatggggaagtttcctaccaactaacagtcatatcgtcatgttgtagtgcctgcttttgcagtgtcttgagtattaaacacaaggtgggaaaagggaatgcccttacacacatgtaagcttataaatacctttattttttttttgtacaaagggtgaacatttttttactagccgaacctctacaaaaattcctacaagctttcttcttcatcaagagaaataaaaggagtgcaaagataaggttaatactgtaaacacttgtattatttaaacactcgcctgtaagaccaatacagcttaattgtggactaggaattattaacgcccaaaccacgtaaaaaatcatttgtttattatttaatattttattcttttcttaagctctattttattagtttccaaaaatctcggtaaacaaaaataatcatgcttatatacttcaaaatatttagtcccacgattcacagtgcactggatttacactgctgtgataatcaacaataaagtttacttgcacatagatttgtggaatatcttttccaatacattggcaaagtatactagtatgagatgcattggttatacattggtctggaccgaaattgacagtggaaatgatatcataaacttactgtcatatcttttctaagtgaatgtcacttagttgatcttaatcctaaggtggttaatttctag

SEQ ID NO: 227790 - DNA, 5368 bp, Cannabis indica
tccgagatggctaaatagagaaagaacgtccttctagttattggtttttccaaaactggaggcgttatgagatgcctttttatgttttgaaaggcctcctcgcactattttgcccactcaaactttttattgcctcgcaatatgttgaagaacgacacacacttatcagttgacttcaaaatgaatcagttaagtgcagccattcttcaagtcaaggcttgtacttccttaggctttgtcggtgatggcatgtctattaatgccttgatcttttcaggatttccctcaacacctctcgcgttaactatgaatcccaaaaaatttcctgaggaaactccaaaggaatattttctcacgtttagcttcatgttatattctccaaaggattgttttggtgtttttttatatttttatatccttctgctacaatgtaatgtttctgttaaaaaaattgaaaagcatgtatgttatcaaattaaattactttggtattttatttaaaagggaattgatttagacatggcctgagttcaaaaggcacgagtacgacatgatacgaaaaaatataacttaaatccggtgcgacataaaaaagtatgagcttgggccagcacaaatagtataactttaaacacaacatgacatgacaaatgcgacaacacaatattaaggcacgaatataaaatcacaattacacccatcttttatattttattataaaatacataacaatacattttttattacatttttaacttttatatatagtgattgataatttaatattataaagttatattaatatagtaataccaatataaatacaacgcaacacagtccatatttttgtatgagacgggttttgtcttcatatttaaaattaactttcttaaatataaacaaaaccacaatggttgcacggcccttatgtacaaattttataatggagatgaccataactaagcagattatacttatagagaaaactaatcataaaattaacacaacaaaagataaactcaaacgcatgcccttgcacacaaaataaaaatggttttccttttaaaaattactaataagtaggcatgtcaaaaagatctatttagttagagcaggtcgaagctccgacccaatagatcacttatgatctgaaacattcggatacttattagagctcgaatcaaattcgttctgccccgtctaattttttttgtatcagatctgatctgattcggctatattttaaaaagaacttaattcaagactcggaccctcaacccaggcccgaacccctgagacccaagaccatacccacctgagatccaaacttagacccgggcccaaactcaggacccaaaccctgacctgaactctggatcggacctagatttgggttttcaaacccgaacttgaacccaaacctggacttggaccgagactagggacttagttgggggcctgacttaggacccagaccccgaactggacccaaacccaaatccgagaccagactcagacctgggcccgagatcgaactcgtacccaggacctagacccaaacaaagactcggacacgtatccgtacccgggagccggacatgtatcgagacctggacccaaactcgaacccaggacacaaacctgggcccggactcagacccgtgacccagacccaggacccgaacctagacttagaccaagactctgacctagacctacaccttgacattggacctgggaccaggacccggacctgggacccagactcaagacccgagaactgagacccaaacctacgttcggactcggacttggacctcgacccagacccaaatctggacctcatccataatttatgttgtggtcaagtttattgaaaatataactttacaccatttattaatacaagtcaatgctggggaatattttactaagatctagatttactaatatgtatattgattaacaacctaaatatgaattctctaaaataatagaatttaaacacatataaagttaagaaatcttacattgatttcagcggaataatatgtctccttccattcagatctctaactcttgttcctttctgtcgcagagtattatcaagatctaagcccgattctccttcaagtgttggattcttcacagtattacacacaacgattgagtacttgacttgatatgggtgggcatgtactctttcactataaggctcgaaaatatgaagaagaagtggaggagatttgaattctatagcaggaggttctcaagtctctagttgtctgacaaagaatgaaaactagaatgacttaggttggatgagaatgaggatcatcttattccttacataggatttctcctagggttagatttaaattttatggaattaaaaaagataaaaattggctaaaattacccttaagtggccggccataagatgtgggccccactagttagaatttttccattttatttaacaatttgtcttttctttcacaaaaaccataatttttaatttcaatcctttaaatgtcaaaactatttttttttcataattaaaatgaattaccaaataaaattaccatttaattcatttattaattagacttaaataaaagtctcttaattatcaaataaacacgaaaacttcttttcttcataattagcaattgctttgtgaaaattcataaataagatacagtctaattttagaattataattggctaattaaaaccaattaactaagtcttacaagcagtattatctagactagtgtggggaccatgggcctatataaccaagcttccaataagcagatctagaatttagcgagtaaattctttaacttattaattcctccttgggccactataaattcgatttacactcttaattatatagaacgccctatatgtttcaagatatagatatgctatgaattatccatcgttctaatccaaataaacaaagatcatctatacatgatttacatcaagtagagataaatttaccgttttaccgttccacccctcaatgtattttatccttaaaatatttagcttcctataaatgatatttcagtaaactaatataattactgaaataagagctcttctatttatctctattaagccaacctcgaagaaaatcattatttcacttctatgtttacatagaagctatagattctgtatctatgattagcgctcccacttaattgtactatcatattttcaagatgtatgtgttacccgaactaagtggtagactttaacaaacaactctaagaacataaataacactctagagatcaaacttaaccatatcaggattaagatcttttgatctaaggtcaacctgtgataatgacttagaaagactcaacggtaagattataatatctttaccaaaatcaatattggtcccagtccgatgtatactccatacattcgatactagcatactttgccaatgccctgggacggacataacacttatccaatatttaagtaaactttatcgctgactatcacatcagtataaatccagtgcaatgatgaatcatgggacataaacttttgaagcgtaaaatcacaattaccttctactatgttgacaccactgtaattgtaaataaatatatgttctggagttaacagaaattgtatagtaaaccataatcatgaaaaatacatataaacataaatgacttctaatcttctattgataacaaataagattatattgatatagtttttatttagggcataaaatcctaacagtcaaaatactaaatatagtattgtattaaattatactgttgaccccaaagattactaagtgtaatatttaaagtcattaaggggagctccacgctgcccgcgcgccctacccgcgcgcccagtcttccttgtgcgcccagcctgccccgcatgccagccctgcgcgcccagcttccccacgtgcctagccagccctgcacccgtgcacacagcctcaggactctgctcatccgcctttcattcatgacatcggcaaaattactgagaaggtgtcaggggggacaatgacggcttagcctacttacataacaggaacaaattttggttcatccgaggtacaaaatgaaaggagcttttttagtgtaatttaggattctagacatggcaggttgcttaggggacaatgtaatgataggtgaaagggattggtcatagggtgcatgggggaagctgaatgtgtaagaggaaggggctgactataaattagactctcccatccattatagaagaggggatggtttggagggaaaaaattgtatcatcgaaagaaaatttataagatataactttcaaatattataaagattctgaaattctttcttcttggcattgaagtcaaagttccattaaagtttaacaatattattaggtgaaaaagttaatctatagcgttaacgagtgcagaccgttaacaaatactaatacaaattaaaatggatataaaattaaaatttttgataaaaaagatcggatcagatccgatccgtataacgtgggtcagatttgatataatttagcaaggcgggacaggaagaattcgtatatgatttggatcaggttggatcatagccggatcaaatatgacccaatctatttacactcttactaataagttcggatgctctagctgaattagcaacaacacaccaaatgcgttgctaaatatgttattaacaaaataattttgtattgtgttgtgtctttcttcataattacattgatatatgatatctatttcatctataatctataactaaaataaaagacacaatatttggagctttttaacattaaattacatatataccccttaaacgatatatatatatataagctaataatatatatatatatatataaaaaaattacatccaattgataatatttggatatttttatctttcattgaattacatactcccttaaagtaatataacttgtaaatatattaaggtcactatgatatattagattatcctaatatttcttcaccataattttgtaataaatttagaaagtgttattatttagtataattccaaaagtagtggttgaaatcaaatgaagattaaaaatcaataaaatttaagtagttactatagtagataaaaaaatatatgtatattactgcattataagtttacgaataatatttaaatatttgtttttaaaacaaatgatatttaaaaatttaccaaaataatatattgtattaaataaataatcttataagtaaaagtcaaacaatttaaaggagagttatgtttattctccataaaaatataatacatacattatactt

SEQ ID NO: 227791 - DNA, 2105 bp, Cannabis indica
aaacataaaagaatgatattttttaaaatttccctttattaaatatcaatcttattcagaagattttatttcttttattatccttttcaaataacataaatgtttaacatgttataaaagatttgcagatattctatttaaaatatctctaaaatattatggtggccttcgaaatcatgcactacctaaaacacaagacaaaaggtaagaaaggttgtatggctcttaagcttgacacgagcaaagcctatgatcgagttgaataagactatttaagtgttcttatgtctagtatggagtttgctgacagatgggtacaattagtgatgcagtgtgttacttttgttcactactctattgtcaacgagggtcatgttatggggcctgttattccttcacgaggaatacgtcaaggggaccctctctcaacctacctcttcatcatttgcactaaaggattttccccgattcaaaaagaaaattgtattattcagggctattaggttgctcatactgccccttaaatcacccatatgctttttactgatgccaactatcttttttgctagtgacagctatcacccatatgtttggacatacttgttagcaactaaggatgagtgtttggaacagtttgaaaattggaaattttaggtgaaaaactaaacagatcttaaaattaagaactttaggacatataatgggatggagtttattaactccgaatttgacaagatgtctagaatttggaatcactaagcataaaacagtattgaagaccctagagcaaaatagtgttgctgaaagaatgagccgaaccttattaaacaaagatagatgtttactgttcagttctgggctagaaaaacctttttgggggaagctttagcaatcgcaacctatctcataaatagaagcccaaataaagtgataggcttaaaaacaccttatgaaatgtagtacaacagaatttccaacctaatgcttttaagaacatttgggtgtacaacatatgtacatgaatctattgagaagctggaacctagatccgtaaaggaaactttcctaggttatgccttcaaaaccaaggggtatagaatccacatttctaagaagggtaaaccaaaggttatgattgctaaaaatgttatttttaatgatttggaagatcctcacttaacctctaggaaaggtagtgtgtctccatgtgatgcatgaaaaataagaaacaaaggcactgtaagtgtggaaatagagtacaaaacgaagctcccggaagatggtttgttggtgtaagttagtctagaaccgaaagacaatgcacaaacggaagctgttgtggagttagaagaataagataacgaaaacaaaatagaggtgtcggaaggattgagacagacaggtctcagaggttattaattggctcgggatagagagattcaccctccgacaaggtttgtagaggcatacttaatagcatttacactagaggcagttcaatagactaaaactgaagaaccctgaagctatgaagaggcaattttaggtggaaacaagtctaaatagcctcaggccatggatgaggagatggattcactccggaagaacaagacttgggtagttgtactgaagccagagaataagaagattgtggagtgaaaatagattcttaaggtgaaagagggaatcaatgagactgaaccattgaggtttaaagctaggttagtggctaaaggctttactcaggtggaaggtacagactacactgagagtttctcacctatggtaaagtacaagacaatacgactgatgttgtctttagctgcttaaatggagttcgaggttgaacaccttgatgttaagacatttttttttaatggattcttggatgaagaaatcatatgaagcaaccacctaattttcaagtggaaggaaaaggagttgaactagtgtgcaagcttaatagatcattatatggtttgaaatagtccccaaggcaatggaagaaatgctttgatacttatatgcaacaaattgggttcaaacgatctgcatctgatcaatgcttgtatttcaagaatctagagcaatctacagtcgtgttc

SEQ ID NO: 227792 - DNA, 2084 bp, Cannabis indica
ctctctctctctctctcatcagtctttggcttgatcagaaattttgtttcttttaactcccctttcttcggtggtttgcaggaacacttggctccgagtggctatcttaaaatcccaactgtaagttaattcctcatttcttttcaattgagctgattacatgcttcttcttgtaacaattctgagtaatgtcctcaacaatcatcatgatgatcccagtttcacaaagattggaaaggatgagagtttaaaagttattgcagtgttaaattttcattttgtttagggatgaactttatttcttatagttccatggaactgaaatgagtagttgtagacaaaaaatttgattgcttgatggatatatcatccagttttgcaaatgttattttagaccacagattcctaaaactgacaccaaaggttattcccttctccttccatcaggacattgatacctatctgaaaggatgccattttctccccaagcttaataatgaaattgttgaagagagaaattccacttacaaggaaagatttgcaagtatagataatttggtacttataatggtgagttactgtttcagctattttattttttttaaaaatattactatattatttatctactttttttcattaatttttattttctcttcttagttcattatgtaatttgatgctcaaggcttatgccaatctccttttctctgcatgattgagcagtttgagcatgatactatcgttgtacctaaggaaacctcctggtttggatattatccggatgggacctttgatccagttctacctccacaagaggtaatatgttatttccataaactttacttttgttcttagggagataattaaatatcccaagcaagtggtgggaagctgcactttagaatagtttaaattttcattttccttttgccggtcgattcaactgaaactagtttccataacatgtacagacaaagctatacactgaagattggattggtttgagaaatttagatgaagctgggaaagtcaaattcattagtgtaccaggaaatcatctacaaatctcaagaaatgacatgaaaaagtatatagtaccatatctggtccatgatttatcaacacaaccaagcataaaaaagtcttcatcttataatcggttttcctcaatctggaacaagctcttggaattggctgcatttacagagggttagcgattacttgcagtccgttgagtattgttctttattcaataattttaaaatggagaagttagtaaaagaaaatcttcaatttaacactttacaatggacacatttaccacgaatatgatgcaattgttatatctatttatatgttggcgtgaaaaatttggacctactttcatggtgttgtattatggcatcatagtgattaatcacattttatttggaaaatttgattttttatttgtataatagggagaaatttttttcctaaacatataatacattatattggtaagatgggacaacatttactatattcccatattacccactaattcaaatctgacctctctctttcccctctctttctctctttctctctgtctcgcatctcttcaccgcacacagattgcccacagccgtcgacgcagacagcacacacccgttcacgcagaccgcccccactgtccacgcagtcgaccgccccatgtcacccacagccgaccgccccccaccgtcccctctctttccctctgtctcgcattctttcttttttttttttttttaattttttcattcaatttttggtgcttaaattgatgaaatagattaatatgttacaattttctgtgaaatttggtagttaaggttagatttaagatgagatttgttagttaatagggttgaaattggtatgagttttctgtcgaaaatgaattttttaggtcgggtccaatggggcttgatgcccgtccgatggaaaccgatgcacgttcgatgtgtgtccgatggtacacaaaattacttcatttttgggttttttggaagtcgttccgatggggtcgatgcccgttcgatgtgtgtccgatggta

SEQ ID NO: 227793 - DNA, 2049 bp, Cannabis indica
agggcataaaacctaacacaaacctcacaccaggttcaaacatcattcacccaccaacccaaaaccacactccaccacctcccactcctacaatacctccaaacggaacatcaccagaagacagacaaccctttgtcaacaccagatcttcttctggttcagccactccaccagttgacaacccactcatctgtcctaacatcaattttcatcctatggtcactaggtccaagttaggcatttacaagccaaagacatttcttgcatactccaatgataaaaaggaaccaacttcatttaaagaagcctttgccaatcccaaatggaatgctgcaatgaacaatgaaatgactgctttaaagaataagaaaacatggactcttgtgcctagaacttctgagatgatcattgtgcaaaataaatgggtctataggattaaacttaatgcagatggcactgttgaaaggcttaaagcaaggttggtggccaaaggtttccaacaaactccaagcattgacttttttgaaacctatagccctgtaataaaaccctgcaccattagaatcatgtgcacattagctatcccaaatggctaggaaatacaacagattgatattaacaatgtatttctgaatggacagctccaagaagatgtgtacatggcacaaccacaaggatttgtggatcctacttaccccaaccatgtgtgtaaacttcacaaggcaatatatggtctcaaacaggctcctcgagcctggtttgacactcttaaaggcactctggttcaatggggttacaccagcagcaaatctgataacagtctatttttctcaatcaaaaatggtaacctgctgcttatcttggtgtacattgatgatattctcataacaggtgcaaacaaatctgaggttcaacatctaacctctgctttgaacaacaacttttctctcaaaaatcttggacctgtgacaaacttcttgggttttgaagttcatagaatagctgacgaaatatgtttgacacaacagaagtacaccagggatttactggccagaactcaactactcgattcaaaacctcagtccactcctatgtgctccactacaaaaatctcagcaacaacaggtgttctcatggaaaacccaacacactacagaagtatcattggtgccctacagtacctcaccatgtcaagacccgatattgcctttgttgtaaacaaattgagccagtatatgcaagctccaacatctgaacattggggagcacataaaagaatactcagatatcttgcaagttcagtaggatctggactggtttttaaacctgctcatagatttgacatccaaggcttcactgatgctgattgggcaaggtgcttcgatgacagaaaataaacatcaaggtattgtatattccttggaggaaatctaatcagttggtattccaagaagcaaactgtggttgctcgatcgagtacataatctaagtatagagcccttgatcttgccactgcagagataatatggatccaatctcttatatcttaaatatgcatccactctacacaacctccaattctttggtgtgataacctaggagttggatccttagcctccaaccctatatttcatgctcgaacaaaacatatttaggtggaccttcattttgttcgagacagggttatttccaaacagcttgacataagatatgtggaaacaaaaaatcaaattgtagatttattcactaaacctcttccagcaatgccatttcaatattttctcaacaagttaacgcttggttttcaccaatgtcacttgaggcggctgttagaataggaaatagctaagtcttctattattgtttttctctgttttttgctttactcaatgtaacagttcttgagttagttagaagttagttaaagtttgttatacttctcttgtaattaactcaatatttaaatgtcaagcaaggccaactggttagtttagttgagcaatatttttccacccttcgtcttcatctctcccctctctctctctctct

SEQ ID NO: 227794 - DNA, 1455 bp, Cannabis indica
gagaaatctcactataacaaccacccctttttaccgaatggataccccacaaatatacattgacgagagcgagtgccaaatttgtccttgatacgaggttgatttttaacaaaacaaagacaaccaaagactcgaagggcatcatatttaggaggtgaactaaagagaatttcatgtggtgttttattattaagcaatggagtagaagttcgattgatgacataggcagccgtcatgacactctccccccaaaaggaaataggaaggctagcttgaaaaagcaatgcccgagccacattaagaatatgcctatgtttacgttctacccgtccattttgttgtggagtgtcgacacaagaagtgtgatgtaaaataccattatcagcataaaaccgatgaagacatgtaaattctttgccattgtcacttcgtagaattttaatacgtttttgaaattgagtttgaaccattttgcaaaaatcttaataagttgaggcacctcagattttgaagacatcaaataattccataccgcatgagaacagtcatcaacaatagttaaaaaataatgagcaccacaactagcaggcaaagtatatgcaccccatatatcacaatgaattaaatcaaaaacctcgtttgctcgactttgactcaaaggaaacatgtttctagtttgtttggctcttaaacaaatatcacaaggttcatgaataataggaacatctttattgccattattaaaagtaatatgaggtaaaagaaaatctactttgcgagaagggtgtcccagcctttgatgccacaagttacgttcatcgcctgtagttgcttgataagcctgaagctgtcgtataggacgaaaccaataaacctcatcacattgttcacccgctccaatcagagtccttaaagtatggtcatgtatgatgcaaagcttatcagtaaaagtgatagtataagagagattggcaagcaagtgtgacactgatagcaaattacaagtaagatctgggacatataatacattagtgagcaccatatttgggctcacagttatcgtgccttctttagtagcaatggtgtgctttccattaggcagcctaacggaagtaggagaaacatcaatcaattggctaaataatttagcattaccagtcatgtgattcgagcatccggtatcgatgatccattgagcgaaagaatcaaacttaccactcaacttttcagttgaagaagactgccctcttgaagtattgagcatattcacaagtgtagtccactgtgcatcggagagaccaggaagaccacgacgatcgtgctcatctatggatgttgaagcatcagatttcaaggtggttgcggcatgtgcgacttgcccacgaccacctctccccacttgctttcctccacctcgcccagatctgccgcaaccacgaccttgtccaccatgaa

SEQ ID NO: 227795 - DNA, 3238 bp, Cannabis indica
aaaaaatagtgtagagttcatttttggcaatttggttgtcaattttttttttttttaatttattgtgatattttttgagaatataatattttttttattcagaaaaatgataagagctcttgaactttatttatttatttagagaagagctcttgaactttacagccataaacaatgctcatctgcacaatgtttcatttcactgaaaaacattcttctgttgatgttttgtgattgtctttttctaagagaaaagcaaacaacaaatcctgcaatgaaaagggttattgtaaggcattgaaaaggatccatcagtaagatccactatgaagaatggtgtacaaaaaaaaaaaaaaataaacttaatggatataagatatggaattatatattgaactaatattccttcaacatgaagcatcagcataacattcttcttgaagaaaggtcttcattaagaggcaccaaagggtcttcttagtatttttcattaaattttaataaagtgaggaagatgtttctgattttaaatacacttggcaaaatggtatcagttgggttcttaaagcttttcccataacttgtttgaattgctaccttcaattactcataacaccattggcaacactttcattaacttactcaaatttctataactcttaaccttaaaggagttgtaagagcaagtcctatttcacaccaaattatctccatacgtatcttagcttaccaagaagaatagtatgtcaacttggtaaatctatgcaaatctcctttctctctatatataataataagacaaatgctaaaaaacttcaatagtgtctaacactcagtaagtggtgctagagatcactggtgccttatagtaatgctcatataataataactaagtagattatttcaattcgtatgctctttccatttgatcaaaatcccaaccaaaaattacaaataaaagaagaaaaaaaaggtaaaaaagcataaacaagtatcaaaacaaaaaccaaataccccccaacgaaaaaagaattaatgagtaagagagatataatattacctatgttacacatatgcatgatgagttaataacagagccagaaccagagccctcattatttcactcctttggagaaataccaatagatgctgccaattcctctaattgcttcttcccaagattggctataagttccatggagatgaagtgttttggaatatttggtaactcctccaccttaaaattatatattggctcaagatctttggcttcagattctgcaacttctttctcagcaaggagaagcttagcctcttcagcatctccaaattccaacgcaactgctctttctgcttcagcatatcccgccgttaaaaccagcctctcaaatctggccatggctaactctttttccttggaggaaatgaccacctctgtctcctccagtttctcaacagtgtcattaatttctttctcgagcttctccagctctaataaacctctttccatctcagtctcgatgccattcttctcaactgtcagtgattttgcctcagctgctattcgtgcagcttctctaaaatttcttgcagttgcagccactttcttttctacttccagctctgggactcttttgtctatgaaaattatcttttgctttgacgatgctatatcctgttggatgctagattttcttgtagatagttcctgaagggaagatcttgaagacgaaacctcttgatggagcatttgaacttcatcagaaagcttcttctcagtcttcgcaagcctatccttatcttccttagacttcaaaacaaaagtcatcagattctttctaagttcaacgacttgatggtatgcctcagcttcctccttggaagagtttccaagttccctcaactttctctctttctcttgctcattcacgacgaaatcatcaatttccttcttcagttcacacaaggatttgctttctaattctatgtccgaaatacaagactgcaagttaccaaatttagagtcgatgttggaatgcatctcctgaaaaccagagacgacatgggcaatcctgttctcgactgctttgatgttagaatcggtttctgctatttcttgttccttttgttttacaagagcaagtagctcctgaagttcgtccaaaagaacactcttcttcttgcaaagagactctttttctctctggtcatcctcaactgagttctcaattgaactagtcaacatagtccgagcttcatttactatgtttgactcgatttctaactccatctttttaagctccaacgattccgtcgaacactgccattcctccaatttcttcgaggagacttgttcggctgttttgaaacccaattctgctttttctgaggtatcctgttgaaacacaaataagactaagaaaggatcccaatacaagaatcgaaacaggtaccatcatcatcattatcattatatgtaatcatataattatcatacaaataagtatcccaatcaagaatcaaaacaggtatcatcatcatcatcataattaccattatcattatcatatcatcatcatcatcattatcttgtggaaacaaataagactaaaaagaagaatcccaatacaagaatcgatacaagtatcataatcataatcatgtggaaacaaataagactaagaagaatcccaatacaatagtcgaaacaagtatcatcatcactatcattatcattatcattatcatttacctgagcgaattggtggagcagagaagcacattcttcctcagcagcaatctgagaagccaaaacctccttcatcctcaattcaacctcatcgcatcgagcctcagcatcagcaagtgccgccacaagagtctgtttttcagattcagcagcagccaaactctcactaagcgtttcagcagtctcaaaatcctccgatctgcaagcctcatcgagtcgagtttcaagctcagcataagcgttggaagccctgtgtagcgtttgagcagctttccttctgttagcaatggcttctttccggtcggcagacacagaagccgccaattgacgaacgaattcaagcatttccgagatctggttcttaatttgaagcagtctaaagtcgaaatcgacatcgacggaagaagaaggcggctcgttcgaagacggaagatgttgatgatcgtcggaaattggtggattgtcgtcaaaagcaacagcagaagcatt

SEQ ID NO: 227796 - DNA, 1122 bp, Cannabis indica
aaacaaccgtaaaaacttaacactgtatataatatttttaaaagaaactccgcctcacggtaaaaaaaataaaaaaaaaaatcaatatatagtgtaaaaactcttatattatacttcacaaagatgttaaagcatcataaatctcctttaacatatctctacttataactacgaataaaattaaattatcattataagttttgtattttttaaaacaaaattatcattttataatggggggtaatatgtacacgtatataattcataaaattaaccttcacttgtttcatcaaaaaaattaaccttaatgccatatatatcctttattgaaacaaaagtaaaaacaaaatgatccaaaaggctgtggtatcattatatatagataaatttaatgattagttcttacgatattatctatatatatttatatatattatttcggaaaatatatgagtattaattcttattatagtatatgcatcgatccttctcactttatctttagctcacttaataaatcaataccatacatttattatcatcgcaataaaattatatttgtgtaaaacgagatagtcatgtagttttagaattattaatgtacggtcactatcatctccaacgactacctagacataatataaatatatgagtactaactaaaatcatgtacgtaattcatgaggaatttgcgacattactaaataaaattatgtatgaatatgattatgagaatattttcataaaataaaagcattttaatttcatatcaaggttcgatctttatgtttaaatataaaggttttgatagagaaattgtcaatgatatatttttatctaatggttaaaaatgatttttgggttaagtttccataaggtttttatttatttgcaaattttaaaaataatttatgattatatcgttattatattagtcgaataaacctaaaaaaaatatcattgtaatttactcttcaatgtaaatattttaaaatatgggaagtatatatttttttgttattttcagaaaagaaactatttaattactaatatattgattagttattgttttataaatttttttaaatcttagttatattttattttagaattttattaatt

SEQ ID NO: 227797 - DNA, 1889 bp, Cannabis indica
atagaaaaataaaatttttaatagagtatatatttttgtatgtgtatattcaattaattaattgattatttattaacgaaaaattaatattttttaagccttcaaaaaaatattttgtgtttttaagggaacaacaaattaatttatgagtatagtataattttaatttttgggagttgatttaaaaagaacataacatctaaattacaaaaatgatttctgcatatatcatctaaggattcaattaattatcaaaaaaaaaaaatctaaggattgaatattcctaggccaatttttattttaaaaaaataataaaattgaatttggttagagcattactatatatatagtatcatgtccaataatatcatattgtgattagtatagtcgagtagcgaacctcacgtattctaatttaaatttaaatacgttagaattaatattaaattatacacttaataatattcaatacataacttttaatttaatttgagttcttttttatttttgatattgaggatgaatgattcaaacctcttctctgtaagaaaaaagtacaatttttatgatgcattttaaaaagagtataccaatatatttttttatgtattttcgaaacagttataatcttaaatatatttatatgattgtctataatatgattatttaaaatattttgcaattttttttaattttattgaataatttaatgtgtcaaaaacaaagttcaaacaatatatttcattcccaaattaaaaaataacaaatatatgtgtgcatacatacaataattattttaaattgtattttcaatactgtaaataattttttcaaaaatttataaaatatattaaattaccacaatatatactatttgaacaccattttatgcatagtccttaggagcattccaacactacttggcattgcaataattaattcaaaatacaattaatacaaaaatagtgttacacactatagtgctctatagtaactctttgaagcaacacattataatttgtctcacatgttttatttaaaattataatatttaagactccatattaaattgtgttaattactacatgccatattaaataatattgagctccattgctatcccattgcaatgtacattcacaaggcactataccttaatattgatacgtgcaagtgtaataatattgttctcacatatagaaaattaataagctcgtttttagaatgcaatttcttcaaaggtttctagatctttaaattttgttctccacaatttagttaaataaacatttactcaaaatataactaaagataaaattaatactgcaggaatggttaactgcaagattccacccctaatggggtgggaatttctcgtcttggcggttaatgggacggtggtactggcggaaaataatttcaatacccaaagcgaggatgggacagagacgggaataatactactcgtactatatttgaccccgatatagatatatataatttattttttatttttaacgtatatagtatatatatcattaataattaagattattttgataatcatctataatagaaattgtatatcatatgcttaaattatgaaaatctaatgacagtaatgaattgatgattgtgaattacaagtgtaaaaatattttcttctagattcttagtttcatctttatttactttttaatttattagatttatttcaattattttaaattattacttttttctttttcattttaccttaatgaacacttaatagattctccataaccgatgaatattctcctacacctaatccactagttattagatagagatgggacaaggatggagacataaatagatagcaatggttacatttcccgtacattaac

SEQ ID NO: 227798 - DNA, 1292 bp, Cannabis indica
aaaaaaaaaaaaaaactcccaaacattaaaaaaaaattgatccaagaactaaaatcaaaaaagccaacttgtgatttaggatagtgaaaaaaaaagagccaccaaaaattcaaaaatatcgatctaaaaaagtaaagcaaaaaaagttacttgtgattaggaatagtgaaccaaaaaaagaggcgcttatgatcgagttgaccaagatagtaagcaaataaaatagttactatcttgaggaaatattttgggataaaatctcattcatcttatcccaaattttaatacgtgtacaagtaggtctgacctttcctgagggttatgtatacataattaaatgatagccagccatgcatatatatggtatctaaacttgaagggttgggggaggaaggagccatttggacccctgaatgtaaccaagattgagaaaaggtttggcttggtcatcggttagtttcttgaaatatttgactctcccttctgtggctgcacctcctcctgtgttcttatattcaccaaagaaaacagtcttatcacattcagttttgcctttatcataccatcccaatggcgaaacaacgccggccgccatatcagtgtaggcaaacaccactctcgggctgcactgccaagctctgcccaaaatggagtctttggcagtgccaacaattttacaatgaacaaatgagtaaccagtatcatcaggtttctctcttgcttgtgctgttatgacagaggatcctgtgtggtcacccaaaacattgagttcagtgtttaaatatagagacgtcccacttccaaaaatgaaatccactgtgccttcaatgtaacaatccttgaaaagatgaaaccctctatcgtcgcaaagtgtgtcttggaatcccaacattcgtacgttgtaaaaagctgccttgttccctgatgctctaaatgctacagcctgagctccctttcttacaccatctggttttggtgcagaattctaatcataaacaaaataacttatgttaagaaaaatgatcacaagcgtataatttattttaatttaaataaaaaaaattgaaaaattatataatgtactcctttaaagtgatgcactcttatctattttgatatctgagagattttttagtccaatttttttttttttttatggtcgtgcacgttataattatttaacatattctgtaaaattttgagaaattcgaaaaaatttaacactttaaaaataatgttcaaactgtctgttatacgcatgactattttattttggagtttttttttttttt

SEQ ID NO: 227799 - DNA, 2330 bp, Cannabis indica
atttgacaaagttaccccgctgatactttttgttttattacgttaattgagactgtcttttaatataattaaatatatagcatgaatagatacaaaaaaggtaggtataactttattcaaaaaaaaaaaggtaggtataactagtctgctcagaacactttttagctttattaaattttagtccaaacgaaaattaaagttattaggaaatatataagatctgaattgcgatctaattcataacctaattttttttttaaagcataagatgcaaatagtatttactcaaaaagaaaattaaaaaattgaggagattccatacacaatttatgaaggaattttaatgaaattatatatataaagtatatatacgtatatacctttcatagaagtccgttgtggcagcagagttgacgataacatctatatctttccacatctcttcactgagatttgcatctttgactcccaagttttgcatactaacatctccagctactggaatcaacttttctgatataaacgattcaaactccttaccccattttcccctaatttccttgaacaactccttccctatcaccttcattatataatatatatatatatatagtatatattatatattaaaactcacagtttaattattatatgatcatatgttattgttctacgtactcattaatgtatataaatataaatattcaaacttgtataacgttatatatatatatatgttaaaacctcagattgcatgcgttggatagctgagtcgtcatctggagctcttaaaagaagatagaacttcttcacatttggttgaatcctcaatattttctccacaagaactgcaaatacatacatatatgtatgttcaaaaaaattatgaatgaaaaacagaaaaataatgtataagatccaaaaaacatgaagagataatatatttatggattgtagtttattaacaaaaataatatacgtacgttttccaagaaagccagtggatcccgttaccaagatagttttactctctagaaaatgttgtatgctttccatctccatatataattattctccttgaaaattacaaaatgaacaagtgatattcgagatcgatgagatgatttccttgccaatatcaactccaacacgtttatgaataggctatattgagatatttctctctctatctctctctctgatatttatataaagatagagtactatagttgtattctgaaaaagggcaatgtatgtatagaaatatatatacactacatgcaatgcaagtagtagttcatttgtttggttcacattagggcggctctattattttacttccctaattcactacatctacaattgacgatcccattaatgaaacgccgtactcttttttaaatgtcttttatttctatttttattatattacatatatatatatatatgtggtttaattaattataagtttgttgtgaaagttatggtttttagttggggaaacatttatgacttttaatggtaggcacacacatatgtatatatatgaatgttgtcacacagtgacattgacattcacgattttttttttttttggaaacgacgattataaattaaattacgaaaacatatatataaatattatatttaaaaaaaaaacaaattaatgcctaattataatttgagataataaacattcaaaagcaataatattgtaattatatatcgtatgcaactttttttatttcgaggtgtgttgttcaaaaatttagtactagtactactatatatctcaaacaaaaataataataaaattaaattaagtattgttattgtttaaaaaaaaaattactatttattgtacgttgtgatcaattattttctacagaaattgttataaaactacatgttttgtagatagattttaataaaataaattacatagttttttcttttagagtgtgttctcgattatatatggtgtggaacagtggaagggtgcataaaaagtttaatacacaactagataatcatataataagtataataaagattggattgtgtgggttctaatagttagattaattttggtacataattcaattatttaatgaaaattcaatcattccaaaaattcaatccaaattcagtagttagagtattctaataacagttataattaaggtactccacataagtacctggataatttgttttgttattaatatttctaaagttttataagacttcatattaatttacactaatagttatttattgtgtaatatttagaaccataaaatgttgtttagcatttctcttatcaatat

SEQ ID NO: 227800 - DNA, 2725 bp, Cannabis indica
taaatctggagtaaactgcccctgcatgcaacagaatggggcttgggattgtcatgtgtactctctagatgagtattatgtatgtagtagttttggtactctttcagcatcctgcagagttcttggaaaatattctacctgagttgctgcatttttagttggtaagaagtaaatgacttgcttttttctcttgaaaccaaagtctgcttttatggtcgtcgttcttttaattgttaattttgtagtagactctggtacttttgtaactgaattcttctcatcagtggcgaaatataaatgctaggctgtacgagacaattcctgtgtaactattgctctggatggtttgatttaattggctgtgtctatgtatctttctgcttcttgagcaaattagctgacattaagtatttttaggcttcgtagctcactgtggcttcagttcaaaccacatcacattgctgctggagccacttaccttgctgccaaatttctgaatatggatctaggtacttatcggaatatctggcaagaattccaagcaactccagccattcttcaaggtatgcttaaaatttattttctaaacttatcttgagtacacctttgtgtccatatatgctcattgatcggaaaagagaaataaagagaaaatatagcaccatattgaatgtgttggaattttctaggtagtgttttgtatgagcacacattttaagcttttttgttgtttgcttagcatctgattagcatagcatgtgtgaatgttgttgcagatgtgacgcggcaattaatggagctcttctaaaatataaactgaatataattttcttactagattttatggtcgtggtatacaagtgttttctttttgttttttttgggggggtggagcaagtaatctatgaatgaagtactctacttggagagggctatgaaagtgtattaagaactttaaagagtatcatcctgtgaggaggttatctactagtagtagagtgacaaaagtgaaagtaaaatgttgtccttttatctccgctatttgtgtacaacttattatttgtgaaatgtgaaagttcctgcaaaatgggactggcctaattgtacttgtccaatattcactcaaataccataaacagattcttggctttttaagcactactaatagtatactagcctagtacttcattttcaaaattagcatattagtattcacattattaacaataaatagaaagtacaactgtaatagagtaatttgcggcgataatatctaagtttatcttctagttgcagattaatatttaagtgccaagtcaacatttacatgtcattgattggtctacatcatttaatttatattttgtttttaaaaattaatttaaacatttaaaaattattttaaaattaaaaagttatttaaaaaatcttttaaatatataaaaaattcaaaatagtttattaacataattacaataaaatgatttattaaactacttgaatgtttatttaacttcatccatcatctaaacagaataaaaaaaaatccatcagcaatttgaattcttttttgagcctagaaactttctaagcaatactctatgaattccatcttcaatcctctttcctaactccttccaacatgaaagtaagacaaaaatcaaaaatcaagaacacaaacccatttcttcctcccttacaactccaacccagaaacttaagaacaaacacccagagaaattttctgggttcaaaataacattcagatctgcagtgagagaaggtaatttagagagagaaagagttaccatccgatcaaaagggttatggtttcataaccccatcatttacagatttgtacctaagaaaaggagaagatgaataccaaaagacaatgaaggtcacgcgtagataaagagagacgtccaactgtgcttacggtggcagaaaggtcaggctggtgctagtttccatccaccattgacgtcgacaaagagaagggagattagcagaggaagacgagcaagagaaggaaaaggatctctcaagctagtggtgagtctttattttttttttgacgaaattcgaagatggctcgatcagatctgaaagtggttgttgtgattgaagagagagaggaagaagaaactgaaggagagagaaagggtgaggttgaataattttagggtttacttttaatttttgtagaatttaatgattttttaaaattatgatttttttatttatttaaaaaaaatcttattgaattaaataaaaaaatgagttggaccaattatgatgtgccacgtaggtactgattggtcacttaacggtcaggtacctacggatgcaacaaaagtgtaacagaatgtatttttaccgccaaaaaaattacttaggtattaatctgcaactagaagataaacttaggtattatcgccgcaaattactcaatacaatattatttttttgaggagtgttaacgtcaacctcctattacaatcttttagttaacttctgtacttgaaaaaatacgtcgaaaaatattttttaatctttttttcatgactgttatggtgagatataggtttagagatattactttgcaccttctccaaatagcatcaacagatggaagcaaacatgaacacctctttagtgtccaccccatgagcattgagacccaaagaaatttgacccaatcccaacattgagttctattatc

SEQ ID NO: 227801 - DNA, 1590 bp, Cannabis indica
agagagagagagagttaataactactcgcatacaaaaagttccaacaaggaataatctagtttcgaatcattttctctccatgtgcgtcctttgtaaatttattgtttaccaatacaaaatgacaccaaaagttaatataggtaacatagattcggcttacaatcataaacatcaaagtaaaattctgaatacctcttcaactttaacttccaacttcagcttcacacgctctgcatctcttccaccagaagcagcttctctaagtactttcctatagcaaggaacaaatgaatgagcttgtcatggaaactgccactaaatacacttactacacacaatattaattttcataaacccagaaggaattctacggcaatgttgaattgagtgacttttaattcttggactcattcttttttatttcttgacctgatccatactttccaaaatcacttccttattaccgttataaataatttgaccaagcaaacattgtaacccaaaaaggagaaagcaatgaccaatgcctcttttttttttaagtaaccaatgcctccattttcaccaataagtttcaaaaggttttctataccaaaatttacaacttcaaatcaggcaagtgattcaagtgaaaactgttgattgagtgacttttttcaacttacaatcgtttactatctagacctgactcaatatatatcaatatataaaaccaaaactgatcatgattttaccaactagcatagacaggagggttgtctacaccaagaattcatgctttttagtaggaaaataatttaagtgaaaaaaagtctccagtttaacaagacaataaatagaaaatacctgacagttacagccataacactgtccccaggagcaatcaagttataggcataccacaaatcgtcggaatcaacagctaccatctgcaacatcaccaatataaggatttacagaagaaatttataaatatatataatattcttaatagcaataatgaaaaacaacgaaccttgacgcttccaggtccgtttcggacaaagtccttgcggacgattttcatggttgtttcggagatttgatgaagactttctttttcttttttgagcaagcgatgtggagttaagtaattttttctctcgtttttttttttttttttggcagatgtggagttgaagattaagctaaaattgataattttaattattattatggggttttttatttttacactttaaaatatttttttttgtatttttacgaaattctacataaaaattcttattacaactagctctgcaacttaaattgcaacaaaaaatcctatagattccctattgtaactagcagtgcaaccactctagaaacccaaacagtaatttaaaaaaaaaattataaaaatagtatatggggtaattcttcaacaacttttaaataatttcagaggtaagttgaaaaatgcctcttttattaatctattaatcaaatttacctctaatttttttttaattgaaacatactttttcttatatgtatttcacctaaaatgtcttgatataagagagtcacatggagagtatcttgaa

SEQ ID NO: 227802 - DNA, 1664 bp, Cannabis indica
attcatatatatcttgctacaagaatatattatttgcttaagatttctctcttttcattcttagtttttttagcctttattagttttgatttacttcaaatatcaagtttcaaatattaattggtatttgttttattattattttattatatataaattttcttttaaatgggttgtggttctcgaatatttaatatcagttcaaatactaatgagtatttgttttattattattttattatagtataaataatattttattattttattaaataaaaataaaaagtcacccatgaatttctcataaaccaagaatttcaattatataaacacactttatatagaatagatatatgtattttttttttgattaaattatatatatgtacttaaatattattaaatataatatatatttttttttgtaaaatggataaatgcgcactagatgttctcagttcgaactcgagctcagacatttcagattcaattcagtgttaatttctatacattcatattgtgttcaaattatgattttacccaagaagttgcttagagatgttgaagcaattaatctgtagaatttttttgtgaaagagggtctcggacaactcatcccctggcctagtagccttgaataatatttgtttacctaaaacagcaagtggattgggttttaagaaaatacaagattaaaacttaactgctataggaaaatatgtttgagcaattacaaagaagaatgacaacatgtttataaaatggaaaaatagtatttatttgcgaattaaaactagtgggagtatgatactttcacagattgtagctggtattggaaacgattagttgttgtgaaaaaaaatttaagacaaaatgagtcaagactgtttcatttcacagaaatacagtatctgacttaggcataatatgttgtttgatcataaagataaagtaacttggagtaaatttgtttgggataggatccaaagcataagtttgtcatgtggctggttatgtagtagagtcttaacacaaaggattgaattgtgaagtatgatttgaacttagatcaacacttattgatttgtgaaatagaaaaagaggatataaattatctattctttgaatgctcttatagtaagagatgtttgaaggttgtcaaaatttggtttcactggaaagtgaagattgaaaagcttagaaaactactgagatggatttctcatgcaaaaatatgagcaatacttgcacgcaggggcggagccaggataaaattattcggggggccaatatcagcaagtgtatacaaaaagtataaatttcaattaagaaaaatgttaaaaaggtttaattttaataaatattttatgcaatattttaaatattatgaatcaagtaattaaactcaaaataaaatatgagttttagggtacgttaggaaaatcaagagaaaattgaaattggtaattgaatgtaattataaaattttgtgtgtttgtctaaccacgcaattatactatatataattgtgtaatggaagggtaatagagagttttccattacactatctaattctcatacccttataaaaattgagtgtaattatacagtgtaatttctaaaaatttttattttaaatattaagtactaaaaattattatttt

SEQ ID NO: 227803 - DNA, 2498 bp, Cannabis indica
ctcaaattacctcttatttgtgctgaaaaattagagaagatactttagttttaaacattaatattttttgtacaaaaaaaatcatgaaatcaagttgtcgactgcagaacgggactgttcagtttctttaaaaaaattgtggagtgcaggacgggattgtttacaagcttctcaacccgaaaaacaaaggtgatgttatgatgctgatggtggccgcggtgtgggataaggtggtggagccgggaggatgttatatcgcaagagtaaaccaaaacagggaaaaaaggagttctaactgccacatatatagatatatagattgttggcaaaaagttatttttttgaaagaaagtatctgctaagtattactattgatagacctattaatgaacgaaagcaaaagctatcaattagcctttcacttcaaggttttttatgagagggatttctttataatatttgttacaataatagatgagtaattctccatattagagactggcatgactaggcctcattcaagaaggaaaccgtcctcttcatcacgtcccgagctttctcactttctggttttatcaagtgaaaatcatggccctccccttcaatctccataatctccaccaatccactccacccactttttttcaacgcctcgtagtaagcccagcctctgtccttcaaactatcattctcagcaacaaaaaccaccaacttgctgcatcccagtttcgccagattcgggtcagatagcgggttcaccagcaggtcaccaggtccactataagatgggaaaatgtagtccagcaactcgttccgttcttcatcaccatcgaaaaacgggaaatacaggatcagtcccacggttctcggaccatcaacggcggctcgaagtacaatattattggctaaagtcccacccgcactatctccgcccacgaaaaccctctcgagatcggcgtattggttgatccactcttccgacccatgtccacggtaatgggccgcgacccactgaatcgcttcccatgcgtcctcgaaagcggctggtaggggattctctggagcccttcggtagttcactgacaaagcgatgacgtttgcttcggcggctacagaagcgacgaaggcgctgaatatgggagagaatggcgatccaataacgaatgcaccgccatggtagtatagtaggagaggtagcttttgggttggatcagatatttttgggaggaaaagcctggcggagagtccggaagctggtgagatgacgatgtccttggatcgtactccgttttcggtgtgaggggaggggagaacggttatgtctccgtcgaagcggtcaactgtgccgtctttgtagagtcggaaggaagggaactcgacagccacctctttggaggagtaatccatattttgtacaaaattggaatggaatactcctgttcttttgtttttataaataataataatggttggttatatttttaaatattgatattggatggtgtgtcatttttttaaatattttatttgtttattttgtctttttatatatgttagagtataattgtgaggagcgtgggaggtgggttcttaggcgatctccaatgctggcaacgggtaatgttatttttctcgcccactaactattttttatacaatttaaacataatttatttaatatataagagataataataataataataataataataataataataataataaaaagagtattattattgggcacagtgtgcatagcacttttaagacgtgtcgctctatgattaactagcaatactccctaaaagttattatattaaattatatgagataggatatttagttagactaatagtaatatgaaattaaattatatgagacctgatacttaattagaccaatagcgatattaacacgtaggaaggtacttgcactagtgatatcttttagcatttctctaaaaaaaaaaagagtatgttgttgtttggccacggtactcatatatttgttgaaaagttaaatatttatacgtattgtgtaaggctcattctctgacaagcaacttaaaaaacaataggaatggggattttaccttcctcaattttttatgaattaatttttatgtatatattttattttattttttatcaagaaagaagctttcattaatcacttgaacaaaaataacaagcacaagacaacaaagctaaccgtccctgcgtcgtgttctcaaccagctaaaaattttaagtaaatacacttgatcattagtactcatttttctcttaacatagctgtgccatctaaacaatagcagattttttttttatttttttatttcagcaactaaactagcagctgaatgagagaagtgctcaaaatatacacatgttcttgttcctctaaactctacataaactgcagcagccagaacgaagttagaaactgcagcaacaaggcctttccctttgttgttcaaccactccgtccag

SEQ ID NO: 227804 - DNA, 2700 bp, Cannabis indica
ctctctctctctctctcagtttgctagagttttctcaaaaaaacctggcactgccagtcttatttcttcctccagccaagcccgccaactcgagcttgggtgtggctctagtcgggatccttatttggcacgttaggggtaagtgaatggttcaccttaatcttgtatctattttatttctcttagtttcaatctatttatctgatagtcgttgtgtattttttggcctcgtgtgctatggaaaggtgatgatcgacccatatctgatagagcctaccaaaggcagtttggtggttctgggttgggtcgattcttagttttggtagggaaggagattgcgtttggtttatgggatgtgggaggagggtgcggccaggattgtgcttaggttgagaccatgggtatctttgtggcttgttcggatttggtgtgtgggggcttcggggtgtggaaagatccttaggagattgaagttgattggtagatttgtgtctttggtttgccctctttggtgtctttttttagttttttgttgttatttcttgttttaattttttaatagtggtgttttttcaccatcctactagattagtaaggattgttattagcctggtgcaagatgtaagtattgtctactattggtttatgggtgtctcatcgataattccaaattattttggagaggatatcttggtctctctccttggtcgtcagatctaggagatctccagatctttattggccctttgatatatactctaatattttatgattaagcattacaacatggttggtcgtgttatcttccttagttatgatttaaataatggggttgttatgtttcagtttttattggaagatcattggctgatattctttgataggtggattctttcagatatttatttggtttggaagcctagtatactttacacttttttgatgattgaccgttggtgacttattggttccctaattgaggatgttgttagggttttcttccatgttattgtaaacggcttggtatgcctaattttaatgattctgctctttgagctatattttcatgcaatggactttgtccgatttatctattaatggatatttttgtttcgtctaaaaaaaaaattgaacaaggtttgtacacctttgtccaaaagtttactttcccatacaaccaaatacttagggatttatggaaatgattatgggaataaacaagcctcaaaaaatttctagcttagtgtttgaagataaaaaagtaacgtgtcaaatgagtgaaacttagtcctctatttatagtgtaggaagagccaaattttgaaaatcaaatcccatacaccaaatgaaatgtccgtgtaagagagatttgtagagcataaaaatattggctaagaagttggaaatgtcccccattgaatgcacaatattttgtaatgtttatctcaaaaatggctaaggcaacatgttgcttggagcaaaaccttttgaaccctttgagatatgacgtttaacgttgaaaaccatgttatgcactatttaggagacatgtcgcctgaaacatttctttagctcaaatctggagatttgaatctcttcaatgagacaactccaattccaacgttcacatgtgaaatacaatgatgtcatcaatttctaaaaggtaggaactttctccacatgctttcataacctccaaatataattatgcttttaattacttatcatcaggtttgattcatttcttagaaacctatttcagattgtaactccccaaatgttacaactttgtatttattacaccatatataatgtaacttataattttgtagcatctattgtgttataaaatatgtaatttacaataaatattattctcttaataatatataatatattaaaatttaatctcaatattatattatttaattaatttataaataatactatattccttccactagattaaaacttgtggtactttattgtaacacttatttaatcaattaaatattttatatatcccccactttaattgaataaaccaagactttttataaagttcttgtgcataaggtaaagtgtcttttaacttgaacttacatgtgtgagcactcgtccacttatctggagatttgtgggttaacagtgtttaactcactaaaaaaatagatgtagttacctcaagactaactctacaagttttgttcagtgcttgaaagcgtcgtcaggttcgtgagctgcaatcgattaataacaatgaaataccaaaaaactttactcaacactcttattcattagatattaaattcagttacatcactgtgagctaagttgaaagaaaaaagaagagtagttgtagacttccattttttatcaaaccttagctgaagtgatccccactacactattgtcttgtttgaataatagtgtaggggtcataccttagcaatggacctccctacctaaagatgacttcatcgcatcttgtcagttcgagaggcaatcgattcacttgcacaagataaagtgaatctcattgtgaagtgaactatctagggaacagttactttgtcgataatatcgtctcaaatgctctctttcccagtaccttaatactggcactggattcaagtggcagtcatagtcaaactccaacctatttatctcgggttcaaatgcttttgtgatgatataagg

SEQ ID NO: 227805 - DNA, 3330 bp, Cannabis indica
ttagttacaacatatatttgtattaaaagatgatatttatagacataatagtaacctttgtgtaatggttaaggtagttggtaaataggttagagggtaaaggttcaaataccactaactatactttatattttctttttaattttatttacgcccccctcactttaaattctgggtccgccactgtatatatatatatatatattttcatatttgatcatttggcctaattattcaacaaaattttccaattttcttggtgaaattttaaggtgaaattataccaaaaaatcccaacaaacaatatattgcaatattgtctatgtcgttcggtaaccaagtaaatgtttatttaatgagtagttgtcaattaataatgtcttattaattaaaaatactattggatttatttaagcttttgttcttctttttcttctcttaattaatttctttttttttttactaataataaaacatctagatgaaaaatgacatttccatgtgcattacttttgttattttgacattgatttaagagtcgaagtcgaacatgattttttcttctatattttggatactatgatgatcagttttgcctgatttgtagaatttttttgtccatttaacctatgaatatgaatgttctttccaaataataagattctttcttaaaatagtagatgcatgtggatattatagaaagagagttttattgtaaggttcacaccatggaggagatgactagtatcttatagtttgacagattctattacatttgaatttgttgggtgcaattaaagttctacattagtagatatacatcggtatgagatattttaaaaaaggtgctcaaaaacaaattcgtgagagctttctagatagggatgcacatttttttccattgtgatgggggacacgtagattacttgtctaaatggggaatggggcgggatgaggatcattttttgtccccgaatgttaaaaagggaggggacgagatgacacaccctaccctgacggggcccgtttaatattttggttatttttttaagaatattttattttagtatattagtatttttttataaatttttaagttgagctttggataataaatagtatattgaataataaataatgtgtaatattttaattttatatatattaaaatttttctaggtttaaaattttaatataaactttatttttatgttacgagattcttcgctctattctcgccccatcagagaattttatgtcccatccctgataaagaatatgcaggtgcaagctccccgctgatcattcccgccccgtatgcatccccacttcccgacaccttaaaatatttttatataattttatgtatataatatttccaaattaaaataaataaataaagaaatttctatcctctcaaaaaagaaaatccaatttcgaatcccccttataaaaaaaataaataaataaaactcaggtgtcctcctttgtttgacactaagaattattaattggtcagtaagaatagtaaaactcataattctaataaatataaccccaaaacttaatcatattattaataattaatcaaattgaccaaaaatgtctatgtatagagaaattaaggtaactaaatttgacaattgagagttgagagagttgtagtagtagaaaagtacacttctcccaccttacttgattgataaaagtagtcctctagaataagtgtcatttgactatatatacatttaaattaaagctaattaattcaaaaccaaacacccaaatttaccaataaaaatcaaactcgattaaaaaatgaatatatatatcttctgcaacaaacaaaccatgtgttagttagttataaagaataataacaaggtaaaaagtaaataaacaaaacaatttgatttattattactaagagtggattggttaatatgcccggattactaggcggcttaagaacattctatggcacaatttgacaactagtcaatactatgtccctctctccctatgttactttggtaaaaataaaggtcttcttataataaatataatattaggaataggggtggcaaaacgtgttatcttatcgtattcgtgttatattttatgtgatttgtttctatattttgtgtttggtgtgtcgtttcgttttttttttatttgtgtctaatttttaatatgaaccctaactcgatctgtaaaaatattgtatcgtgtttgtgttgacctactttgacctattgggaaagtctatagtaacactttgggtattccgtagacttattttctggttcgacatttaagaaagatttttaattttaattttttttttataatcatgtactcacattttgaaaattttatattgttgaaaataagattcaaatattttatgtacttgtgattatttttttatatgtgtggtaactatttaaattttattttcggtattgtaaattatttaaaaaaatttatatgatcttaaataactataacgtacacgattataaaaaaataaactaaaaaattaatctgaatttcgaaacactgtctactaaaacatccctttaatggagtgcactaaaatctttttatgatatttgaccactataattgtattgtaaaaataatttccaaattgtactcttttctacaaggtaataataacacaactcatattacttgaagggctaagcaaatcacttcaattttttagacagaaaagagtatgatttgtcactagtaataattttagtagagtttaaaccaacattaaaataataataataataatttgatagacaaaaaatcatcatatttataaaaataaaattaaaaaaaaaagtcaaattgtttgctataacattggcctactaactctatctttttcttttgtaaaattatgtaaaaataaaaaaaaaaatcaattgagtaaaaataaaaagtggaaaagggatgagttatgtttcttgtgttgagtgtaaaacaaggtaaggtaatggaaatttaatctgaaattggtaccgcatgcttgattgatgggtctctttttgtgtgattgttatgtgggccctaattcaaatctaattcatttttgtaacaaaattaagcaaacaactagtcattatttttagcaaaaaagggttattaacttacaaatatttcaatttagctcaactaaattcatgattaattaacttactaacacttaaccctcttattgccaaatgtgacttgtttcgtttcgatcaaagattaattttgtgaacttaacttgaattcagtagcgatgtagctctcaaattctagtggatc

SEQ ID NO: 227806 - DNA, 2073 bp, Cannabis indica
atgttgtttgtttatataatattattattaattaggctctagcagttgcttggaaagatgcttgtgcggcaccaagttcagctaagatagtaattccaaaaggtttatacaaattaagaaaaggatatttcatgggaccatgcaagtcacctattgagtttgagctggaaggaacattgcaggccccatccacagctaacggcttccaaaagggcgatggatgggttacttttgagcgcatcaacaagctatccgtgtacggtagcggcactttcgacggtcaaggaaaaaatagttggggaactcagtgcgccaggactaactattgcggtcaactccccgttgtcagtactgcatttcctctttttctttcatattacacctaaaaaattgcattaaaatacgattccttaaaacttttactatctgtaatattttggtctatatttttttttggtgcacatataatttgtttgtattattgatttgattgtgttattgcaatgaaaacacacagaatattaggttgaactatgtgacgaattcggtgatcaagagtgtgacatccctaaacagcaagcaattccactatatagtttacggaggagagaatctatcgtttaaaaatgttaaaattatagcacccgaggatagttggaccactgatggaatccacattgggcgttcaacaaacatcaccgtcaccgactcgatcattaaaacaggcgatgattgcatctccatcggggatggaacaaagaaattgacaataacgagagttacatgtggacctggccacggaattagtgttggtagtcttggaaggtacaacaatgaactccctgtacaaagtatctatgtcagagactgtacattcaagggtagcacaaatggagttaggatcaagacatggcaaggttctcaggatagtattgcaacagatatgcactttgagaacctcatgatgtacaatgttcagaaccccatcatcatcgaccaagagtattgcccatggaacacgtgcaacaatgttaaggaggtaaatttatattcatttaaatattaaaaaaattcaaatttatccctagctaatataaaaatatatacatatattttgatgaaattataatacagaagccatcaagagtgaagcttagcaaagtgagcttcaagaacatcaggggaacatccgcgactgctgttggagtgaagcttatttgcgggggatattcgtgccaaaatgtggaaattagtggcattgatctaaaatacaatggcaatgggcccactaagtccgtttgtaagaatgtgaagcccatggtctctggctacgtgaacccagctgtttgcaaacagtaattagtactacccatggcacgaatacaattattatacaagttgaagtcattttttccttgttatatagtattcatgaatcatgctaattaacgggcatgattactatcttcatctaaagctatatacacctctctcttttagttagctttctgttttgctttaccatactatttgacgtatggttactggttagatgatcattaagtcatttgtatgatttttggtgcccgcggatgcagagtttcgtcgcggctagagaaataagataatcagcaatttgttttattttgttttggttttttttttgttttttttttcaattataaaataactaggaactattccgcaaagcgcggtccttaatattcattgtaataattttttttagtggcaaaatttttgtaatgagtgttataatataaaatatgacatagaattgtcaattaacttattttttatctgttgatttcgttttagatgtaacactcataaaatagtaaaagtacattgaaagacaaacagaatgtaacatcacctcctcaagttgttttatatactatttagttttatgtatctttatttaaaattaaaattaattactttaaaatatgggtaaataccattttagatcatgtgttttccaaaacgttacttaattagaccatctcttttgttaaatgggaaaattgatcctctattttgttaaatggtaaa

SEQ ID NO: 227807 - DNA, 6144 bp, Cannabis indica
agccaacataatcaacaatgttgctcaatacaatttcccaatcccagccctctctttctcagatatctctctccatttctcactctaacttctctctctttctgtattgtgtctctctcttatgtttgacttcttttccacttattatgaaatgagaggagtagttctctttatataagccaagggacccaatatgcaagttgtccgttttgatagttaagttagttaaagactaactaactaaccgaatcttggttattggggggtttaaggaataatacgacaacaacatcatcattattcgaaaaaacaaataaaagagagccacttgatcatcattaaagaatgatgccttcaatatttacaacctaaaatgaagcttatttaatatatgcaactaatttggaagataaatttcaatcaaggattaaaggattaaaaataaataagcataggggccaacaactaattgggacaagattacattggatacataatgaacaaaagacactaaataagtcaactccttagcctaaatgaatcaacaaaaatatacacttatttgaaaaaagggctttttgttaatattgatttatatattacttttttcttgtgctgtaagttatttgtaaaatctcgaatccttgcatcaactcttgccgaaaacccgacctgtgttgacttcttagaattgtcttgctctctttgccacatcacactatcagcaacatccttgttgcaatgtttcatctcctgaagcacatgatcatccatgggacagaacaatctttggatgacaatgtggaaaaagtaaggaagaagagaaacaaccacagccagcaatgtgaccaaccaatacaatggtgaagttcctagagactccaccaagagacgaaatcctcctttcgagtagggaggagagagtgcaccatacacaaacaagaaaatgtaccaaaacaaaatacttccccatatgaaaaggtgttggatccaagtgaagtggctgatgatgagagatatttggcagtttactgtccatattatacaggtgtatgtgatggcacctaggtgtgtgagatcagcaacaaatccgttctcttgaaaggcttgcggacagaggatgtagatgttggcaaggaagatgacaagagaagaaacgacgccgtttagaatccaaccaatgattcgactccatgtgaaatgtatgttcttttgtccttgttggtaaagagctggaaactgttttgtacataaagaagatatagaaactccattactagacttgtatgataatattctcatgtccaatcatggcttcattaagtttagatgtgaaataagggagctaaaagtttggaagaaaatggacaatttctctttacctgaaggcagacttctgatgaaacatcttgctcaaggactcctaatgatataactggcaaagaagtcaagatcacattgaacaatgtcatgtaccaattatcatataagacttccccagagaaacttgtgtatagttcaaagtagaagagagtgaggccaaatgcaatgttcttgtatacgaaatagagaatctgcaatagtagagagagagatgttaaatttatattaggactccagaaaaatagagatgttgttgatggagatatattagaagtagtaacaactcaccattttggaaattctcttgtaacaccagtggccatgaactattagtagtctccctaaaaaccggaattgaggcaatgagaagtcactggccattactgcctgatattcaaatttcatgaaaattgaagtatttgaggatgcatctcttatatcatttatcatatttaagaaagaaattgaatacaagcagctcaaaactgaatatgataacatactatacattttgagtctagggataacaatctatatgaatatgaaatatcattatagaaatacttttttaagaaaattttaggttccttcatcatattccttgcagtacaagtactcaaaatacacgagttgatatcatgggttgaagaaaattactacaatgggataaagaagattgactaacaatgtcacctttagaagaagattcatcatacctgcattccttccataccactgattccaactccaatatcagcttcttgaatcataccaacatcattagctccatcaccaattgccaagattgtctttccagtatgttcctttactaatctagtaatctgtaaaaatgtcaactcattaaacttgaaatataaagtataactcaattaaactaagctttaaacaaatatgcaatcatttcttgtaatatagattgtaaggtcaactcaattcttgaaatatgatctatatcatgtaaagtttgactcaattaaacttgaaacaaatagtgaaatcattgaaaggttaaaattgcattatgctgagctctgatatagtgccacataatctttttactttaccacaaaaattgaatatcatagacataccaaagctttctgttttggagaaacccggcagcatatgacagaggcacacataactgccaattgtaagaaatgatgcttcacatcacttttcaaagcaacctcaagagcttttccatcaaccaccaaagccaagggtgaacattgattattttcttttgccatgactcgataaaaactatcaagttggtgtaaaatgtcttctttcatagcctgaaaactagaaagacaaaatctgtaatcaccaactccacatttatttgaatctgtaatgaagcacatattataccaaacagtttctttatagaatagttttaacccgaccatatcacccaaaaaaatgtctatggtctttcaaaggattataagtgaaagaagtaagattttgtgatgttagaagtccattgagaggtctttggaagagaattgaaatattacaatgcaaaataagcatatgatggattattatcttaagcaaattttcacctttaattggccatttctttcagtttcattgctcaaactcaaatgcaattgtttcatatcctgtcgaagtaaactgcatgcgaatctgccagcatgggaaattcagcaaacaagaaacaaaacaaaaaaatgagcaacaccttcagttcatctttaaattgcaataattaggcctgtttgacttgaaactaaaagttatcctcaccctatatttattgctgtttccttcttatccccagtgagcagccatattttaatccctgcttgggcaagtttatctatacattctggaacctgatgtgtataaagaaaaagaaaatgaacattttatcctaactatgtataacatacattgtttaaaattgatatatgtccttagaagggaaattatgttatcataaaaatataatgttgttcaagaagatctcatctctgattccatgtctgttatcttattgattcatagaataaccttaataatctctcatgaatttaaaatccatatatattttagatctaatttctacaaattcattcgaatacatttatttgaataatatatactagaaagaaatataagaattgagaaaaatatacatcttataagagattacccctttctgtagcttgtcttcaatagcagcaactcctaacaaagtcagatctttttcaatcatttcagatgctttctctagtaactcatctctttcaggaccgattgttgtctttgcttgtgtaaatattttgttccaattttcatactcagacacatcaagtagtcgataagcgaaagctagagttcgaaaaccatcttctgcgtagcttgaaaggtgtatagttgtttcctcttgatatttcctaccatggtctcccagcttatcaaagatgatactgaaatgtaagatatcaaataaattaaagaggctaaaaatcaaaatatttccttttgtctaaaatattaaaaagggagaagaaacaaaaatatataaaatttttaacatcaatggcaaaggcatacctatctgcacctttgcaaagtagaaagattttcccatcttcattgctgactataacagacattctcttccttgaactactgaactccaatagatttaaaagcttatattccctgaaattaaccttccattaaatgtctaagcactataaaatccaaaaataagaaagtaagaggataatctttacctagtgactttctttctagaagaaggatccaactccttgagctgtattatggattgagttctttgaaaaaattggaatccgaattcctgcgaagcaattaggaaggctacttcttctggtgactcagcctcatacttgagcctattactattttcatcttcaacaggtattcctgtgtgacacaaagccatgactctgaagaacattgttacatcatccatattggagctatgaatccattttttgttcataattctatcatcccaaaagttgaaacccttgagattagatactttagataaagaaggcattcctgcgttttctttacttggatttccattactctttttttggccacctaaaaactccatttcagttccaatatcagcaattgagaagtcaaatttttcaaatctttggcttcttgtagtgtcaaaatcatctatactaaactgaaaagcctcaatttcaattctcctggatgcttcaagatcaacctcatttgtatcacccccatatgaaactcctgcaattgagcatttcctaaactccatctgattacatgtcaaagtccctgtcttatcagaaagtatcatttctacttggcctagttcttcattcaaattagaagttcgagcatgaactgagttgcaagacacttcatcatacatctccatatccttattgattaacatggcttgtaaaactttaacaacttcaatggatacataaagagaaatagggattaagtagccatacaatatgagtgctcttaaaaactgaagtaaaccagacaccataagctttgatggtctgaaaagcagttcatcaatgtcagtgtgaccttgttctaaacgaaggtaccaccatttaaccatctcagacttcagaagccaagaaaaaccaaatgcagtcattaatgaaatcaaaagcagcaatgaaaacagaacatatataacatgatccatctttctctcaattttgcttctcttagatggaaccacggttgagtttcttactgcttttgtgtcttttccagtaaagatcacaacaccatagatataatcagtgtttcgaagcttcgaatccctcaagagaagttggtaaggggacaaggaaaatgactcatttttgaactccaagttcccaacaaaagtatagagttgaggatttggatcctcacaacgaatcatggctcgaaaatggctgaattcttggtctttgtccaagcatagtgttgcttctaagcatcttttgactttgagattggtctcgccatcaaggttcatggtctctacataacaaattccatcctcaaagcttgatgataacaagagaatatcacatgggaagtattcatctttgtttactttaacaatgtctcctacgctcacttctttccatgctttgttaacaaatgtacctcctccaatgtgagcctctactgctcttgagttcacattaatatccttcaatgacagaatttaaaggaaaacagtcgttttataaattaaatacaagttgaaataataaataaataaggatcaatacatgtcacactaataccaaagcttagataatatacaatgacaaacagacaaagatttgtatatgatatacataatcttgttgtaggaaacttctaccacggtagtcttctaaaaaatatggaccatcggtacaccttatagcagacaatctgtcatttttttaaaaaattctaacaccattggcagttgattttcgtgaaatacactatttgcaattaattttcgatgtactaaattatttaaaatttctaaatattagtaggaaatctataagtaacaccatcatgtaaaaacaattaggtttagaactatccaaatactaaaaacacaaagaatacaccagtaatcttattgtaggggactaaaaaaatatttctattattatataaatgatatgtaatgtatacaatcaa

SEQ ID NO: 227808 - DNA, 2462 bp, Cannabis indica
ttttttttaattttttgaaggagaaaaaaatcctaaatttccgtttttaggaaaaaacagacaattcttccgtttgtaagaaaaaaaataaaacagacaattctaaatttctaactgtcagtgagccgttttattgtagttgcttcttacactggagaccactactgcgttacaataaacgatcgtttgtttttttttttttccattttcatttttaaaaacgtatgaaaatccaaaatgtgccgcgtcaaaagtcaaaatccgaaacgccccaccattccccccaaaagaaaaaaacgccccaacatcgaattgacgaaattacccttggtatgttgttaccgtttggccgttacaaagggcaattgtggaattaaaactgaagtagaaaagcttggcttgcatggaaacatatcacagtgacagagagacagagagacagaacacctttcatttttgagagagaagaagaagaagaaagagaaacccttacctaaacacaatcacaaaccaaactcacctgaaacaacaacaatgtcgagcctcccaggagatgcaatccaaaacatcctctgccgattagaggtgaaagatctgctgcgttacaggtgtgtttcgaagccctggtgttccctaatcgacgatccacatttcatcaagattcatctccaacactccaaagaaaccgattcccacctcagcctcattcgcaacgatccagagctcaacgctatcgatgtggacactctgaactcatccatacgactcaatcctttcgacgagcgtgatggagtcgagattgtggcttgtgtcgatggtttgctgattctggcaaattttatcggagatatggctatctggaatccatccactaagaagtacaagaagcttctcgcttctgatcttaacgtgaatccatttcctgactgtatagtcgaatatggaatcacaggattcgggtacgactctgtaaacgatgactataagttgtttagaatgatatattattttgggatggatgttctctctttccacaaagagattaggctgtatagcctaaaaaacaacagttggaagaagattggtgattttccttacgaaagttataaaactcgtgagaatggcatcttcgttaacggtactttgaattggatggtgtctggagaatccacatcctatgagtcaatcataattgtgggtttcgatcttgctacagaggagtaccgcaaaatctcaatgcctgagaagaaagatatttatgggaaagagacttttcatacgaacatgactcacttaggggggtggctttgtgtggtatgcgtttacagtgtgaatgatacagctagccgtgttgggatctgggtaatgaaagaatatggggttaaggagtcttggactaagctggcaatggtgatgccttccagtgtgactggtcctttcgactatctctctccacttgtccacttcaagaatgctaatcagcttctttttgatcagagtggtgacaagtttatgttgtatgatctgaaaaggaattctgctaagagtgtgacaaccatttctgcccttaataaatgttttgactcgtttctttgtgttagaagtcttgtgaaagtttgtggtggtgaaaggggcggcaatgggaagaagacagaggacaatgggaataaaagaaagaagcaggggcagcaacttggtggaaggaagaggtaataatgcccattcactctctttttctttagtgttgtatatacataaaattgattattagtctaccaccatacatgaaatcattaattaggaggatttaaacattgttgttaaaccaaccaaacaactcatatacacatgatttttctaattcatattttggagagttcatgatctagttagtaaccaaaaaccaattagatttttttacttgacatcgttttggttagggatacttttctgtccactggattcaaattggtgttgtgaatggaaaacgtgaactgaaaagccagagccatagcccacaggtatcttttgctaaacaattatgttacattgtccttgtattgtgacttttttgtatcactagttcattataaactgatgaattgtaacatatatatgtatatgtttctttcaggttgtatactgcagggattttggtggccatgagttagctgaggatgaaatgcttttgcatatatcatatatgtatgtccttttggcatgggctgtgaatcatgtcatataatacattttatttgggattttgttattttgtcatagacaatcaatttcgtatttatatatattgctagaacactatctatctagtggtatccctgaattttgcggatcaataaagcgttgctgaactatttaagatctttatttaatatagatttaagttttttttaatgtattattatgtcaggtttattttgtagtattttttttttctttctacg

SEQ ID NO: 227809 - DNA, 2108 bp, Cannabis indica
tactacatgtcaaagttcagggagaaaatttactaattagccttaatattatggctatttatggtaaagtatatggattacagaattattaattaataaatatgactaaaataaataattactttcttaatatttacaactcaaagctcagccgtccacattaagaaaaggttatatttttatttaatctaatttaaaaatttaatatcattttgattattgtttttacagacgaacatggtgggtcaaatgtacaaatttcaaaataaaaaattaagagtttccattggccaaagtccaacaataatggaaattacattttgtatattttttggagcaaatttttatttttatttatatttttagaggaacctaaaaataggggtatctatgcatttgtttatgtttgcaagttctaatttcaaatttttttggatgatattttacaatattttaaaggatagttgcgacgaaattctttaatatttatatttgttatacatataatcttaataaaataaagtggcgatgaaaacatcttatcttacgattaaacacatatgatcttaataaaaaaaataacagcaaaagtaccttattttgttataatgatatctttttttagttgttaagtgtcaattaggtcgatataggactaaaaatgcgtacactttgtctaaacttctcaaaaaccctgaaaataacatttcaatttttaaccaatgatccataaaaatctattattatggcatgaattggctggtaagtaaggaccaaaattcaaggtcaaatatcaaatttgcacgtaatgtgattttggctacaattcattttcttcatcttcacattcaaccaactaataataatactcttaattaattaattattatatataaattataatcaatatttctcgttaattaattactgaaatttgtaatatatataatctgataacattactaaacattaattaattaaaagaaaataaaaaagacatatagtttcttattttacaaaattcagattttacatacaatttacagaagaaaaaagctcttgtaaattatacaaatcattaatcaaaaatcaaactaataaagagaataacgagggcctttaaaaacaaacggctcagattattccacgtgtcaagatcatatgatcatcatcatcagagagagatcgaaatagaggcagcttgaaggagctgttgagcgcgtgagagttgcttaacgagggagacgatcttcgcgtggtcagcacgcgcctgatcgacggcttcagcttcgagctcgccgagctgagaacagagcatttcctcggcgtcttcagctatccgaagccgctgccaagttttgagaagctcgttcctcatctcctcctctctctcgcggctccggctcagctcttgttccagctcctggttcctcttcatgagcgaagtctggtcttcgaaggactcattattagttggcttggtcaccgccattgttatgttcttcttcttcttcttcttgaattttgttaagtgaaaattatgtgtggttaattattggttgaattaagaggggtttttatagggctaaaaagtaaagggtgtccaggttcaatgaatctacacagagaccatctttatgcaatttcgcttattaaataaaaataataataatataaattatatttctatttttgtataaatgttatttggtgtttgtacacgtgtcgatgtttaatttgttgttcggtaacttcaatggactaatgaatcatatgtatagatattattagctataattacataaaatattatttttttaaaaaaattatattttttaagtttaatttttacgttttttatagaaacaaaacgaaaacaataacaaaactacttaaaagtaataggagaataacattcaatcaacatcaaaataataactaaaaataattatagataacaaaaaattaacaacaaagtaacaagagtacaacataaaaagacagtattttttgtaaataaaatcataaaaatcacaaaaatatttaaaattccgtacaaccgtatttttgtaaaaaaatttattctttttgtgtatttgtaaaataat

SEQ ID NO: 227810 - DNA, 2717 bp, Cannabis indica
caagaggaaggtacaatttactgtttgggttgacttctggtggaccctataattacaatggaactcacactttaaaaacaaagagaaaaagtttgcacttcttgatttactttactcttcaagtagttttagtaatctcttgctgtcaaatagtgttgatcaacgtctttgtgagagtgttgactatgctatttgcttgaacattgttggctcatgggatgatgaattgtggattcatgtttcggagtgttacaaggttttttcagaaacttattagagttagtcacacattctaaatgtatagaaataaattgttatataaatgggttactcttctaattgctaattaattttgatgagatggaatcacattcaatttatccaaaattctaataaaacagtctttgcaattataatttgttgaaccatttttttcttcatttattatgttaaaaaatagtaataataaagtgaaggactagatataaatatatatattattattattactaatggataatatagattcacttttttgttctaacttttcacttcctattcttatcacttttcatataacgtaagaaaaaattagagcctataaagaaagaaaattagacaaaaggcaaaaaaactgagagggtatcgatactttgcaaaaagataaatcagagaagaaaaaaagcaaagagaaagaaaaaaattaactgtcaatgttgttcttccaactgttcaaggtcttcaagggtaagtattcatggaatgcacttattcttctatctctctcttttactttgtactcattcttatcttattcgctagtcctctatggaatgccctcattccatatatgaaaaaggatgctctcattcatagaatgtcctaattctaatcttaacataagaccaaataaaattgatagcaaataaagtcttcgtaagtattcataaaatgctctcattccataaacatgaaaaatacatgtaaacttaaatgacttctaatcttctattgatagcaaataagattatattaaaatggatttaatttagagtataaaatcctaataatattgtcttgttgcacaattgtaatacaccttaaatacaactaaactagtcacaaagattgcctagatctacttaacataagaccgacttaaaatcaaatatgaaacaaacctgaacatgagccctgtcacaaaaatcagtgacttttctcttaaaatcattaattgcaaacaatactttcctaaaattaacctcaacaaaacctctcaaaagagcaaaatcatcaaacatcttcttttgattacaaatgatttcaaaaaccttctctttcaaaggttcaatgtcaggagaaaccttctctcttgaagaagaaccaacatcaaaagtaggcttcaccgaggcacggtcaattgaaagatcctataaaaaaccatctagaggcaactgcttaaattcttcaaaagtaggcctcaagttcttcacctgtacctataaaaaagaacagcaaaaatatatcaatgaaagcataaaattaacaataaataatgctttaagaaattataataccactataatcaaactaaatacttaccatttttagtggtaaataaaaaaacttcactgtgagatcgtgcaaaggcagcgtactagagctaggataatcaccactgcgcaaattcaaaattcttgaaatacgagaatctacacgtttaccaaaacccctatcttattcacacaacattcataaaaccacacttgagaaactcacggacaacccaaaactctataccaaccttgataacagtttttctcgtacatgttcattttcttcttaataccatgagcaacattacccttaaaagagtgtaatgtcaactcgatgattctccaccccaacaatactcatcccatctcacattgtcaatgatgtcaattttagccctactaatctctttttctttcgtgttaccaagaagaaaacaatgaatcaaaataaaacacgacaaccttcaaacctaaggcatcatcattaccacatacaaaacctgacacaatatcttctacagatttttgggtaatctgtttaacaccgagaaaataagtgtcaataatctggtttaaatcctgagaaaaaatcaattttgctgcaataccccatacaatcgaaacttgaaataaaaaagaactcttcaacacttaaacaagcacaacgacaagaactgtttgctaaaaattctttcacaattaatgtctaaatattcaccgaattgggtaggatggtacattgccttgatatttaccaaaagactgacattaagattctcaataactctataactacaagttgatacaactttagatttataaagaacaaatgaagggaatttgcattcccattcatgaaatcaaaccaaaaatgtataatgaacaaagcaaattgtaaaaaatagagagaacaactggaatacaactagtatcaaactaaataaacaacaaatatcaaaccacaatatatgttaaaaatcagccaaaaaataacgataagcagaaaaatacataaataaagatttattacaaaaaaaaaggacaaatacgaatagaaataaataacagtttataaagaaaaaaatcaaaaaataacctaaatctaacaaatatttcaaacagtaacaatatatctaatcaaaaattaaaacaacaaaaaaa

SEQ ID NO: 227811 - DNA, 1868 bp, Cannabis indica
caaaaaaaaaaaattgataaaaaaaattattaaatattttcaaatattacattggaatggtctttccttctatttcaaaatggaataatcattctaccaaaatgatggaaagaccattcaatcagaatggtattccaatggttttaaatgcaaccaaacaaatgaatgaaataaaaattgtttcctttctattccattccatttcattacctccaaccaaacgccacccaaaattaataatttgaaatagtaaaattgttactttagtacattcatcatttatccagtcaatttctaaaatcattcttttctattattttgctatttcatttttattattttgtttgaattatattatgagtttctaattaaaattgtaaatttaaagtaaagtatttagcacaaattaaatatattagtgtgagttcgacattctataaattaaaactatattacagtacaccatctcaaactatgacttaaaataagatactagcaaatcaaatcaatgggcatacacaatagaagtgttattaaatataccttatccaataaactattctaattaacaattttgaaatcaataatataattatataaattaatcataccccacaactcaactggtgagtctccaaaaagaaacagcatcccaaaatatctgaccatatttcttttctccttcattattattattattttatttatatatttttgtatacaacttaatgcaaaatttaggtcacttaaatttaattaatcattatgttcaaggcaagtaagtaacctactattttatttttctttcgaattttgccactatatccttgccgtctttgtagtgtgttgcaattttacactaacttttatttattaaattagaaataaaatatgtagattttgaaatttaaaccgactttactttgcttttgtgcataatgatcattcaataccttacctagtaaatagtaatcatcaaagataataaattccttttacagaaaaaaaaaaaaagatgctaataataataataataacaataatagagaagtgttatataatattaggaaatttacaacataaatactatataattttaattttatatacttagatattatattatttaggtaaataacattttggattcgtgtgttttgctaaaatttattaattggactagctattttattaaatgataaaatagatcctaaattttctaaaattatataaataggatcctgaacttaattttttgtcaaaataaaacttaataataatctgatctagatatgttatgacaaaactgattacattttgtgtatctgttagtgttaaaaattgtcttaaagttagttatatttaaaaaataatttttttgaaaattgagttcatgatcctttttttactattttggaaaatctaggatctattttgtcatttaacacaacaaaaggtccaattagtaatttttacaaaacacaaggtccaaatagtatttatcctattttttcatgttaaaatataccaaacattgtgttttacctcattctgtcattgtcattttgttaagtgtgaaaaatagtacacatataaaactgagattaaagcctagttatttaaagaaaataagagtaattatataagtttaactcccagatacagataaataactaagtttaattttgacagtaataatacctaagttatattttcagaacttccgtaagtatttgaccgttaagtgttaagccaatagtcatgtgacaattcctgattggtcaagattgttctcggaggaatttaaacaacaccaaatattgtgaatattcaaacaatgttaaaatattgggatattggcggctaaa

SEQ ID NO: 227812 - DNA, 3723 bp, Cannabis indica
ggaatgatgactaagtggtatttgtgtaataaaaccaactttgtaagtaaaaatgtagacataggcgtgtatgagtaattttgtaataaattgtgtaaaatggatttttcatgtaaaaatttctaaaaagtattacccattgatgggtattaaatattaaaattatataaaagtgagtatcattttagaccatgtgtcttatacattagtgattaaactttttattttgttaaatgactaaatagaccttaattttttaaaatagtacgaaataatactttgaattgatttttttgttaaaataaaacttaattataactcaatctaaaggtgctatgacaatgctaattatattttctacatttgttcatattatgaactgcctttaagttgattatattaaaaaaaatattgaaaattaagttcaaagttctatttgtaccattttgaaaaacataggatctattttatcatttaacaaaatagaagatgcagtcagtaacttttacaaaacacatggtctaattagaacttttgtttccagaactttgacatgtaccaaattatatttcttgaatttttaagattgttaaaaattctccttgaattattgagattgttgaatttaaggacttttgtccaattttagtaaataaagtctaacattgataaaaatttaggaacatgatttagtatgtgttaaagtttgaagggcataatttagtaaatatgtctgggaagcataatttagtacatagacaattagcgaattagtaaaattaaatgaaattagacaaatatccttaaattcaacaatctcaataaattaaaaaaaaaaaattcacggccaaaaaaatttataaaacataatttagtacatgtgaaaattcagagacaaaaattttaatttgccaatttttaattatgcatcaatatcttcttctatttcccaatcaattgtcttcttccatttctcacgttacattcacgtatgtattatggtcgcacatccataacatcttccattcaggtgtgtattttggtgtgttagttaacaactaaccataattgtacatttgaagaaaaattaaatttccatataaaaagaaaaactatcttctgtataattaaaaaactgttgaaaaagattttcacttaattataaaatgaaaatcttacttttatagattacttttctaaatattgaggtttcttataaatgtgcatatctattgttatagtttaagtttttgttggatgtgggacaaaattgatcggttcttacagaaatccaagtaatattttttctttgaaagaaatgtgattagtggcttgtgaatgtgtcggatgtctgaattttccgtcacttgtctaattttgtgctagttcaagtttttagagtgttgtaacttgtacactacaatataatcattaaagccaaaaaaaattaaagacaagtaccataataatttttgagaaataggtttctaaatcttcttactcttatttgtttgtagcggaataaaccataagttattaattcttttatgttgtaaaatttcatcattattagttatataaatttttaacaattattgaactagagtttatttttgtcattaagtaaattatcaattttttttgagaacatcaagaaaattctcttgtatttcatcaagtaacttcattgaatgatcatcaatatcttatattctggtttctctaatagatatggatcaccagtatactattcttcatgccaataatatcatattgttgattatggttgcaagttttatcttccataaaactattgttactccgaaaaaaagttacgaaaagtttgatattcatcctggaactttgttagtaaagatatggccaatccggatgggtctttcgtgaatcttgtcttccataaaatagtgccttgcagatagcttatcattagtcttgagacgcactttcggataacttattgtcactcaaagatgttcatccaaaaggagtgcttgtacgaatctgaataacttattcgtattaaagctttcggattgtctatattgaaagtgtgttctcaaagcagacgtggattaattttgctgatgatgagatgaaacatttaagatggtgtatatgtgccaagatagttttagagctattttaggaaacaatacaaatctataagtagctatcaatcttagtaatatgtaggtgaatcagaccataattacttgaataaaaatcgtgatagtgtaaggttgagagagagagcgagtctaaattagagagagaaacattttctcgtaatctcggagagtttgtaaaggattcttgtaaccttgataacactgatatcaataaagatatgactgctgttattccaaccaagacgtagagcattgcacaaggcttgaattcgttaaacttagtgttattcttctctgttttactgctttaattcattgcttggttcttgtgatctcttgatatattgttcttaattattttgtatgtttttttggttagtatacttaatggtaagtcaatgattatttctatttcgcacaataaattggtatcagagcgaaatttgtaatcatatatagctgccgcaaaatatgatgtcaaaaagtttaccggtacgaatgactttagattatgaaggatgaagataaaggctttgttggttcactaagggttgtatgaggctctgctgggaaaaaagtctcttcctgaatccatgtctgaaaaagacaagaaagagactcttgcaaatgctcatagtactatcattttgaatcttagagataagattttgagaaaggttgcaaaagaagatacaagcgtaggtgtttgactaaaacttaaagtttgtatatgactaaatcgttggtgaatagattatatctaaaaagaggccccatattcattcaagatgatggaggacaagtttattagagaacaaattgatgagtttaacaagttgattctcaaccttgagaatgttggtgtaaccattgaagaagaagatcaagctttgttgttacttagttccttaccaaagtctttggacactttaaagatacaatgttatatggaaaagagtcgatcacgcttgatgatatgcaatcagccttgaattcaaaagaattgaatcaaacaagtgagttaattaaagaattttggaagtgttgatggattgtttacaagggcataagtgaaaagagagaaatttgtaaaggttcaaaaggaaaatcaagatctaaatcacaggctgatggtcgaaagaatcttaaatgctggatttccaagaaaatgaggcatctcagaaggtcatatccagaaaggcataagacgaatgatacaagattagaaggggatacaatagtgataagtgacggttatgactcaactggttctttactggtaacctctgagaattcagattctgaatggatcttggattttgggtgttcatccatatgacaccttataaatcttggttcgaagaatttacatttggaaagtatgagattgtgtattttggagacaacaagtcttataagatagtggaaattggaaccataagattgaaacttcatgatggtatggaaagggtgctgaaggacgttcgactagtaactgatctcaaaagaaatttaatctctgttagaatgttagatgataaaggatttctttttaaaattgagaatggagcca

SEQ ID NO: 227813 - DNA, 2203 bp, Cannabis indica
gctaaatttcagtcgctgcctctgtacaatatacatgtttaattatctacgtattttctgcatttgcttgcatttcttggtttaacagaatatactttaataataaaaaaatattctgttaaatttaacgatattagccgataaataattaaacccaataattaaacccaaaaaattaaaacccaaaaaattaaacaatcttaacaaatattaatatacacaattatgacattcttaacaattagttttataaaacatatcgtttataacataatttacaattagtcactaaattcttaaacaaaaatcactaaaacttaaaataaaactaatatttacgtggctcgccacataactctcatctagtataaataaatgtatctatatcctaatgaactgtagtaaaggattaagattaaatcaaaaaacatgagggtgtgtcaacctaatcctaatgagcatttaattataagattggatatggttttattttaattcaaggaaaggtccattaacgttacaaaatgtcaaatccacatcgtatgactaattattattattaataatatagatatataatagacacaaaagataaggaagcttatttctaaatctaatgacatggaagtagaaggctgtctatttgggtcttcttatccattaataagaaaggaaaataaaataaaccaccaattctgttaaaggaaaaggaacacatcataagtatatatgactatctatgagtgtgtgttatgtttaacttatcctataatatataacggctgcaatttgcatcataaaagggaaagaatgacaacttctctggtccctttgacttcaactatattaataattttttatataatttaagaaaataaattttaaaaaatattattacttaattatagtgtgcctcttataaaaaaatactagttacccgtgctcactaataatactcttttcatttaaaatgaaccacctaattattttacattttattttagtaaatatgtttcttgggaaattattatacgtgtataccactttcaattcgctgtgaaaaatagaatcttacaaaatataaatttatttaaacaaatatacatataaaaattaaatatacatagaatcttacaaaatataaattttgtttaaacaaatataaattttatttttggtatattatataggattaattatctcaaatgtttcgattgagtacattatcttagctaagtaaacacatatatatcttatctttaatattgtgatcataaaaatatgttagtaatactgatcagacctagttcttgagttgtgcctagaatcataaaaagagaccgttaaattcggaaaaatgtcacattcttacatgcgcaaaagccccaaaaatttgaaaattatcattttatgtacacaaatttaaaaatagtatattttgcataaggtcttaccactcaaactcagggccatactgggtggtattacacctttttcataagtattagttaccaaattccaatctccttttcataaacataatagaaaaaaaaaacagaataattattttttgtaaaatatttatatttttaatacgaaaacaacataaaattaacaagaaaactacataaaggtaacatgaaaataataacaaaaaataacacacaaataacaaaaaatcaacaacaaattaacaagattacaacataaaaagaccttattttctgtaaataaatcaaaaaaatcgtaaaaatatttaaaattccgtaaaaccgtatttttataaattttttttattgtttttatttttttgtaaaataatccaaaaaaaaaaatcaatttaattctactcttttttttttcttagaaaaaatttataaattcggttcaaattttctcatactttccaaacgttatctaattaataaaagggattcttttataaatacccaaaatgataaattttttatatttttagggatttacaattttttatacatatataatttttttatggatgtttcttttttacaaaattatagagtattatttttctgttattttctacattagttgctacataaaattatggtgaaaatgaaaattttttaaagaaaaaaaaaaaaactgtcgtatcctctgatacgtttggctgtcgctctgtgttgagtgatgtggtctgagtcttgttcgtgtggtggct

SEQ ID NO: 227814 - DNA, 4890 bp, Cannabis indica
taaggaatattactaaccaattatagggtgtcacttatataaagtattgttggacaccaccggtgcccaatcactacaaaaaaaaaaataactacctttagtgacaaacttttagtcataacataatttttttgtgactaaatgtgacttttagtcacaataaaaaattatttgtgactaaaacataatttttagatacaaattgtcactaatttacttttagtcgcaacaagtattgtgactaaaaacacatttagttataacaaaatatttttgtgactaatatctttagccacaaatcttttagtcacaacataaaaataataatttataattaatcacaaaatttgtaactaaaaataatttattttgtagtatttttttaattacacaatttggtcatgtttgtctcttttttttctttagcaagtttgattatttagtggagtagtagactagtagtgtgagtagtgtaagagcccttccccttcacttctgtctcctttttttgtgttagttttttttttttttgtaataattgtgttaatttttttatagtatagctattaagctacacacaagcctacatattattattattattattatttactaataatattaattattaatttattgatataatataatatgtttttattattaattattaattattcactccaataattgtacttggtttacttacaccattgtgctgcaccaacaattttagaatctccacctttgtgtgccctttaagcataataatcagaacagtttttgtggtgctcgattcagaaaaaaatctcactgcaccaaaaatctagattttcagactttatttatacgtacgtactgttttttttaattatatgttttaattaatttatttatgccacgttgtatataatatatatattattgataaatttatcataatgtatagctatagctgcatgcatgtttttagggtttttaatagtaattttatgtttggttggtacaagtgaaaattactatacttaagtttctggggattttcatgtcatgcaacttatatattaatatttttttgttaacttgtgtatactacgtatacatatatctaattcatagaaattaaatattcttctattaatttaatttcagtaaattatagtttactaattattttttcataaaaaaaacaaaatctttatatattggtagcagtaattaagtggtccttttttaaaagagatgaaaacaaaaaatctcagtttttatagaaaattatatataatgtaaaatttgattttttatttcttgaactcatctcacgtttttcctgatcaattcacaaaaacagctcagtaattttaattatcatgttgttgaaaatagttgttgtatattcaaaataaaaggaacgaaattactaaactaatgtttgggttgagtcgcgaactaggtctctttaagatacttgcggcactgcctaaaactgtacaagcaaactatcagtttcgtcgttcccaaaataaaacagcccagtcgaaaacactctatcgaaactacattgcacgatagagaaccgtcgaaataccatatcctaaaattatccaactgctcaaaatacatttgtaatataatcgcataaaattgtatataattttttctaggagaaaaataatgtctttctctcattggttctgatgcattatataaaaacgcaattaaaaccttaaactttttaattaattataaataaataaatttaataaataaaattttatccaaaaagacaaattgacaacacacccgcctgccagctcagctcaaccgaacagcagcggcgcgcacgtgtggtggtcctagtgtgtgagtcctcacacatgtgcaggaaattgggtacctcttggggccctaacccatatttcaaatttgcacattatatacacttctaatgaagtgttcttatcccacgtgggactcaatacactcgtgacttcacttctcataaaaaaaatttgtaaaatttcactaaagttccaacaatcttttgatttaaacatttgcgatgtgaatacaacttagaatatactagagtgactcgtagtcttgaactctatatctcttacaatgtaccaagcacaacgttttttgggtgtagtccaaaagcccatgctttaatggtcatgcacgtctttccaatgtagtgaaccactctaaaaaatttgcctaaatttcataggaagcagctccactcccacattcacgtaggtgagtctattaagagtattcttgtagctcggtatccactacacatagagtatatatctcattaagagtttctattatctcaaccttatatcgttttaggaattcatgcttcacatttcttatgacaatagcataatctcactcttattacatcataacttgttattgcccattgaacctatttcttggaatctacaatctataggtcgagttttcattatgagtgactcattattctaagggcaatagtctcatacctttcaagattttaagaactttctctctagctaatcatttttccaaaggatcggctaagttttcatcagtgcatacatgatccactcttactgttctaatagagaggaaatccttaacactactatacgacaaatctgtcgtctcttaccgttataatatcggttctgaacttttacaatagccgcggtactatcgcagtagatcaacacacctagtatcagtcttttctataaagggatctcagctagcaggcttctcaaccaacctgttttttcactagcagttgctagtgttatcattttagactctatggtggattgtgccaaaatagtttcactaaaagaaatgtgacttttttcaacgcattattgggttgaaaaaaaaaaagcactaaatgtgctggtacacttttaccgacgcaaaagtgcgtcgataaaagctaccttcgaatctctgtcggtaaaacaacttttgccaacgcaattgacttttgtgccagcaaaaatgatttgtaccagcgctaatatgcgtcagggaaaactaaacgccgatgtaaactatgatcctgaatttatttttcgacaactaaaacaacttttaccacttcttaatgaaattgatttgcactgttctttggcctttacatcactagtgtcagatgaattctcttgagcttgttgtgccataaaattaaacttttcagttgatccatctaagtctcaaaacttcagattaatgccatagtttcattgataaaaaacatcaaggtgaatttcattctttggttctacatgctacagaaattgtggttgttgaggcccaaatctttgtggagggaagccttgttgttattgttgttgttagttagctaatttcccttgataatgaggtcaacgacccccttgattgtataagtaattatttttattgtggggatagtttttaatagcttgagcttgccctattggcaaactgttaataataacatgacacctatcataagagtgtgaccttctaaataactcactagtcacaagagcatgttgaacttgagctatcataatcttggtcaaagtttctacttagctagtcaactttgtgatagcatcaaattcatgtaaacctgccactttcttcgagtggcttctctcacttggtcattgttgattattcatgacaatctcttcaagtaactcatatgcctcgttagcacttttccttataaagaccctgtcagaagcggcatctatgagtgttcgagtattactagtcaacccttggtagaagttgaggacttgcatctacttctcaatcacgtgataaggagacattctgatcaggtttttgaatctcttccagactttataaagagactcattttcatgctggacaatattgttgatttttgatctcaacctgacaaatttgggtagaggaaaggaacttcgggcccagatcctcccaagtattgattaagtcaggtggtaaagacagtaaccaactcttcacgagatccctcagtaagaatgggaacaacctcaagcaaatagcatcgtcgttaactttatttatcttgaatgtttgacaaagctccacgaagttagctaaatgcatgttgagatcttttgacaacattcccccaaactggactgtgaaattgaaccatttgcaatatggctgacttaatttcaaagttgttgcttctatggcaggtggtcttataaaagatcgaacccccatcaaattcgataatatgtagtccctacggcaacaatcatgtggattatgaccgttaacctggtctgctatgacaccatattattgtcgttattagccataactacttcttgttcaaccctttcaatagctcttcctaacctcttgtttcttctattttgtctgcaggtcttctcaatctcagaatcaacaagcactcttgcacttggtccttgacgtcgcataaactacaagtacctgaaattagataagaagaattgaataaaagcatgttagggctttcaatttctattgcatctattgattatggtttaacatgattctattcatattaccaaattctatgcaatagcagatttacttaggtaatttatagtcttctcaaatatataaacctctattacatgtaaattttctactctcgtgataaattaaacatctaaaaagcattaaacacaaaaaccctataagctatccaaaccatataggtactctcgtcccatatcaaaatttagttatatttcactacagcataattgacactcacttctcagattttgtatcaaaatcatagacaattaattaatggtcaagcaactaaaagaaattaatcacgaatgaaatagaata

SEQ ID NO: 227815 - DNA, 3509 bp, Cannabis indica
gtgaagtatttttttaaacaaaaaaaaatttaaaagtattgattagttttttttttaataaaatactaaagtttaatttttcacctaagacaccaaaaatcgcttaggatgaccctgatagcgagtacaagtgagagtaacagcattaataaactaactaattcttttaactgttaaaacaaaattaaaagaaaaacaattaactaactaattagttatgatgcatcaacctatttctataagttgaactctttcggcagaataccctcctttagtgcagtatcatatttgaactgtgtcagtatttataataaatttcatgaagacattcaaacaacaacgaaacacacaagattcgttacataataacagtgcttgtctataagtgatgaatatgagctgcatgtttctttagcacgaaaataacaaatctgagcttgaaaggcttggcatagaaagacatatatgatttttttgtgctcatgacattttgttataataacccttcacactaactaaactaactgggtacaatttgctttgtaaaacttagagttcttaggctaacaattgtctagaatcatgtattttatttatcataggcgagatatgcgaagaagatgggccaatgcttgggaagaactagcaaaggaaactagtggatacataatacattaaagatggtagctaagaacttactcaacggtgattttttttggttctagtttcatcttttcataaatgtacatgaaaaaattgaagctgacaacaccattttgataaacgccttaagctaataaatttcgttactataagaatttgggaactagagtaggtagaagaagccccccttcatgccatttacagaacattcttttgttaccttccttggtggtaaggatagagcaatactttgtttttgtttggtggccaaacatgaaatattcaaactaaatttcataaaactatttgatattcaaattcaatattttagttatctcaagaacccactgctgttatgtattaatttaaagaattgtttgttgctgcaaataggcttgaacaatggtagatcgagattgaggtttgattattcttttttcttaccttggattgaaacaccaaaacaaggtcataaagtagaaaatgaacactcaaatggatcaaaaaaaaatgtgtattcacaaagatttctctatgaaagcaaacttactaatgaaaaatgaaagaattcatcaactaatgtagctacttctactctaatgacatcagaatacatactagtattctagaatccattactagttcttctattttactcactagtgaaagcagctcccactccatcgtcaccagaacttgtaccgacattgtcaagtctaatcttttcaagttgttgaagaacctactgaacttctggtctggctgatggtgaaggatcaacacaatgcaaagccaattttaaggtgttcaataactcgtcaccaatgctaggtgcagctctcatcaattccaagtcgaaaacttcgtttgtccattcttcttttacaatggaagccacccactgtggcaaatcaagaccattcattgcctcacctggggtttttcctgttagaagttccaacatgatgaccccaaggctgtacacatcagttttcgtgttagctttcttgagttttgaaagctttggtgcacggtagcccagtgctccagcagtagcaattacatttgaggcagcagctgttgttagcttagagagcctaaaatctgctacttttgcatttgtttgctccctgagctattttcattcttgttggaaaatcaataggagtttcaggatctcgagctgcaaaaccatatgataaagcaagtcaaaaaactgttattaatgcaaaagaaaagctaaaaaacatgtcaaccagttaaagggaaattctcattattatgcttaccatggagaaaagttccaagatttccttttgacatgtaatcaaaaacaaggagcttctctcccttaggacttatgtaataagctctcatagccaagagatttggatgtcaaatttgtcccaaaacattaacctctgtctcgaattccatctggccttttgtgatattctcccttaatctcttgactgcaacttcatgcccatcttctagtgtgtccttatagacaatcccataagtgctctttcccataatctcagttgttgcacacaaaagatgatctgctgtgaagaccattggtccatcaaagtggactagttttcctccaacctctccacctgattctgcttcacctcccaaagccgagacccccttttcagtccttgcaactgcaccagctcttctggtgccttgaccagctttggcttttgatccactcctccttcttaacaagcagtatagtaagatgcaacatagtatgagcaaaactagaaggagacaacccgctgctatgagaactatgtctttcgtacttagtttatttcgatgagatttcaatctctcaggggatggagacgtggttccttgagaaggtacttcagaaaggcatgaaattgagccattgtatccacagagttgaatatttccaacaaaagagcttgagttgaacttttgtgccaaagtagttggaacagaaccagagaggatattgtaggaaacatttaaaagaataatatgtgataaagcagaaagggacacatgtattgattcactgagattattgtgtgataagtcaagttgagtgagagtagaaatgtttccaaaggtagctggaataggaccctttaacctgtttcctctaaggttgaggacagaaaggttatgcaatctcccaagctcttatgggatttgaaaatcaaggttgtttccctccaaattcaacaaaacaagtgaggacaaattagaaatactagtgggcaagcttccatttatggcattatttgagagaccaagttttctaagcttagaaagcctccctatttcatttggaatggctccattaaatttgtttccattaagtgaaagctcttgaatcttagttaactttcccaaagaagcaggtaaacttcatgagagagagttatgatcaagagaaagaaagattattgatggtgagctaataatgctagaagggatagacccagaaaacaaaatgagactgagattgattctgaaaagcttagtagagtttgcaatactaggtgggatagtcccacttagtgagttattactaaggtcaagagtctgaagaataggactaaaacctaatgaaggagggattgaacctgaaagtcgattattgaaaagttgaactcctctaaggttgggaaggaaccccaatgttgaagggatagaacccccaataagattatcatggaggttgagcttacgaagtgcctgtagttgaccaatcttctcagtgatctgaccactgaatcccttccatggaagctgtataacaataacctgtccctgagcgcatttgattcctacccaaccac

SEQ ID NO: 227816 - DNA, 1649 bp, Cannabis indica
gtgaccctctcaactttgtgcccattttcatcacaatagccacaaaaattaacaaaaaaagtctaaactagtcagtccttcactaagggtacgtacgtacataccctacctcttcatgtccattagtgtaataacatatattgtcttctactttcaagccaaaaaactcttacaaccaccatagacattttaagtaataattaaagtggaaagcaaaatactaagacaatacagattttattttatcctttgctttgcattattgcattgctcgtgtaccaactgtaaaatttagtaaaaataaaataaaatgcagtagtattaagaacaattttataatggaagaaactagtttctaacttatagatcttctttattacaaagaaaataatacaaaattaataaatacgatcatttgacttaatttgtacctcattacaattaattcaaataaagcaggagagaagaaatttaattagctgtagaaaatgtaggtagagaaccgttttcttaaccacaagtttacttgctgagaaaacattagaacagtactttgccattctcaataaattaatttctcatatctatttatatgtgatttaattatgtcattttaatgttctttatggaaattgtcattttattgttgttggtttcttcagtttgaaaaacttactctgctctgctgacaataaaaaaagaactacatgtaattgaagttccacttgttcttttttatttttggtttcaacactttgttattgaaatttatcttgaatattatcatatttatttacaaaatcaattattgtactttctttttcctcacaccccgacttgatcttatccatttaaattatatacatcgttctgttgacttgtctatacatgtttgtttaattggagctatatttgaactaaagagttaaatccttaacagtaacatatatacatatgtcaatgtgagacgtagttttgtttcagtaccaattatgtttttcactaactcataaattattttgtcagcttagaattgataattgatttatatttatatatttagttggtatacaataataaactatatagtactgtagttctagctcattattttatttataatacatcttattgtttggtagttcaaaataatcacaagcttttggaccccaccccattcaaattcacaagtcaaacaacttgagaatagagggtccattatctttaatcttttctatcattccagttgggatctgtggtcccttttgcttaactcagtccctcatgcttaatcttccataacactatggttcagttttttttttttttttgttattgaaaagaaaaagaaaatgtgacaatttccaattcaaatatggtcaaatatttactccaaagattttcatattgagagaaataataatccaattttgtgtttaaataataatatataataaagttgttataataataataaaaaagtaataattaacttttttagaatgagagtaatgctagctaaattctatatgtgcgtatactactatactataatgaatatatataaggatatattggcggccaaaccatctaaaatttacggtttgtaacagttaaccacaaaaattaaaattttggcggctaaacta

SEQ ID NO: 227817 - DNA, 3118 bp, Cannabis indica
tcttctcttcctatagtgaaatgttatgtgctctttcgaagtgtaaagtgtttgaatgttgacatgtatgtaaagacatttatatagaagtaagaatcaatatacgatgaaaaatgtttgtggagaattctaaggttaaagtgttgaactcgagggctctctcatgggtgatggcaagttttttcatagttagcatagttatgggagtaaagaataaggacaaaacgtactgctctaggaaagtgctcttaatgtgagatttagagagagagagagagagagagagctcttgcttatttgtcttgtaatctagcttatttggtgtgcaatttacaagaggggctatgatgcttttagcataagttatatcggtgaggtgttattttattcatttctactttaagtaaatatgaaagattatgtgttttatgtgtttggtcaaatagaatatcatagagaaactgaaaacttaattgtaagttacaagtatttctcttggattcgtaggagatttttgtattatgaattctcaatgatccattaggggttgacttcactagtccactgtaacaacttttgaagctaatcgtgggataaataatttcaagaaatggaagcaaactaaactttggttaatagctagaatcatttaacaaagtatatgtaaaatccatattcttaaataatttaaaatcaatagaaagaacatacattttctccaagttacaataaaagggtatcaatttttcttttacactctttgaaagaaatggtatatcaaggaatgttcaaaaattcattaacttttgaaccccaaatagtgagcattggtgttaataaaacaaattaggctaattaaaatttttactccctaaactttgacatgtaccaaatcatgtccctgaatttttttgaccgttaaaaattccccctaaactattgagattatcgaatttaaggacttttgtccaattacatacattcaattttactaatttagtgattgtttatgtactaaatcatacttctcgaactttaatatctactaaatcatatccttcgtactttgacatgtgtcaaatcatgtctcctgaactttcattcatattagactttccttactaaaattgaacaaagtccttaaatccaacaatttcaatagttcagggagaatttttaacgactagaaaagttcaagggacataatttagtacacgttaaaattcagaagacaaaaatcctaatgaaaatgaaaatgaaatcacataaaatttatggggtgaaaatgaaaatgtaaccatcacacaaacacaagaatccggatgacataaaatttatgggaaaacatagatgcataaaatatgaatgtttcaataactacatgtgttggtatctttaccaataaaattatagcttttagtgttataaaatctagagtaaatttatcaagagaatcagataaaaacatggatctcacatactcattaatcacattacttgctcctgtaggatccaattaagtacacatattgcttttgctttgggttttctaatttttctattatcatttgacagccctatgatattttctttctagccagttccatcaatttgtccaagagagagaatgtgtgccatgtattgctgcaaaaagataaatagaaaagaacaagaaggtcatgcaaacagtaaagacatcttaaatggtcagcttaattaaaaagaaaaccaggcaatttagtcattaaattattctcacacatatggtgaacattttctaatgaaatgacttgggatatgttttggaaatgaatgacagtgactaatttaaagatgcattttttcttttcaatttcacaaattatgttaggtccatattttatttcctttccaataagaaaatgaaatagtaacatcttgtatgaagactgttttaaaaattttaacctacacatgttaaaatattacaatctacacaaaagtgacaaaaataaataaataaaagaagaatttggttggtggggttgtttgtaatgttgggttatcttgtttccttgtctcagaggcttggtctggtccttgaagttttttctatcctaatgctttttcaatgcttcaaaagaaaaaggcctagaagagttactacatcatgtagcataccaagaaattgcttagtaaaccactcaaaaccaaaccttgagactaaaaaatatgcttagagttagacaaccagagctatctgattttcatgttcttacagatatgctgacaacctatattcaccgaactcctattccacaatcatgtacagaaactctctcaaaaaaagggccatggaatggatttccctgtaaagaatttgctttataaaaacgtcttattacctaccatctttatatgatgcattcatctcacaagagatagttactttactaagatatccaaggttcaaactttggtctcatccaattcccagcccctcaccactagtccaaacctagtgccttcacaggagagagttacttaatttcctatgaatgccttgcaattagtaaggtgaagggaatgtcaattttgataaaccaaactactttaattaattttcttataccctaaaagccttccaacttcattttaagaattcaagttcacaattgactttctttgttgaacctctatgaaccctccaaaaaagtgccctgaacttgttggtataccagcaaacctacctctagtacctaatccattttataaacaaatgaaggttcaccattctcatgaaagtaacagaaatttccagtattgaaataccgcttaattacagttcacagctatgaacgaccacatgtaagttcaaatgtcatcttttgtggttctaaatcttctggataactctagtagtcacaaaaaaatcaactactattaagaaagtacaactttttcatgaaaatatatgcatgagaaaataggcttatgtagccaaagtggaattgagtaacttacagaatgatactcatatgccgaattgccctgacgattaaacgtagttttgccatgatggagtactcaataggtccccattcttcatctcaaagcattaccaagcgcagccttatac

SEQ ID NO: 227818 - DNA, 1835 bp, Cannabis indica
attcgaattctaaatttaatgataagttagcctataatttgtgataatatagaacaataatactctagtttataataactttttattgattatagaccatagcagacagctaattaatttatcgttcaaaactaaaaaaaataaaaccacatatagtgattataaatcaaggtgtgttgtgtccattaattgttcgcaacacaaataatatcagtgtctttatattatgatttaattaattaatatttcttttacggaatttatgaatcagaatctcctacaatataatgatattgatatataaaaaacgaactaattaataatataaaagacgagaaaaaaaaaaaagaaaagaaccaatccatttagtatatatatgcaatataatgatcgattgaacaaagttcatgaaccaaaaataacttaattaattagataatagtcctagctagctatttagaaggaaattttatggttcattgcacttaatatttaaatagattaataatggcactttttaaaaagatatgaagataagccaaatagtatattcgatggttgtataaatatatataaatatttataataaatataaaagtcatggttgcacatgaacaagttctccaaacttgagagatcacatgatttattgatcatatcatcgatcccaagtcgtcaactggggactcttttatatagtactactaccaaatgtctctaaccgcccaactaattataattcacacatccatgcttttctataaatatatattatatatatttatatttaaatgtacaatcaaattatttttaggctcactcatatttttatacactattgttattataattattagataaattattaattaccgtactaactagctaattgaagtatattaataataataataataattaaaaaaaattagtaattataataaaattgaataagttaaaaatacattcacgaatttttaggcataagatatatattatatatatattgttagttaattgctaatctgattactttgtctaagttagtttgttagttaccttagggacggttagttttggctgaccgatttttctgttaattttttaacattgaacacaagcttaattgttaaatcatattatttttccttaatgtaatacaactcacttcaataaagatactatttattcattatttatccaagagaggtttgcgtttgagttatatgatcttgtgtgtagctatttcagtgataagatcaaagcttaaaaactcaacaagtggtatcagagctggtgaagatgattcaagaaaggcgatcttaattcttggatcaagattgtgatgaaaatctatcaccatatgggttatgcaaagtttgattctgagagcacaaagattttaaatgaaaagaaacaaaactcataatgccattattctaagtctcgggaataaggtacgtagatagattttaaatgaaaagactgtaacattctaaatgtctctgcccaatcaattgttcttgaaggtagaatttatattcatttaagatgggatcgagaaagaatattaaagaccatttggatgaatttcacaagataattcttcatttggagaatactgacatcaagattggagatgaagattaagcaatcattattttgaattaattcattgccttcatattcatatgaatatttcatagatactatgatgtattgaagagaaacattaacacttgaggaggttcaggatgcattgatgcctaaagaaataaagagaaaatatgagatgaaagagtagacatatcagatgtggatcgtttgctcgaggg

SEQ ID NO: 227819 - DNA, 817 bp, Cannabis indica
gatgtcttttagcatttctcataatttaaatctatttgttgaaaaatcaactctcttatttaattctttactttttttttctcaaaagttaaattttttttttataagaatagatcgtgatatatatttttttttattctttcagtaatttaaataattttaagaatcactcgcaaattataagagttttacttatttttttgaattgaattatcagtatgtacctcgattcgagagttttaatctcattaaaaataacaacacaataataaactagctttccaatcacttaaacatactctcttatgagcggttataataaaattcgaacctttaacccgaacaaaaaaaaatactaataaaaatatttgtactagaacacaacacatgatcttgaaggtcaattattagcttattccgtgttgaaaacctgtccaaccaatgctagccacacacgtaccattctctctttgactttcattttataatttgatagctaggttgtcactttaaactacattataattacaatttgggccacccaccaatggttttcttatacaaaaatcttaggtttttttttttttaaaagaaaagaaaagataaattcattaaagcaaaatgccaaagaatcacagatacaatgcaaaagccaaataaaacaaatatttgagcaacctaaggccataaggaattattgaaaaaaaatacaatggcacgaaatttaaatatttttatgattttaaattttttattttcataaaattttttatgtctttataaattaccgtaaattatttattaaaaataataattt

SEQ ID NO: 227820 - DNA, 1097 bp, Cannabis indica
atagaatttcaaatttcccatataatattggatagtgtatttctttcatatttgttgtatatattaaccatattaataataataataaaaaggaaaacaagatttatcatccaaactatgaatgttgtagcattttgttttttgaattatttttttgttgcaaattctccttgaattttaaaaattattgcaaatatccttttcaagttacgttctattaattttttaaacgatttattcatgatttaacactaacaaaatgttaatttggcaaattcaaaagttcaaccaaaaacataaatatattaatatcaatctaatgatacattgtgagaatttacggataatgctttgttagatcttgtattagtgtatttaatatcaataacattgattttatatagcttaaagttgttaaataacattacacctaaccacataaatgaattgctttaaaaataaataaaatctaactgaaaagatatatttgcaacaattttgagagaattttgtgatataacaaaatttggaagacaaaatttttactaaggtcatacataaaaaagaacttatttattcttaaatttttttttataaatttacttatttatttgggtaaattacagcataaacttaaattttggagtttgtaagtagtataaatacaatgacttttttagtgggataaattgtaatttttttccaatgttgtcaaactactttgaatttattataaaaagatttagaaataacagacgttacgtgtttttgtccagatgaatttctactttatatgtgacatgtttaaaataatattaaaatatatatactgacaaaattaaaaaaattattttataaattttatatttttataacgcctaaaagattattacgtttatactgctcacacactcaaatctttagttgcttatactattatttactctatttatttttatcgcaatggcaacaaatatttattatcaaaaaattctataaaagggaaaaattattgccacaattttttttcaaaaaaatccaattccataatccatatggcttaattgtattttcaaggatttcaaaaaaaaaaaaaa

SEQ ID NO: 227821 - DNA, 1935 bp, Cannabis indica
atcactcaagtcttcgcaggccacgtcagcactctcgccctcgccgccgtctctgtcgaaaactccgtcatctccggcttctccttcggcattatggtaatcccaaaataaaaaacgtttcttttttcttgttgaacgattcttaacagttttgttgaatttgattttaatgaagcttggtatgggaagtgctctagagaccctttgtgggcaagcatatggggctggtcaatacgacatgttggggatatatatgcaaagatcttggctcattctcaatggaacagcggttatactctgttttttctacatatttgcagagcaattactcaaactgattggtcagactccggagatatctgaatcagctgggctattctccgtttggatgattcctcagttattcgcttacgcattgaatttccccatagctaagttcttacaagctcagagtaagattatggttatggcggttatatcagctgtggctctggtttttcacgtttttttcagctggctcgtgatgcttaagctcggctggggcatggccggcgccgccgtggtactcaacttgtcgtggtggttcattgtggtggctcagctggcttatatatttagtggttcttgtggtcgagcttggtctggattttcatggaaggcttttcaaaatctttggggctttgttaaactgtcattcgcttcggccatcatgctttggtaactaattacttattatctttttctttgttctttttcagttattattacattcttattttgaaaaaagaaaaatataaaattagaatttgtaacgttaattaatttaccaaattaaaagagaaaaatggtatacaaggtaattgtaatttgtaactgttggtagtattttaaggaagatagacacaaattattaagacactgtagtggtcaaaatgtaccaacggatacatatacatatatattgtgattacattaacgtaattatcatgcttaacaacaccctttataatacaaacacacctaagcatttctgtccttattaggtggtcattataatgtagacactttttatatattggctatatatcaaaccttaaattatagagacaataaaggaggttaatctttggtcaacatgtttcaatttatttattacatgtcttttaaaccatgcatatcaatcaacaacaagctttaatattgattataccaaatctcatcagatgattagcatcccaacattattatcagacttctattatgtttgtaaataaaagtttttcttttttacaaatatatgttaaattaaaatgtgtgaaattttaaaaaaaatatgtatataaaatttgataattatattatacttggttgtatagtggaaacgtaacatttctttatattattgaaaatagttatgatggttagtagccaatgaagtgtttttatatttaattaaccattttttataatatttgttaaaataaaataagtaattctatattaaattagaccaataataattaatccaattaacataattttggatgcagtttggaaatatggtattttatggcacttgttctatttgcgggatatcttaagaatgcagaggtttcggtggatgtactgtccatatggtaagcttattataatttattatatatttatataatatttatatcatttattattattattattattatcatacttaagccccgctaattcctcatctaatagtataaataattaattaattttagctaacaataattaatctaacttgccgatccaaaaattatacttctaattatacaaggcaatgttaaaaggtatcatttaaatgtattgtattattattgatataattaagtatcgagttcacgtaatttaatttaattactattataaaatattattaattatttataaaat

SEQ ID NO: 227822 - DNA, 1242 bp, Cannabis indica
aaaaaaaaatacaattttgggtactgaaccctgattgttataaattcaaattttacaaaatgaactataatttaacaatagatatgaccaccatctcagtttagaaacttataataatgcaatatcaattttgttgaaagaaaaatcaagtgagagagtgaccttggtatgttgttccattcgaacatgaagtggcacatcatcaaccttagtgaaacctcccaaaggatgaagcaataagattgggttattgtaccccatttccaataggcttcttcttgtgtcattcattaacagagcatgtccattatgaacaggattccttaattgaaaagcaaacactgcatcagcctcacgcctctcaaattcattcctcaattcttgaggagacaatctgtaatcatcaagcccatcattgtattttatgggctcaaacacttctaaatctccaccaataagccaatttccacctttactaatagcctcatcaacatatggcaatccatcaactgtggtcccccatgttcttgctattctctcttctttgttatgcttgtatatctcaattcctctaagtataccaatcaaaaccttgttgggacttaataaccccacatgggtggaacacccaattctctcttttgtctcatcatcaatggctaacacaataggaagtgacatattcaccactattgatgacccatttttggtggttttaagtgaattgaaatgcaagctttgtaaatactcattttctctcatgaaaccctttaatgggctagcccatccttcactgatcacatgagacttaccttgggtagagcctgagcttctaggacccttgaagccctttcaatctcagggaccacaagatttacaagctcacccccatcgggctcaataagagagctcttgataataggagatggagaatgcattgtatctgattatagagaataatgatttggatgaataatgttggggttattatagagagaatgagattcggtataattgagagagttgaggaggaatgagagactgagtccaccacctttgatccaaacacatccacacattattatttgctacctataaaatttgagtatgtagaggctctaatataaaatttgatgaagtgaattgtacatatatgtttattttgtggcttgtttgtaccaattatattatattaaatatataatgtgattaatctattgtctgctgccaaatgaggactag

SEQ ID NO: 227823 - DNA, 2127 bp, Cannabis indica
tcaaagatagaaattaatgacgatggactttcaaaaagttgtaagtgggggaaagacgaaggtgatagagaagatggcaacaataaatacttccaatgcctttgaagctcttgaaacaggggagagttcaaaaggtacatatgagattaaaagttctaaattaaatgataatagtggacggggagagcctctgattccacatgaatagaattttaaggtggaacaattagagggctcaataactgaaataaacaatttgagatcacgcaattgatttctaaatattgtattggattagttgggctccttgaaacaagggtgagggcaaaaaatctgggagagtttatgtaaatatgtttagcggttggtatttcttgaataatataccatggaatcaaggtggaagaatcataataagttggaatataactatgtttaaagtgaatattttgttttgttcaagtcaattaatgtatttgcgagtttggccatcgggatatcatgattcttcttggtcacatttgtttatgctttaaatgatcaaaatgagaggggtttgctttggaatgatttaaaatatcttgctagagggattcaagaaccgtggttgatactaggatacctcgatgatattttaaagtcagaagaaagagtggtatattagttaaagagaaaaaatcagtggcttttcgtgaatgtgtgaaagtttctcaagttgaggatgttaagttttggggatctttctttacttggaacaacaaacaaggctttaagactcagattttctaaaagattgatagagttcttaccagtgaatattggttagaaaaatttgaacatgttgaagtagtttttctttccaaaggacaatttgatcattgtccagcaatattaaccatttttccaaatcaaaaaattggtaagagcccattcaagtactttagaatgtggatatttttcaaaaaaatataatgagattgtaagacaaggatgatcattgaaggtaactggtgcgccaatgtagagattggtatcgaagcttaagtcattaaaggtagatttttgaattctgaataaagagaaggtgattgatatatatgctgctgattctatagcctgtaacactctgctggaatgtcaaagtgccttacagaagatgtcgttagatgaagataagtgtaagctgaaacaaaaagcaaggaatgattataaagatatacacaaagcttatctctcttttttttaccaaaaagctaagattttttggttaaaagagagagataataacacatctttattccatgtcagtctcaaaacaagaacgattaataaaagaatttttgctatcttggattccaagatgatgaatgggaaatcagtgaagcaaaccttggtcaaacttggtcaattctattcatctctcttggattccaagatgatgaataggaaatcagaagatttctgttacaagcctatacgaatgctaatgtaaaagaagcaattttcaatattccaagtggtaaagctctaggcctagatggatatagtagttactttttccaagatgactacgatttggttaaaggtgatgtttgtgatggattttgtgccctaaataaaactcatttcaatataatcaaatttactaattaatataagattagaaatcgcttttatgttgcatggttcacatgatttatttcatgattatatttaatgtataaattctattacgtggacccctaaaaacttgccacttacaagtgtgtacacgtggatagtccatcgtgacacttaactggatggaggtgtgcagagcaaaacggaaccagggtttaggtagttatgccgccaaaattttggtttttgtggttaactgttacaaactgtaaagttcaggtggtttagccgctattatcccaaatatatatatttgttcatgattatagtgtcatcagcacagtggaatacaatcatgattatatgttcaaaagtttaattcctgatttgtcagttcacagatttagactggcatgataaatggcgacaatgtatacttacaccttggataagtgttatgtcctttccatggaattagcaagtttactagaatcagatgtatagagt

SEQ ID NO: 227824 - DNA, 2153 bp, Cannabis indica
tcaacatacactagaactagtgttgttgatttggaagaatgattaataaacagtgagtgatcagatttggaagagatgaaaccaagggaggtcaagctgtgttgtaacttctcaaaccaagctcgaggtgcttgtttgagtccataaagagccttgtttagtttgcacactaaatgttcttgcccaggaatctcaaaacctagtggttgggtcatgtaaacttcctcttgcagatcaccattgagaaaggcgttgttgacatcaagttgtctgacagaccatcctttggataaagccaaagtcaacacaactctaattgtaacaggcttgacaacggggctcaaagtttctgtgaagtcaaagcctgcttgttggtgaaatcccttggcaaccaaccttgctttatgtttaagcacactaccatctgggttttccttcctcttataaacccacttgcaccctatggcttgtctcccttcgggtaatctaacaagaacccaagttttatttcttgccaaggcaagaatctcatctcccatagcattgttccaatgctcttgttgtaatgcctctttaagggatgtaggttctctcaaagccataaatgctttaggtttaaacactccaagcttagacctggttgtcattttgtgagaattatttcttcctggggcatttagacaaccaactaagagaggtaaagctgctggagaagagaaaattggtgctgatctatggtctggggcaggtctggtgtgaatagcagtagcaggcctggtagctgagggttcattaacctgttgtgatggtgaactagcagtgacaacaggcctggtagctgaggtttcattaccctgctgagacgatgaactagcagtgacaacagcaccattttcaggagagctagcacctggtacagacctggtatcaggtgttactgaagcatttggtgtagtgagaagtgttgcagaaccacctgaaccagacatgccacctgcagcaaaaaaaattggctgttctgtgtgcaaattattagcatcaatattacaaggatcaggcacaagtgaatcaataaaagcattatggtcaatgttatctgaagtactgggaacatcagtggtcgggtttaatcctggggagacaagatcagtataagtgtacatttgttttgagtgagaacatacaggaatcaatgctgaaacacaggaaggaaattcagggatttttctagcagtgtgatgactgacatcttgctcaaaagggaaggaaaactcatcaaaaataacatctctcaaaatgtatagcctacccttggtatctagacacttgtaacccttatggttaagactataacccataaaagtacagggaactgatctgaattcaagcttgtgcttgttataaggtctgatattaggatagcatttgcacccaaaagttctaaaggttgtgtagtcaggcttagtgtgaaacaaggtttccaaaggagatttatcatgtaataagggtgtaggaagcctattatgaatgtaaacagcagccctaaatgcttcatcccaaaacttaaggggtaatgaggcttgagcaagaagagctaaaccattttcaactatgtgtctgtgttttcgttcagctaaaccattttgttgatgagtagtgggacaaagatgtctatgatgaatcccactatcagcaagaaaggttgtaaaggatctatattcaccccccaatcggtttgcaaagttttaatggacttgccaagttgtaactcagcttcagctttgaagtgttgaaatgttttcaaggcattggatttgtttatcaagagatacaacctggtgaatctcgaataaacatccacaaaatgtatatagtacttatagccattaaaggatgttgtgtgggatggtccccacaaatctgagacaaccagttgcaaaggctcagaaatgacagtggtggatgctttgggaaagggaaacttatgaatttttccaagacaacaagctgaacaaatggaaaaatgagattctttattaacagtaggaagattacaagatttgagaacggtttgaacaaccttctctaaggggtgtcctagtctattatgccacaaggtgaaattgttttgaacattggtattacatttaaaa

SEQ ID NO: 227825 - DNA, 3772 bp, Cannabis indica
tgttcgtattaagcattgtctttggttgtattaaaaaaaaagttgtcaaaaattaagctcaaggtcctatttttactattttagaaaatacatggtccattttgtcatttaacaaaacgcagggtccaatctgtaacttttgcaaaacacagggtccaaaatagtatttacccttataaaatacactataaatattcgccacgtgtccaaatacatttatactctcatatattctcgtttggttatctcacagtcagcaatggcgacttcatcttcatccgacgatttctccgttttcgtactcgcttcggatctgggaatggatgcaagacccttcctcgagaaccaagacgaggagatcgaacatcaagaaaactggcacgactgtcctcagtacctctccgatgaggatttctccgaccttgaactcttgcagttctttcttatccagggtttggataagtccggcaatcgaattgttcgcatcgttggaaagtactttcccggtaaatcatcctaaacgaattttgatatgactgcgagggttttgttgatttcagtattttatttatttatttattgcttttaattttttgaaattggaggaaaacttttcagctgatatttcctaatttttgtatgaactgtggagaatttttaaaattttattagcaaaatcgaccaaaaatgagactgtgcggccataaaaagactattatgattgttttgcaactctaatttctaaattgatactgaattcaatgttgttattttgctaattttgcattgttcatgttgttagtttggcaaatttggttttcgggaagagcaaaattctaacttaccatttaaatttgtgtactttgttgataataaccagaacaattattgatatgttattcagaacaatgtgatggtgaaagaagatttcactgaaaaaagtgtttttcatttttgtttgcagctccaattgtgagtgcagagcgtttgaagaggtacattgttcataaactatgcagtgaattgggtgaagggccattctccattgtgtacatgcatagtactgttcagaaagatgataactcacctgggattactatcttgaggtggatttatgaagaccttccttctgatttcaaagacaggcttcaatttctctacttgttcatcccgggattcgctccaggcttgtatttgctactctgggacgattcttcttaagtggagggtgagtgattttatgattgttttgttttgtttacccaaaaatctaaccaagttgtttggagtagcaattttatgtagttttgtttgatctttcataatcatttgcttagtacattattttactattttggactctgtttttgccaaaataacatcgaaatttctgttttgttaattgacaattcagaccttgtattttttaaaaatacaaataataccctgagttcaatatttgtaataatagaacatcataatagtctaagcaatgtcttcttacacaatctcgaaattgttgaactgtgaaatttggttgttcttcgttatttgtatttgtatgcattcttttgcatcaataagcagtgtcccccattcaaatcaaaccttgtattgttaaaaatagcagctggggcttgctgcaaccagtagctataacactctctatcattgtaatgttacaatgttgttttctcaataagatttaaaggcataatatgtaattctttgtgttgatgtatctttgtttgcccctaatattgttttcttctacttttattctttgtagtctatattggaagatcaagtatattagccgtttgcagtacctttgggatgatgttaagaaggaagaaatcgaaattccagaattcgtgaaatctcacgatgatgttcttgaacacagaccactaaccgattatggcatcgaaccagacccccttcacttaaccgaagttcccgccatgtcttgctcgtatgggagatatgaagagagatgggcatcaaggcatgatatgtgaacactataatacaacaatacaccctaccattgtacatatctatccctttgtgttgtgctcctcaccatatttttcggtacatcttagtagacccggaccgcccatgtttaaagccactgggaatcttgaatcagaagatgaagaacctaaccgaagagagtagtaagagcttgattgaagaattaaacattggggtcttttctgaagcagaagaataacatttcattatcaactgaagttgcttgtattgttcttaccaaatcaaaaaattgttggttctacactgttgattatgagtgacaacaattttttttggtttgaacttattagtagtgaagtgcttcatgtatatatacataattatgtgtaccaaaactttgtgtgattaaggcaaaacttttttttttccctttccatgtattaatatgaagccatctatagttaagggaatttacatggcttatttgtaccttatggtgttttgcaacttagtctccatctgttttttttttttggcatattgccctctttaggggtggatctccactatgtcggggtggttcggtggtggagtctctggaggtgtgccaagaaaggggctgtgggtagatcggcggcagctttgttggggattgtcaccgggagggtccggttccggctgctacttttccagctacggtggtgtggatactagtgatggtcgggatctagataatgatgaggtggtgtttggttctctttggtgctttgcttttactgttttagactacaagagttgtcttttttattatttactcctttcaataatagtgagtttacaaatccaaatggtaatagcagtctttattctgaaccagatttttttgactcattgatctaatttgagagtttcttagattgtttctaatgttttgctctacatatcaatctttcatctggcttgtccttgatatggttggttttattattttccattattctagtatgaataaatgggagtgtttttacctaatttttattagaaaatttttgactgattgttatgaataggtgtaatttgtcacgtgttcatcttgaatggaaatttaaaaatttttttgcactcatttgatgcttcacagttgatggcttatgaattttttagttgaaaatgctattaaattttttttctctcaattattataaacgacttgattagcattattttcatgtaataaattatctctaatttatctattaatgaaaattctcattatgaaataatttaagtttttctttgaatgaaatatcaacttcattgaaataagctagcattctgaatacaaaatattttaaaactcacagatgaaataatttaagttaggaaaactaaaagacatagattttaaatgataaataagaaaatcaaaacttatttatttgtatctcattcactctaggatatatctctcacatccatgatctttgtttttatgttttaatgttctttgtttttcccacattggtttttgttatgtatttttcactctgaacatctttttattcacatcagttgtatgtgtggatttcatggtgccaaaaattctttaacgtgtcataataggaggagccccaccacatcaaacatccaactaataattctaacatatcacctttttcggttagacatatttagagaaagctagataccaataatatttatataataatattcaaaactaatatatatttcactttgcaagaaaaagaat

SEQ ID NO: 227826 - DNA, 2165 bp, Cannabis indica
gcataactttctcatctttcaggatgtgctaaagggttatacaagaaagaacatttccacttgttgtattataaaaattgacctcaacaaggcttacgacaatgttgactgacagtttgtggaagatttgctaacatgtttctatttttctgcgaggttcattaattgggttatggtaagcctcaagggtacaaactataatctgcttcttaatgggagaatcaagggttccttcaaaggagagaaaggcttgaggcaaggtgatccgatatcgcctcttctgcttgtcatcctaaagcacaggtacacatactggaaagctatgaacaacctacttttaacaagaaaccacttgatcaaatttatttgcatttcttcatctctttgcccagtttgtgagattgaagaggagtcccatgatcatcttttcatggagtgtatctttacaaagaaaattgttgatgatattcactcttggctaggatttgttgattgtccgaatactagaaaaaatcttgttgattggtgctcgaaatcgcatatggggctgaagaataaagtgataaatgtcgtcattgcctcgacaatttatatgatatggaggaatcgtaatagatgtgtgtttgatagctgttgtagcttggttaaagtggtttgtaaagagattagatttcttgttaagtggggtattttgggggttattactaatgtaaaaaagggtgataattatattattagagttgtggaaagttggtaggttgtcgtgtttgttgtaggaatttgccttggttgtatttcttgctcagttttgaatagaaagtttccttttgttcaaaaataaattagaatgaaataatagtaacagaaaaatacctcttaacgcctattaagtgtccttgctttcttttcatatttatttcgatcatcatatccatgcaatcatgaagataatgatgataaaaaccacaccatgatcttctaagttaacctcaaagaataatgtgggctaataggattcacaaaataacatgctcttgttttagtctcaactcatgagcatgagcattaatgggataggagagaattctataatacaatatagaatctatggcacttattaacctttcaggtttcataaatatatcgttgcttacaccaaaaatagtcctgatgatgtggacatcaatgtttgacatgtagcaagaaagaaaacatctcggagttgagtagtcccgagtcatgacaagtcgacctgggaggggttcttagccctgcgcccaggttgactttgggaactttggaaggggagttgggatcccttaccataaagacatgaagcattcaagtccaaggcttgagaggtaagaatacaagaactaataccacgaaaaatcaacccgagtgcctagggtttcacccagtgccaaggttgacgacccaactagtgtttcagtttttaggtatgtcttagtacaaatgggtcaaaatttgtaatgtgatgtgaactaggtatgccacaagcatattagaggcatcaaaatcaaattcagagaacgttcatttttgagcacccggagcaccaagtacccgaggcaccaagtgcctaggttgacattttgtcacctaggccacttctaagcatcaaactgaaaatttgtctaaggaatcttctttgtcttcatagaaaatgggtaaacaagtgttttcaagggaagaaacaaaccaacctggaggacaaaacaagagatcattgcccaggttgacacctggtgctagcttagcacccaagttgacattttgttaacttgagacaattctgaggagtttctttgaaaagtcttccaagcatattctacgtttctatcaaagattaagattcaagtatttctagggagcaaatagaactatctaagtgcttgaaacttgacccagtgcctaggttgacacttggcactgggcccaatgcccatattgacacttggcactaggcccaatgcccaggttcacatattgtcaacttgggctgtttccaatcatgtttctgaaaaaagtgttacatgcattaaactggaggagaaaatgacaaaaccaaggggcatcaaaattgagcccagcacaaaagttgacctagtgctgggcaagatgcctaggttgacaatcaacct

SEQ ID NO: 227827 - DNA, 3548 bp, Cannabis indica
gtagtagcagtagtagtagtagtgagacttaagtttttaggtgaagtgaaaagatagcaaactaaagtaaaattataaacttacccagggtagtatggagttgggagaaggaaggcatcgccttgttcagccagacagaacatgagtgtctcgttagccgaggttgcaccagcggttaggactagattgtttgtgtcaaacgttactttgtttcctctaatttcagacatgaattcaaccattgcttttttaaattctgggagaccatgataatcttggaacagagcaagttctctgaaaattgattgaccacctctctttagcccagctgcttctgggttatttgctagccatgattcatgaaggtcgaatgaaagctgtacccaaataaaataaaaataaaaattcatgttaggacatttgtatttatatgcacttgtactagaatatatattactttcttctttttttttggttcatatatatataatgtgaattgtaggagttttctaacctgattttctgcaagacccatctggataattccctttgggtttcgaatttcatcataagggtttttctcgtactcttcccatcctaagaagtaggaagaatcttggccgtgagtattgcatgaagcttttgttgataacaaactcattttctttcaaactttgtataaataaagaaacagaggattgatgatgatgatgatgatgatgatgatgatgagagataatgtagaagaagaattatatggaagaagagaagagaagagaaagattggtataattattattgttttagtgaagatgtttttgtaatgtgttggagtggaacgataggtctactgcaaacgtagaaccatatatataggcactaggctcatgagaaattattcttttaatgttaaatttaaaaaaacaaaaagaaataatagaatgacacatggaaaataggaaaaagtttacacaaagaaaagaacagacatttcagagatgtagctttacacttatgtatataattattatttaataatatttattattttgagggatttgcagctatgtggtttttaattagcattttatgaaccaaactcgacaaaaatttaaattatacgcgctttagccaccgtccgagagtgtctctgacttaatagtaaaatccttactttatactcaataagcagagtcgagagagtaccataagtccacaaatttaatgccactatatttggaaagtgccttacaccactacaagttcgcgtggccttaattacaaatgctttgattaataatacttaattagaaaaaaaaaactaaataaaagatcaaaaggaaataaatcaaaaaggggggttttatgagagattagaaatgttattaggggagaaaataaaaacctcttaccgacagcaaatctaatagaaaatggctaaagaggcctacatgagtacatggtccatgaaaattaagacccaaaaaatgaaactatgccccatttgcttcctggcttaactaacgcagttgcgccccatctaatctcggtcggccattttctttagaccttccattaatttttgtttcttttttcactaaaatacatatttgctatcttgggtatttttatctatttatttataataaaaaaattaaaaaaaaaaagaagggattttcggagggtttgaaagtcaacatgcaaaaatatgttgggagcaaaatgtactttgtcactttgtggaaaaatattttcactaaaactaggccgggttcattaatattattagaacataactgaataagttggtcgaaatcaaaacattaacatttataaatatattgtaactgtttttttattttatcattacaaataaccgccctttttccgtttgggttaatgagggtgaaaaggttatattcattatgaatgtaaaataaaatttgtatgttatctatttctcaaattaattaggtagagtttcgaaatcaacttatataggctatatataacaaaattacaaatagggtggttactcgtaaaggtgtaacactaagttagtatttttatgataatgcctgttttttgggcggtgggagttgcgtggctatcatttaaacagagctttgacgatactaactaaaaaaaaataagaagaagttggtgatgatgaattatttgctataaaacattatcaaagaaagcaataattgttctaactgaaactaattaaccaatcttccgccctttgtttttggctacctgattttctttttcttaattcaatgagtcctcacatggaaagcaatctaatattataattacctatatatatacatattcttaattaataatataaatataagcaccacagaattcacttgaagtcatcacaaacaaactcctttttttaggtaacaaattatagttggaagaaaataactagatatagctaggtcatgatgatctgcttacttatattttttaaaaagtaataatttttgtatgtacgtgtttagttttaacagagatattaggttggtaaagtggtggagaagatagtactgactgagagtagtatagtgatgataatgggccaataggtgaaaaagtaaacagctagctagaccgctcccagatttgaataaactttttctaatttgcatatatctttatatatatatatatttatatatatatttatgagactggcttttaacatcaaattttggagatcaatgtgaatcaaggaattaaagtgagagacagctagctcatgcgcatgatggcaattagattaataagattttatgttgttatgttatgatcttcttcttaattggtgtttatatatatacatttatatgatcaatgcattgcatgaaatatatatgataattttttgttgaaatggtattacatacaataatttttgtgttatttttgcaatgcaaaagggtgtaggcactagtatatatatgtggtaatatatatataaatatatatatatatatatttattaaactcatcgtagccgtgtggtatatatatatacatacacattgagagagagggggccattttgattttgagtaagtgagaatcctcaacaatctctttaaccggttctaagattcgaatacatataacatacactttttgacgttcgtttaatttggtcggctcttttgactatgcaaaataaatatttaatcaactaatatttcagaaaattgaataaaaagggaagtgatcatagaagaaacgggataaaaactacgacaaaaatagcaataaaatcaatttaatatatggacttttcacataaatatgtgcaaaactaatgcattaactaaatttaatataaaatattaaaaataacataaagttgaatataaaagcatgcactgtatttaatgtaatgtaaattttatatcatgttatattttgattttaatttagattaactattgctaaaatatagtttattatgtaaaaagtttgttctaatagtgtataaaaaattgatctaaatttaaattacaata

SEQ ID NO: 227828 - DNA, 1291 bp, Cannabis indica
ggtgatgattaatcttaatctcaaagctttgtacaattttaattatgataaaaagaaaaaacaaaatttgtatatgtgattatgtgagtaccaaattactaattgcaacattaaaaaaagaaaagataattattattatgtgaggtgatcagttggtgtgtttaagtaagaaaatgagtatatttcttctaattttcacgctggccttcatttttcttaattttttttttttttttattttgcgaaaatttaagataatatgtgctttgattcttaattctggagaaagaggaatattattattattggagatatgtgaatgcgtaatccttactcgatagcatgacatgtgcttttttttttctttttttatgtttggcttttgtgtgggtctcacacgttaatagactaatgctaataggcgttgccaaaagaaatccattattttctaggcaaacttttctaagaaaattctatcctaattaatcatactaaatgaaaagtaagccttgaattgtataaatgaaattcaattagtaaaaccgacaaatttataaaactcaaaacaaaatgaaatttgaaatgatcatcacattatattattatatatattgatcctttaccaaaaatatatatatatatattatgtattgatagtttaacgtactttaaatatgttttttttagtattatataatattataatgcgtttatatatgatatatatatttttcgatagaaaaagaaaaaccaaaactccaccctaaaaaacataatttatgctaaaataaaaataaaggaaggagagattcataacatatttatggcattaaccattaggcagggccgaccctgagagtaggtgggctaggtgtgcgcctcggcccaaaattataaaaaagaaatattaatatatagataaaatattaactaagaagaaaatataataaaaatttagtgtagtagtaaaaagtcttactttaaattaagagatcatgacatcaatttccaacctcttaagagtttttaaaaacattaccattacactaagcactagaattattattttcataatagttaaactatatataggggccccgaaatttaatttcgctctccatataccttaagaccaaccgtggcattaggtagtaatgaatgcaaatcatacttggcattttttgtttaagttcgagcacttatttatagatatatattgagataaacacatatatttatggaattttttcagtttcaatcaaaaaaaagtaacaatatcacaaaaatattt

SEQ ID NO: 227829 - DNA, 1426 bp, Cannabis indica
aaatataaccattgaatagtcactcatatataatattaattaaaactaatatgtctcaaagaaaacaattaaaaaactttatatggccaactttattttgtcaccgaacgtgaagtgattatatcaattattgtaaatctaaattactgtaaagaaatttaataacttgcattcattgaagttttattttgcagaaggtactatagtacgtgcttcataatataaatatgtatatagacatatacatacgacaaataattaatatttccaaactatgtaacactcatatatataatatgatgagccaatatagtactattttgatatttatatatataaatataagcttatgcaagtgttccttctccggttattacaataatattctctgtcaagaatcatgataatatgctgcatattatgtgtaccaatgtatacatgaataattaactaattaagaaattatccaattaaattaccacacatatatatacattacttatatatagttcttaagaacaaaaaagctaattaatatatatacccgatctaataaaaatgttacatagttaatttttagtaagacaatagttctttcttaatttatttttttttttaattatggttttctttatcaaaatcagctagcatactaagaaaaatttactatcctttttgagatattaactaacatttaactaactttacatattaatttatttttatactttttttgtaccagaatagaacaattaaaaaaaagtcgttaacttagactccatgtaaaaatagacgaaagtacctatctaataatatttaaaaagaaaaaaaggaacaattaatgaaccagataacattattcaaaatcagattataaatgaaaacattatttcatacataccggactaattaacagtgaaaaaaaaaacactacctaatatgtctttgagttataaaaacgaggcaaacatttattagaataataaaatcaaaatatggtatggtgatcttatacactataatgtgatttgtgtaatgataatgttaccatagaaggtaataatattcatataaatatatataaggcaggtaaaaatttgtttatgttagtcaaaatgaattattaatttcaaaaattaaatttaagagtataattaatgtttttggacctttcataacgtaggagttaggaccatttttattccaattcaattattgttaaagaactttaggtaaaaagtagaacttataaaattaaatttctggaaggaactagtgcaatattctaacgaattgcgcaagggtactatcatctaacattgttattattaataggtttatttgtaccctaagttcttaaattatataaattttggcaagttagttactaaattttattttgtgacaaattggtcttcaaactatt

SEQ ID NO: 227830 - DNA, 4198 bp, Cannabis indica
cacgcgtaaacattgattagacatttattggctaaatatatatatagaagtttcaaaaatataatttaaatatttttaccataaaaaattacttatataatttatttacaattaaaaattatatgccacaaattactttatattttaacttttacttacaacaagttagagtgttcttgaataatgtacttgcctcaaataatatcttaataatatcccataatttattcaatattggctcccacttctttgaatgtactgatcatgctttggaagactcaacttcaggggctctaggttttgtttaatttataaatataattataaatttaaacaacattatacttaagattacgggtggcaccaaagtagattttgacacgacaaataaatacgaacacaacataaattttatgggtaaggttcgggaaaattagacgcgagtcgagaatatgtcaacatacttgacacgaaataaaattagtcaaacacaacacgactcgctttacacgaatttgacacgatttttttaaatataataaaattaaaaaatatattaataataatttaattatataaaatatatatatttagtgattcaagttaaaaaatttaagttgtagtatagtgtgccaacttgtatgttctgggttctagtgcttcagtcacgatgtattatccttcccaagaaggtctgagtactcctgttattgcgtctttcgtgtttagaaatactcatcgtaacaccatgtctccatacttaagttttatgtctttaaccttggagttgtatatgtcttgtgactctttgctgatacaccgcctttctaagctcatacctatctcttatttcttcaatttcatctaaagacttggccaaccgttggtgattggtatgatggttatatgttagtctctgatgtgatggtagtgtgatctctacgggtatcatggctttgtacccgtaggttagagcaaaaggagtgtgtcctattgctattttttccatagtgcggcaagacaacaacactttaggtagttcttcaagccagttccctttggcttgctcaaggagtttctttagcatatccttaagagtttggtttaccacttctacttgtccattttcttgtgggtaaggaaccaccgaaaagctcttaatgattctgtgtctgtcattgaagtcagtaaagatatcactatcaaactgcattctattgtctaacactatcttttgtgggagtttgaagtgacaaatgatgttcttgatcacaaaattaagaactttctttgatgtgatagtggctaagggcactacttcggcccatttggtgaagtaatctactgccactaatgcatattaaactctgccttttcccttaggtagtgaacctatgagatcgattccccaaacagtgaatggctaaggagtttgcatactttagagtttgtttggggcagctctaggtatttttgagaatatctggctcttgtcacgctttctgacatatcattattcggccaaaaatacccttgtctcaatatcttctttgaaaggctttatcccccagaatggtttccatgaaaaccctcatgtaccttgaccttgaggagcttggattcttcttttgtgacgcacctagaagtggcattgagtagcatcttcggtacattacttcatccatgaagatgaagcgggctacttttctcatcaatttcttagctacgttccagtctattgggagaataccttgttctaagtattatgcaattggggtcatccatgatttttatttactctgattactgaattccttctgtgtcgtcatcacttgtctcttctccatgttgttttgacgattcaagtaaggtttctttgttgtgtgaatcttcaggtgtttgggacggagatctagttcatgccagttttctttcgaacgaagcggaggctattctatctattctttgttccaccatagatgtcccagataaaatgatatagaattttgaaaaattaggtcggtattctatcaagagtggctactagctagcactttgcaatatggtttggatcacacttatccggttagaaaaagatttggactcttaatgtccctcctaagttgagaatttttctttggcaagtgtctaataattggattcctactaaaattaatttggctcgccacgaatttttatctgatggctagtgtcctatatgtgagatgaacgaaaaaactactcatcatgcgctttagggatgttcgctttgatgtcttgtaggaaaatctatgagtttactttgtgggatcctcttgttcattgtgaggatttttctaaattttatgtatagatttattgatcccctcccaatggaaaagattgagttggtgatggtaattttttagagattttggtacaagcgtaacaaaaaagtccacaacagcttggagctattgccaagcttagtggttaattgggatcatgattacattaggagcttccaaaacaagaagcgggtgtcaatggatacagtggctgctccctcttctcaaccgttggtgaggcctcacccaattccggcgactgagaaatggagacctcccccttcaggatttctcaaagttaacatagatgcaaccattgattcgattggaaaatgtagtggcctgggcatggttatccgaaatgaatggggagttgttcgagcttcgacgagttagagattggaagtttgtaatttgaaccagaagtggcagtagcgttgactatttgcaatgtgtttatctagtgtctttcatttgggtatgacaacattgttctagaatcagattgtttgagtgtcgttctaaacattcaaagtaatgtgctattattacttccttgggtcttatcttagatgaaattgttagtttttgtaataggttcaaagttgttagttttatctattgttataggtcttgtaatgtggttgctcattctttgaccaaaacttgctttatctgctagtagtagtatgatttggtggtcaagtaatcctagttgtataaatgattttttgatagctgatgctatccttgaatgaattctcgcttccacttttttagagtacttattgcttttggtatttggtaattgagactttttcctaaaaaaaaatatattatgtatcccatgccatatgtcaactaattttagatctcaatctattattttggtcattcatgtattgagtgcttgcaaagatcatcagtttttattgaaaaaattaggagtgggtcttgacaagccaacaatgcttacattttttatgacgtggatgtagaaattataagcaaccttaagagtggcttccattgatttctcttaaatatggtagttttcgcatttttttatgccaaaaatccaagtgatccacacattaacaaaaattattctttaggatataacttttaatgtttatcttatgatgtaatattagttttttgtatggcctagttggttgatgatgatataagttataatatatttaggtgttgtttctcaaaatacataaattattattatataaaatgtttatatatagtgctaatgaaattgcaaataggctattataattttccacaaaataaatatgaaaagtctctctctcattaaatatcttgccaattgagtattaattctatttggatgatatgtgaagacatataatcttatgaaaataaaataatgaggaaactcaggccaacacataattaagtacaaaagaatcatcatcattttttctatatatataatcacgtaccaactttaaagaataaaagtcagatcacataattcaatcaattgtttgtggaagagaggaaataaaaagatgtatgtaacaaggcctatgtcgatgtatagaagggagcctgaaacaatgtcaataactcccgaattggaaggtcctcattctggttatctggtaatgtttaacgaagaagattatgatgatcaggtgagcgagagctgttgtggatgctctggcttcgatagactcaggaacttgcctctacctcagaacaaaattctgagagttgagcatgatgatgacttgcataaagatgtcgtcttcataccagttcttaatcatccattgtcttccaaccgttactatgccatagtgccccatggcgaccatacagggtacctatat

SEQ ID NO: 227831 - DNA, 2430 bp, Cannabis indica
tttgtctttatcgggaaatgagctcacaaggatgttatatattgccacatctttaatttttgcactcaccacatagtttttactcttcccatcaaattatgtttttcgtttccattcctgaatttagtaaatggcaggtcttggaaatggaaattcaagtgttgaagtacttcaaatttcaactgtttgcgcccacggcaaaaactttcctcaggtacttaagcatgtcaacgagtcacttcaaaactaattgtttgctttatgcatgttctcaatttcttgttttctttctttttcttttctccaggagatttcttcgagcagctcaagcatcatacaaggtaagataatgcagaactaagttgtttagtgtagctagcaggatactccagacttttagttagattcttaccatgtgtaattatatatttacagaatcctagtcttgaactggagtacttggccagttatttaacagaattaacgctgatagattatgggttcttgagtttccttccttctgtcattgctgcatcggccatatttctctcccgatggacattagatcagactagccatccatgggtgagcctttactccttatcttttttcctttcttttgttgtgagttccatataattcagtagaagtttaactttcttaatatctatcagaatccaacactagaacactacacctcgtacaaggcatcagatttgaaaaccgctgttgttgctttacaatcattacaacgaaactccaacggttgtcctctaagtgctacacgaacaaaatatagacaagaagaggtatcaaatcacatttgtgatgagaaggaatctttagctcttatttttcattccaagtatctaatacaatgaatttcgttcttagcagtataaatcgatcgcagtgttatcttctccagaactacttgaaacgcttttctgaagagagatggattatgcaatgactgctaacaagataggtgtgtgtttccactggctgtcgtcttttacacgttgagctagtgcttaaatgtctaattttagttctctccacttttcaactccattcatttttcccaatttagtttaggttcactgaccttctgtctgtcaaatttaggatagggttcactaagttgggatttaaaaacttgtaaaaaagaaaaaaaaaattgtttggttttagacagcacatagaattagttcctcttgagttgtaaattttcgagagagatcagaactatatcaatgtagctcattagttaaataacactatttaattgccactatctttatatatagtggtcatatcatatgccttgtaattgcataagtggtcatgttcttgatgatttttaatggtaagctttggttggaaggagtaggctactttgtaaattaattagtcatatttctcaatagaaggaccatttattaagtatatactaaataacttattacttttataatcagaatgatgagattttattgttggaattggggtattcataaccatttcatcctaatattctttttgtcaaaacttcatttcatttcattccacggctaaaattattacactatgtttggttggaaagggagaaaaatagtgggatagaaaatagaggtgctactagtgctaggaaagaaaatattgctattaaataaataaaatttggtacaattataaatttataatttaacaattttatataaaaaaacaaaggtaaactttttcttttcttttaatttaaatgtgtattgtaaaaatctgtcctcacctttttctccacttttggagaataaaatattggtagggtccattatttttttttcccattgttctgtttcattcacttttttttctcaaccaaccaatttttttctttctccaaactatgtttttactttttccattctaccaaacataatgttagtatcatctaatgatggaacctatcaatttcaatttctattttacatgtgaaatttttcacttttatcaatttcaaaatataattaagtgcccaagacatgaaagtttatcatttcaaaaaaaaaaaaagtttgtctaagaaagaaaaaaataaaataaacacaacttaggtttaggtaggtgcctattaaattatgacatcaggtggaaagtcaccaaaaaaaaaataagagtgatgttagaaaaatttgagatatgagtgacattgattgagttcataatgtattatttggatgcatgtttgtcttttaatttcttaggacgaatgatatatttttaaattttgttatgtattgcgaaaatctttactgatcataataattattgcaaatttgcttgaattatattttatttttatttttacagtttgtagatgttacactgttgtgatagaacaggtaagaaagtacttgcataatagtagta

SEQ ID NO: 227832 - DNA, 5160 bp, Cannabis indica
ttgcacaacttactcaatatttccccttacgggtcacaggactatcacacgaatcaaggtatggagctcgagaaacttatcttatatgagaagagttactctcattaattcagttctcatctctattcactcttattgagctcaaataacaattcttctaaaaaaattttgaaaaatgtaaaggctatatgtagggccttttttttggaaaggcttggcagattatagtggtctaggtttgatagcttggagtaatgtatgtctgccaaagaaagaaaggagtttgggtttttgaagagtactagattggaacgtggtagccatggagaaatacgtttgcgcaatagctaccaacaaggataatttatttgttaagtgaattaacggtatctatttaatagataaagattggtgagattaccaggctcttaatagttacagatggtattggaagaagcttgttgcagtaaatgatgcatttaaagctcgaatggatttattaacttttattggttcaaaatatagtattaaacaggagttgcaacttttatttgaccaatcacacagggtaccttggagtaaggtggtttgggatagacttagtgtcccaaagcctagaattgtattatggctagtcttgttacaaaaaattcgaacaaaagataacctcaaaaagatgaacatgtttgtagatcaaagaaattaaaagctagttgggatggagatgttcctcctcgaaactcaatgagttgatccggtgggttactcacagactgtcttatttggtggcaattgcccaaatatcgctaccaaatgataatttttttaccaaattaataaaaattacaaaaaattagaatactcctaataacaaaatatttactataactataatatatactgttatattaaattatctaaaactttacaaaattcaataagaaacttgctttaattatatagtatgcattattatcatattaaagctaattataatttctcttactaatattagaacaatgaggcctctactttattttataattaactaattatttaaatatgtatatatttccggcaattatctttggtaatgcatttgacttgtctaacttatttgttttggatagatagtgaagcaatcaaatttgacaagaaagtagcatcatataatatatagtattagtatatacccaaattgacataattaaccaatattattgatttggttgtatgtatggatttttttaataaaaaaagcaaagtaagagaggaatggattacaccaaaaccaccaaaaatatatatattaatatgttcattaatttgttgagaaatattcaaactttgctacctaatctttacggcgcttaccatgcctaaattctcttatgcaatcctcactcactcaataaatatataaataaagagtattgttattggatactaatatcccatatttaattatactaatagtgatatgacactaaagagtgtgctaagtactgatgctttttagcgattcttataaataaataataagtaatggtagatatacactcaaattgtacacaagtattacacacaatgatgtataataaatagtgattatttatattttaaagttagatattattacttttaattatatagttgagattaagtacacattattttgtataaaaaatacgtgtaatttgagtcttttgtaattatttctcataaataattatgtaaaatacaaaataataaccaaagttatatgaggaatgttaattacaatctcttattataactttttaaaatttttatgtctgatattacatgttggaatatttttttaattttttttatagtggtattcgttatagttacaatatcattcctgtaaatttttaaaaaattctgaatagtttacagaactaaaaacagaattcccaatattaactataatgttacaagaattattcaaaaacttcaaacttcaaaatttaaaattatttttgacataataaattattcaaaaaaatttaaaatttttgacataataaattattcaaaaaactttaaaattttacaagaataatgttataactataatgaatattaccatatgaaaaaagaaattaatatttagttttaaaagttgacaataaattataatagaaagttagaagttagatttattcaccctagctacttcacaatcaccatttatacatccatcatcaaattccatttaaatttctcttacttatttggtttggggcacctaacctaactatattactattcttcaaaatggaacaacatcacatcacatgtattcaatgaaaaaaaaatatatataggaagcttacataggtggagaattacttttctagctataaatgtctaaatagttagtttatgtataaaaaataaaatatacatatacatgcaactaactaatattgaaattttttaaaattaataagaggtatgttataattataatatacactcttataattagttaataatattctttaaaagttattttttaaagtttaaaataagatccaatacttaattacactaatagtagtatgatatcgaagatggtattaagtaccaacgagagcattactattgagcaccagtgatgcccattaccttctataagtagcgtctcatgattagttaacgatattctttaagctatataaaacccgatatttaattacacaatagcaagaaaagtgttaaatactaataatattttttaacaattttcgtaccaataatattttttagcaagaaaatattgaaaacaccgacggtggcaaaattattggctaggcaagcataggtacatttaatattattaaacgacaagggggggcctatcatatatatatttatatctttaaaataaacaaaaccttaaggtgttatttcccacatgagatcactacatttagtgggtttttaactccttttgagaacacaaattggccttattcttacttcattatactaacattggcatctctattaattgaatctatacacattttatgttgatttaatttacccaacaatataaatataaatatatatataggtaataaaggtcaaattgagaatcttagatctacaaattagatgatacctccttgatgtgtgtgggttattattatgacttctctctctctttgcttactttttggtgtaagtcaacaaaaaaagttacaaaagtaggctttgaattactcatgtcatgtgtggtctttttaagttggtaattaactagggctaataatgtgtatatatatatataattgtgtatgaattattgagactatatataaataagcattgatgttagatattgtcaagagtgttttataataataattatttgagtaatttatagtataaatatttaaggttaattttttgctataattatacttaaagttatatttttagaaatttataggtacatggtcattaaatatcaaattattattcacgtcttattagtatatttaaataataaaaattcatgatttggaccaatcaatgattgccacataacaatttacttaacatttaccaatcagatacctatagagttctagaaatataacttaagtattattactgccaaaaaataaacttaaatatttatttgcaaatgagaattaaattaagtatttatattacaaattaaataaaatatacgagacttgatatacttaattatatcactaataatatgatatatcttagtggtattggatatacttatggtaccttttactatttctcttaactagtgctaatgtattctaatcatagttatgttaatttaacacataactttgaacattatttgatacatctttttaaccatgtaattaaacatatatccaagagtttgtactcttgacaagtatatgttggaagacttaagaagataataataaataataatcatagtgatcattgtaaccaattaattaattaattaattaatttatttttaatgttttgcttgatcctatatagagtgtgtctaaacctgatccaatttaataagaagacagttattaattaactttgatttaatattcttaactaattaatcccttttgtgatcttaacaatgtttggttggtaacttggtactagtatatggtgtgtgagttttgttcattgcatattgacctataattatatattaatttgcaaaagaaaaatgaggtagtttgaaatcctaagtacaagtcaaatttttggccaccttacattatcaaacactcacacactaatatccctggattttgtgaagcttaaaataagggagtgtttggtgcacaccttagagattagatgtggggaattaatgtattttatttatacatatacaatggattttattaggaaaatttgaatttcatgtttgattttattatctaattataaaaaaaaaaattgtattatataattgagaatattgttttatcgaactaagagagagataaaaaaaacagtttactttgaattagaaaaggggagaaaaaaatactaaatataaatatatttttgatatagtataaattttttcttttttaattaaatagtaaaattaagtacataaattctaatttttcttttattatcggtaattgaactagtttttttttttaaaaaaaattaatatttttaaagttcatctgtaaaagtaagcaaagtgatacaatccatatatatatatatatataaaatttaagttacatttttcgtttttatacaaataatttgtaaatagataagagtaattcatcaattcattaaagatgtaaaaattgaatatttagttgatttgcaataatatattctggttttgaatcaaaaaccgctccccagccgcaatatagtaaacaatgtatatagctatcatatatatattcatacatgagttgccaaatctttgattcatcatatcgaaatttgcagcgaataaagtttaaaaagccccacaattagccatgaacatgatcaataaaactcttttaataaatacaaaaataatgaaacggtacgtaagattgttaactatatataatattaattcgttctacacaaagtacaacgtccatatctaatata

SEQ ID NO: 227833 - DNA, 1070 bp, Cannabis indica
ggttctctcaagtatagcagcaactatgaatagagccacaattaaaacggttagaaaacgacaacagttttaaaatgagaattaacttttaaaaacgacaataatcaaggtaaacgacgataattactaaaaatatccaacaaagaaatttactttgacaaatagatggaaagaaaagaagagtagtaggtagaagcaagattttagtcaaaatcctaaaaggtaggcgcggcatctgcttagcccaactaataaaagcccagctaagcccagcccagcccaatttctcgtctccctctctctcacacatctcctcttttctctttctctttctatttctcctaccttcaatatcataatagtatttatttttattcttattttaactaaaaatagattaaaaggaagaacaatcgaatcagtgcgcgatctgtgattctgtatagatcactgaaccctaaggaaaagccttacctatctcccgtctaaccaaacaattctcatttctcttatcttcgaattcatcattgagcttcaattgagtttattttgatctataccatacgaaatatggcttatgcttcccgtattatcagtcactccaaaaaggtatctctttttcgtattgttatgttaaatatggatttacgtgtagtctctctttgctgtaattttattgcatctgatgctggattcgtactttcgtattgaactattcgttttacttggaccctacttgattttgggttttgtccccactttttttttttgctgggtagattaggattgcccaaatttgaatcttgaacctaatattttattattctggattttgaaagttgtattatattacttcaatgttcatttttatgttaaatgatagaaatgtgtgtttgtgattaattttgtcagcataaaagatcatgggttcgaacaatggacgtgggtttagttccttgattatgagattatgctaaaattcagtggtgttgccttttgtttctgtccgtttttgtttagcacttgtagatatagtgacttatagttgaactgtcatttgcagaattata

SEQ ID NO: 227834 - DNA, 2946 bp, Cannabis indica
taacttaaataatacataaacaaaataaaattaaaaaattactttcaaatattgccaaaataaataaaaatacatcggtggactcagttaaattttttctatagttattgtatatcaaatattaaatatgggatctatcggatctcatttcaatgtttttttaattaacaaaattatattttgttaactatatattaatattaattattacatatttttggatgaccatcaaactcgaacatttagtaataatcccaattagtacatatatataaatatatatattgtatacgtgttatatataagaagatcatttttctgtgaattatgattattcttggtctaattagatggaggtcttttcttcttaattttgaaagagaaattattaaaagaaaataaggacataaaataaatgtacattgaatattattaagacaagaaaagtcgatctttgtgttgaacacacttacaatatatatttcattaattcttatccttattaattattcagtgttcaaataatatgtcttatgtatttaactaaaatttattagctagtaattaattaatgtttagagacaatcactcaataaaattgtgttgaactacagtttttttcccttcttcttatcctaattatatttcggtgaatatgtatgtaattttaactagaattattttatgatgagctggtaataaattattaagtataaaaatgaatattctatcaatatatatcgataatatatataataacaaaaccctagctagcttagctataatcttcttcttattattctgataatacactgatccatatgtcttgttgtcgatcaagataacaaaataaataaatagtactatttaaagtcaatggtctggtctgagtacatatattaattaatttggttaattatttaattaattatgctcataaatattttgttttatatatataaaaatcaatttttgggttgatcgagttgctgaggtggttaagctctccctcaataaatgaaatgtaataatttaactaattagtttcaaaagtttttattggatttggaaatacagatagatatatagttaaatcaatcatatatataatataaaataatactatgataaaattaatcgaatcatagacaaataaaaataatgttaggttaggtaccctaatagtgatcatgactaaactttatgtaacacatcatatgttgattggttagactagaaaaatattttaattaattaagatagaaagtattaataatatataattatatagagacatattaatgttctagaaagtttcgttatttttatgtaatttaatattaaacattattattattattttattgaggcaaagcaaacactaatatgaatcaattttgatttgtttgtctcccttttaattaaattacttttaattattttttactattaattacaaaaaagtatggccaactcgagccagtacaataaataattaaaaaatattatttattattattattattattgtggaacccacatttgagatggacacaaatttgattacgtggaggcacttattattatttgtttttatttatgtggaccatgtgtaaataaaatttggaaattaaatgttacattgtcgtttatatttttctcatcaagttggtgacttttatgttattttatttattattgtagtgggggagtgttattttaaaatttattctatttccattattataggtttctagaagctatgtgagaactttttatggacaactaagattcacatcgatccaaaaatgatattcacaaattacatactagttagtagatttcgatttggatacatagataataaatatgttttaaatatgtccttcaaatagtaggggtagccaattaattctatctcgatccatatatattttgtctcaaatttttttaatcttaactcaatccgtacgtaatataatgaataaattttttaatatcaagtataaattatgtatcttatttttttttctaatatatattttttataaaataaataataatttaattataaattaataattttaataatatattagatataaaaagttaattcgtgtcgatttcgtatcatatgtgttaatcctaacctaacccaaataataatcgtgttatcgtctatttttttatgaccttaacttacaataattcgtatcgaattcgtgtcgtattattgtgtcataacctaatcattgctatccttattaaagagtagtggtaaataaagagtgtaaatttgtgtttggatggtcaattgtgttaattgtgtttgtgtcatatcaaaatttaagttacaaattaatgttaaatctaaatttgacatgtttataagcgagttgatttcacataactcgtgttgttaatgatttatttaattaacttaatatattttacatgtaatgaatataagtttaaataagtgtgacagtcagtattgctgtgatctgtaagaagaaatattgggtaagttgtgcaatctcataccgtctggaaaaggtcaaatgggatgattctgagactgtgtaggtatgagactacacagttgaagatggcttaaatggattgattagtactacctatatcaacaaggtgcatctcgtttgtcggtagtctatcacaaaagaactctacagttaagcgtgcttgatctggggtaatttaaggataagtgaattcctgtaggatcagtcgtcattccatgaaacaaccaatgtgtcattttgagtgagacttgtctaaccgaaaataacttgtttaattaataagttaattgtattaacttgaaaaatgacacaattttttttttcaaatctatttacatgtattatcatttttgacctattttaccgtccctagatattagtattctaatatatatatatatat

SEQ ID NO: 227835 - DNA, 2341 bp, Cannabis indica
tttaggtggtttattttggtggttggattattattttaatatgttctcttatttcacaacaaaaggacatgagaaaaattgtctagtcaaatgaaattccagtatcttgctagtattaagtgaatcaaaaaatcaagaggcatataatatataatagagaactaagagaagcacaataaaagaaatatcagcacaatgatagttagagtagctaaatttgagaacatatcagatgtcaatgaaaataggacattggcgcaccttctccacatagctgttcaaatcgagcaactatgtgttttccatacgtatatttcctcagagcagcaagatgggctcttgtgcgattcagcaatattgctcgctgtctgtcattgcttttctcaaacatcttttgcaccacataattagcaaattggtccttcatcattgtctagatataggaagcaaacaacaaattttagtatgttctgaaacttatacaccaattagcttatagggtgttctaatcatcacaaaattatattcatgaacaaagtaatttttttaaaaaataaaagtaaaaattggaaaattcttttaaaatctgtttggaatgccgatgaagagtcgagagaaacttcagacaggcatttaatgtccaaacagagtatacacttcttctcaatgactcacctaaatggtaaggccaaagcaaagtaccagtggtaaaagaggtgaatattaattctgtaatcaatgtaatataatgaattatactcttgtatcatatatggagtatactttatttgtcataccagtaaactatcattttcctccgacactcccaaaatctcctcgatcaagagctccctctcctcagtattgccatgctccaaacacttctcaacaacatttgatgcatacttgtgcatgctcatttgtacaattatcccggttaacttgctaataatttggctccgctcacaaggctttccctgcactaggagatactgcaagcaatcacatgcactccatattagactcgaaaacaaaaaactaacatgaatagaaaaaatagcataaacttaaaatgaattatagattattagtttttttgttttcaatagatactgttgctaaatatctacacaacaaccactgtgacaggtgggtgcatggaaggagtttgataggaccaactctttaatggggaaaaaaaaggagacaaccaaatggggcaagcataatcaagaaaaccaacaggaaaacattaacgaaacatatgggaaggaagtaacatcaagcatgaacaagatttcttccagagcataacactagctaaacaaagtgatatatagactgaacactacctatatcatcaatcatcttaactaatctatgaaaacctattgaaatttagagccaaatacagcaatcatttaaatgcattgttatttgttttattatacttaccaacattttcagctaaaggctgtttgaaaaagcaaatctaacttctaagaatagaaactaaaaaacagatcaaattgatagtactgaaggatccacctgcttcctctgtctaacaagaaatttatagaaccagacgcacttattcaatgaagaaaattcttaacttatattaaggtaaactagagaagcataaaaataaagaaagccaacctgggtaacataattgccatattgatcttgagcaagaatactagcagactccagtatttcatttatgacacatcggcattggaggtcatctgaacagtactccaaaactctctgccacaagccaaaatatgacaaaatcttaaacacgaaaaatcaaatctgatttagtattaaaacctgaagacaacatgatttacctgtatgacacggcaaccgtaggggtgagtagcaaggttggcaacatgtcctttgaaagcagatataataaatccaatttgttctgctgggacacattcaatacatttctggatgacatgatttccattttgatcatgtacacatgtcatgacatggccatcaagttcttgcaccagatgtgtcttttgaccaacctcaataacgtcaagagcctaccaatccataaccaaaatgacaaggttattccgcaacaccattgtccaacacaaaatgttagttttatactctgtacttcacagaacacaaaaatgaaaagaaagaatcgaagccaaattccacagtatgagtaagcagctctatgggcagtctctttctctattaaaatatgtccaaataccaagagaaatacacatgcacccattttaggatttaaatacatcccctcttgcgcacacgcacaagctgattaaatcctaac

SEQ ID NO: 227836 - DNA, 1439 bp, Cannabis indica
aaggatatcactttataaacatttcccttttatcttgtcatgttgtgcaagtggctcatttttgacaattaagaataaggaaaaaatgtgtgatacattaaagagaacagtgttattacgaaactaacaaatattctatggaaattaagagaaaataacaattggaaaatggagcaacatataatgatatgtatgcatgacaagtggcaccattttgaaggactggaccaatctaaattaggaatattatataggaaaatagtatggtaaattgggtaatatatagtagccagaaaacagatgaggaggatcactacaaaaaattatactaaaattatattttttattattatattattttattaaattaaaaataaatacaaataatatattttttaagcaatgcaatatatgatgcatctctattcatatatggctctgcaggtctcaaatcaattttcctactggtatatactatatatagtagaatatatatattcttggaaggtcctaattatcattttattcatcaattatattagatttgaacaactcattttctttaagagatttaggcccccaaacagaagaaaattaaagagctaaacaggaaaaaaagacacgaatattagagtataatttgtattgatttctcattgattgtgtcaatgattgtatcaatgaatacacaggtatatttatagtacacaaagttgaaaaatatctatgattaataataaaatgttctctttcaatataattggctcctgaggataagggaatctcatgaaatgggaattctagaataatccatggacagctcatcaccaggtgagaataatcaggtgtggtggacttcatcctttctaacacgctccctcaagcttgaccaggtggagatgccacgacaagcttgtcttttaagtatgaaatttgacttatagaaacaaccttggtgaagatgtcagcaatttgttctgaggtaggaatgtgtctgatctcgagtttcccttgtttgattagacctctgatatagtgaacatcaaccttgctgtgtttggttctgctatggaagactgaattggtagagagttgcttttgcaccaacattatcacatcagatgacagtagggatctgatgttttacactaatggcgcgttttattaaactgtaattggaatcagaataatcaatgagagaaatgtatcaatttaaaatgaaaaataatcggaaacaatattttattatgatgtttattaaactgtccggaaagaaaatcagaatcatattattttgtttacataactaggaaaggtaatcggaatgctttaatttgacaaaatttccattattaaaacatgtaattattttctgtttatagatttttttaaggggtatatttgtctttttcattgttaattaataaaattaaaattaa

SEQ ID NO: 227837 - DNA, 1528 bp, Cannabis indica
aatgtccaagggttcccaagcccttggacattccaaaatagggcattcattgcgatcagaaacccaaaacatttgggttcgccgcttccaaagtagtatcaaggttcaaatctgtgaaactcgaaatgttccttgagtcactgctgccatcttccattccaaggactgaattaaccaagcctgttttcaaacttccatctttcttgagacgtttcggagttatcttccttcttttagtcttcccatcacccagaccagatttagtaaaattgctctcataaataatcggcacctcatatagttggcctgattctataggattagccttctgaattgatgatgagaattgcggttcaacagtgttcggggattccaaaaagaaagaagaattccccatcagctcttcacgccaatctccatttcttttatgattgatcaagcgtttttcccctgaggcttgtaagacacctttgatcagtccctcctttgatcccacaaccttatcaatagaagatgaggccatatccaagatcacctccatatctttaatactagttccatgagtaacctgtgccacttcaatttcagaaggagatagcataatcgaagtcttcaacttcccctgatctggtcctttactcaaatttgtagggattggattcgtagtataattgcgaacaggctgtccaaaattataattcgaacctgaacccaatttccctttcccaaaaatgtctgttatgtccttcttatcatcaaccttgagccatgttccaaacccctgttttaaattatttgagtcttccaccactcgtccattaggttccacgcagaccttcatttcatgtccaatacaaccacaattaaaacacataaaaggtaagcgatcatacctgaatgggagccataatttatggccttcatagggaaagaggaagcccagacataagggtttgtccaaatcacaccagactttgaacgtaaagaagcccttagaagaaatcctagccacatccgccttttgaacttcaataatttccccagccatactagcaagtctttccagattcttttgagtgatcgatttagggggcaaagacgaaattctaccacttaaaggaatcctagagagacaagcttcccaattagatggaatctccttcatacgttccaagattagtgtaccattagtcagaaaccatggatttttgataagaatgcgattcaaatcttgggacgatttgaaggagaataccaagaagatggaatctttgaagtgtgtttgatttcaacaccccagaccttctccggtaggccccacacccaacctaggatcgttttgatcaaggatcgattcattgtgcgatcagaacagaggcgtcctaaagcacacatctttccaacttctgctcctccatcttcgtttatttcccatccatcttcatccagtacgacaagattgttcgttttagatagcaggtcttccatgacttcgtcgggctttcccagcaatccttccggcaggctc

SEQ ID NO: 227838 - DNA, 1536 bp, Cannabis indica
aaagatatcctaacacaaaaacacttattatcagattcacttataaaatttgaatgacaatacattattaaattagccaatcttgtaattgtagtaatatgtgtgaaaataggcattttcctatgtgaatttgacacgagtaggattttctcctcaactacttagaattttactccaaactattttttatttttttcaataaataaataaaatctgaactttaaaaatcattgcaaatatgacatgaatttttgagcaatctgtggatgtggataataaatatagaaacattaatgctgatacatattcttagaatttgttattagactactaatggtgaatgatcagtgctacattattgctactttaatcaacaaaatatttttagaaacgagtaatttccctaaattttttatacttccaaagatttttattttcaaaagaaaaatattaataaaataaaataaaaagttcagaaggatataatagtttgaagagtcaaaatcttttttgttcatatatttgagtatggcaagcatgatattatatctaagatattattttatcaaaaaatttaagaatcaaaataattaaagagtatatattcgtattccctttgtaatataactaggaaacaactgtttctcagttaaataattatataaatattaattgaatagtaaaattagtattaaataattttaaatttaattttgtgtatatttttttcaaaaaaatgtattcattaaaataaataataaatctatataaaaaataagagtaaatactattttggaccttgtgttttacaaaagttaccgattggactctgtgttttgttaaatgacaaaatagatcctgtatttttcaaaataataaaaataggaccttaaacttaatttttgacaacttttttgtaatataaccaacttgaacacaattcttaatacgaacacacagaaaatgtaaacagttttatcatggtacgtttagatcggattataattaaattgtattttgacaaaaaatcaatctagtgtcctatttgtaccattttaaaaaatacatggttcattttgtcatttaacaaaataaaatgttcaattagtaacttttacaaaacacagggtccaaaatagtatttaccctaattttaatgtttctaaatcagaaggggtatgatcttaccttgagaacagccttcgtacagtctctagtgaattggaaatgttcatcctcattttcacttctctctatgcatagcagccaatcaacaatgtcttcctttccttcttctggtgttcttttaagatgttcatcaatgacttgattgtagaactcatccaactcatgaaagatcctctcgattcttgcatgaacaccactcaactcggtcaataactccaacccacataaaggaaataaatcagaggcagtgaagcctaccctaaaacatctacagctctatgaataatctcttacaaactcatcatggtctagcccacactccttaaacctctttccaaaggtcagtcc

SEQ ID NO: 227839 - DNA, 1627 bp, Cannabis indica
gtctctaatgtaaataataataaaattatattatactattttcttttttatatgctcattatttattttgacaaggttaagaacaaagtgaaatttaaaatatgttcttttttatttatgactgccaacttggtttggtgacattctttaaaaaaaaaaaaaaacttggatttgtgaaacaaaaaatattagtagttaattattatcaaactctattttttttcttaatttttattatttgaagacttgaaaaattatatcttttcatctcttacataattcattttcacattttccctcatatttttccactattttttcaattaattccttattgtaagtctatataagacaacaaataagaataatatccaaaaccataaaaaatgttttggtttagttatttatttcattatatgtcttcaaacttaatatatacccaaattcatgtatcatattcatgtcattgtcacatagatcaaactattttaaaattgatttttttaaaaaaagtttcaattatgactcccatggaaatttctagatactaatcccatcatggtcttactttttatttatttattttcttacctccaacttgatgatatttatattgatattataaactacctttgataacacatcaagtgcatcttttaaaaaaactacattaacattcttcatttggcataactttgatcatattgtcttatttattgtgcccaaatttagtatacaataaacacaacatatcgcatgctaatttttaacaggcctcaaaaaattcattttatataaaaaagaaaagaaaaaaaaagatgtatatagttcacaaattatcattattgaaacacaataaattataattaataatacaagggtttatacgattaatccttatttcttgctctatttattctctgtttacttttacttttttcaaaattactttttttactctatattttgttgaaaagtgtaaattggaatcctaaacttaattattgatcaaaataatttttaatttaactaaaatacttctcatactattagtcaagaatcttcctaccaacaagatcatgaatcaataccttcatcttgctcgtctcccttcccatacattaattctccattttacttcctttggcaagtgtattacgactattaaagtaagacgacatagagtgcacaaaataaaagccacaaaaagaaaaaattatttttttaaagaaaacaaaaatatatattaataagtaaattggacaaagtctattacacgatgataaaactcatagagcacattgataataatagacataccaagtcgttaacaatagtatggaagaaaacgctaacaacaacctcaactaagagtccaataaaccaccagcagtctacctatcaatggctatcagccaattgtcttttaataaatattagaaaatatcaatcccattatttaaataataaataaagaaaataacacgaccaatcatgttttgacgctctattactaaggaatagagcacgaaacacatggccaataagtaggtctgagcgacaaagagaaaagttatgatacgacaaaatactgactacagaaaagagaacaaactccttaacggtc

SEQ ID NO: 227840 - DNA, 1993 bp, Cannabis indica
ttttaaataaaaataaaaatttattaatctagaccaataaggaactggtacgtggataataacttgatcttaaccgtcagtacctaagaaagttacagaaatataacttaggtattattaccgtaaaaattaaacttaagtatttatctacaactgaaagttaaacttaaatatttataccacacattactcttttaattaatacattgttccaaataaatatagtgcatgtcataaaaaataaaagattatgatgtacgtctaagaaaatagctattgaaatgtaggtgcagcacaaaacaaaacatgtgtacgttgtcccgaagattctccatgtatatatataattgtatagactatagacaataacaataataatcgtgatatataggagaagagggatactgtgtggtctcctggaaattttcattaatcttctttagcttgattatttcactgcatatgtaaaatagtaagtacatctttctttctttttttcttgaaggggtagtgggggagttgagtacgtacatgtaccatagtatggaatttgtaccaaaagaaaaataaattaaaaagtatttatagcctagctagctagctagcttgttttctagtctttgatttgaaaacatgattgatgatggtggtgagttgatgcagggtgttacaggggaagcataatataatatggaggcgcatggagacgatcgtgggggtggtgaggtgtggtcagagatatctgtgtctatctctgatgataagagcttttccactagtactgatcagccccctttgcctttggtcaaattggaaaacaccacttcccaaattgccatagttggctccaatctctactccattgaaagtcttgactatgagtatgtcaatgtcaacccacttctatttttataaaataataataataattttcaatcaaacgttgaaatttcactacttcaaaatatatgaaatgattgtaaacgttaaacctttgttcaccattgcaaattaatttgtctacctttgaaactgcttttatatatataaatataacacaacaaaaaaaaaaattatatttagatatatgatttaattttttccttaatcgaaaaataaacttatatatatgttacattttgatttgtgtttgagaataaattgctgttttgatttagttgtgacgtttatatgttagtgatgaaaatgaagttaatatttcccatattcaggattgttgaaaatgaactgtttaagcatgatttgagatcaaagaagaaggtgaaaatatttcagtacgtactaatcaagtggacatttgcccttctcattggactaggaactggactagttggttttttaaataacattgcagtcgagaatatttcagattttaagctcttgctcactactgacctcatgtcaaagaaacagtgagctttctctcctctccactaaacaatttatctttgaaagttaaagaaataactaagacataaaagatgtggttcgagtgcagatactacaaggcttttgcagcatttactggttgcaatgttggtttagccattgcagcaggtgctctatgcgcttatatagctccggctgcagcaggttcgggtattccagaggtcaaagcctatctcaatggtgttgattctcattcaatacttgctccaagcaccctctttgtcaaggtatacaattaaaaagtctattcttttagcatattccttctctgttttgaaatcatgttgcaacttacttggtttcctctgttactcgggttttggaagatttttggatccattttgggagtgtctgcagggtttgtggtgggtaaacaagggcctatggtacatacaggggcttgcatagcctctctgcttggacaaggaggttcacacaagtatcatttgacatggtcgtggctgagatacttcaagaacgatagggatcgacgagacttgatcacttgtggtgctgctgctgg

SEQ ID NO: 227841 - DNA, 2754 bp, Cannabis indica
gtggcgtggagctcggtgacgatgaattcatactacatgtcgaaggaaccgctagttcgagtagagttgtacgccatattggtggaactagttggcctggtttgtcccataatttagtttcatatttgaattttaagaaatattaaaatcaacatttgtacttacaaaatgttatgttttcaggtagacttacactaacaaactatgctctttactttgaggcatctggagtaatatcatatgaagatgcacttaagatagatttctcaaagaacatagaacagagtgtgaaaccgatcgctacagggccttggggtgccccgctcttcaacaaggcgataatttacgagtcatcagagttgtaaggacataatttcatttttacatacatgaaattgccaatttgcatatcaacttgtatattgatcagaaaatatactttgttttttcaatgttttagaacagatggaattgtaatagagtttcccgagttaactagctcgacgagacgcgatcattggcttgcgttgacaagggagattcttctcttacaccaatttctatccacattcgatgtgaagtgtccgatccaagcatgggagatgcacgcgaggacaatacttagtattataaggctccacgcagcacgggagatgcttaaattgtcgccccctgatccaacgaaattcttgattttcgccttatttgataaaataccgaagggtgattatgtactagaaaagatagccgagagtcttaagacggcgagtccagggcattcgtgcagtgctagctcgctcttgaggaggatgaatgtgagagaagcaatgatctcgagtttagaagatgaagttactaaagaaagtttaagaggtccattggacaacattacttcactcgaaagcgctataaataaagctagagaagaagagaaggaaagtgctgtagcgaaagccactacaacgcatttgaaagaggaaggaataaccgaaagcactatggttttgatggtatgcaactcaaatatattatactaaggcatttttctttcttttatgcgcttaacagggctaattttactcgacaggagctgcttaagccggttaaaactgtcttgcctcggtttcaagaaatcctaatgtgggaaaaaccggtaactactctcaatgtgatggcttcggctctaatgatcacatacaagtgagttaatttacaatttggttgcagccacttcgattattagagatgaaatatttggttataacatagcaattttcgggtaatgtagggagtgggtcgggaagggaatagcggttttcttgttttgggtggtggcgtacatgatcaaggcgagacgaaacaggctcggggagagatgcaacgagatagtagtttccaaatcgtctgataagagcacgagcacgagggaaagtgtggtaacagctcaacataaattggtatcgatttttgatttagtgcaagaagcaaacatagcattgttgaaaattcaatccatcttcttatcaaaggccccaaaggtaaaaactaacactaattacgagctcaaatgatcaagcatgtggttcgatacaattgtctaatgttggagattttttttgtggttgcagcatgcggatatggtgatggtggctctaattggattgggtgtgatagtggctgtgataccaacaaagtatataataatgggattgattttgtattgtttcattatgacatcaaaattaacccaaaagtttggaaacaaccaaggaggaaatagaagattgaaagaatggtgggattcgattccagttattcctgtaagagtggtagacaaagtgcctgaatcttcatcttctacatagtggaattggtcaaatgttacagctatggaaatgagagaccattatagatttttcacacaggatcatttttctatactttttctattttgaataaaatccaaagagatggaaacttggaaaaagttgtttttttgtatgaataaaataaagtaggattgtaaagaagaaacacaaacacaggaatagtaaatgtatgttgtgttgtatgtaattcagttaagagcagaatattaaattttggcatattaaggataattgaaagagaattggtacaaggcgccacaccttatgtgccttacatcttatgacatgcgtgtggtttagggaattttttgcaatgggcgacttgttttatcacttaagtttattttattagtgttatgttcttgtaaaattaggtgaagattccaaatgtaaacaaaccacacaacaatggctcatttcccatggcccattcaaattttgcaacctatgaaactaaatttggtggtgatctgcttccaaatagacacatctactaatcaagattaaggcctcctaattgcaaatgcaactgatttttgagtcatacacaagaaagatttagaatattattacttccatgctaccattaacaaaattaaaaggggatttagttgttagataagtaaaacatgtcatcccatttaagctctttccgaaactttactatctccatatggggccaccaatgacaatcactatcatattattaattattgtataatttaatatatttattaaaaaaaatatagtttacagcgtaaatacttaaatttaatttttaacgataataacatttaaattatatttctaaaatttccgtaagtacaaagtcgttaaatatgaaatcattatcgacgtgtacata

SEQ ID NO: 227842 - DNA, 2308 bp, Cannabis indica
tcctcatattccttgctgctggttgctttcgaattagctcattctacatatatcaatatataaatatatataattaatataacatatatttgttggaagttggtaggtatatatatatatttcataattaaacttggtacatatatatgtatataatctaataatatggttttgctagattgaagtttcaatcccaaagtaaaatatatattaagcaaaatataatccaattacctgaaaattctaatgtcattattaattacttcatttctaaaaatagagtattcaactcttaaaacaatagtaaacgttttcttattatatatcagcattttcttattgtaaagtgtatattattaaatatttttggccagcaccctcataaaatgttgcaatatttttttattttttcaaaaaaaaaaaaaaatcaataaaacctacacgttgcccttttatttatttattttgcttcttttttacataaaataataattgaaaaaaaaagggtacaaataggccaatactatttcctaaattattgaattctttagtttgagaaaaacaaaaataaattcaaataatcaaaacaaaaattatctaccttaattaattatcaacagcaagaaaagaaaaaaaaaacaaaaaaatccattaatagagatttttactttatcttttgttgaaatgtgacagcccaatgattagatgacggctaaaatatcattattatgtgacagaaagaaatgaaatgaaaggaaatctaacggtgataaagtgagctgtgacagtaaaagaaacagaagtcaggtgagtttagcattgttatctcataagaactttccttggtttactgacctgtctcaaagactcaaatatataataataataataataaaaaaaaagtacggtataattggaataaaataaatataataattatagaaatgggtcccacactctctgtctgagtctgactctgttttccggctcaatttcccaactgctgctgaaccttagttgtatggtttccacgcacaattatgggacgtgtaaaacacgcaccttcttaaccaagagtagactaaatccaatttaatcaccaaatctttctgagaaaattacatcttattaataacattcactaatttttccttcaatgaagtaaattaagtagtaatataagggtatgtttggtgggatggagggagagtaggatggatggagagattaaagaggatggaaagtaagagagatagagaggactgttaatatcttttgtattgtttggtcttaggtgtgaggtgtgaaggatgaagaaaaaattgatcagtaaaattacaaaattattcttttaaaaataaattttattatttttttaagggtagttattgtattttgtaaaatgtattttgttttttttacaatccttctaaatttggagggattaaattttgaaggtttgtaaggagaatgtctccctccatctctcctctccctcttgccaaacaagtaatttagtccctctccccataccccccaccaaccaaccatcccccctcctaccaaacatagtgtaaaggtgacattatttaagggtgtcaaaaacctccacattaccaaaaaaaataaatattttattttatctattttctacataatttttgacactttttatttaaaaatattccaataataaacacctctaaaaattattaaaataatatttattattatttaatatattttaaataattaaattttcttactttatggcaaatcaattataaaaaaataagaaagaaaagatataaaggatgtcattatatgatattctttcttgaaattctttttcacttaaatgttaagtatccattaaaaaatactaaaaatatatctatgacattaaagctcttaaagcactctcaagagcttcttttctctatcatttaaaatacatcactaaaactttaattttttattttacaatacacttttacaaatacatttttactttacactatacattagcttctataaaatacatcactaaaatcttttttttttttagtattttattatattttatttatttcaaatatataatatattaatatatacacatatctctatacaaaaatgataattcaaacctaaaataattaataaaatatatttagaacaataaatactactctctaaatatagagcatgaatagtgtattttaaagaaacttacaaatgaaaaaaagagttttaagtatctgttgtagcatatttttattacagttctttaaattttttaaagctt

SEQ ID NO: 227843 - DNA, 2653 bp, Cannabis indica
gcctaagtatcagggcgttacatgaaattctctaagatcgccttgcccttacaatttaatgtggtggttttggcttatggaatccaaagctttggaagaatcacaatcgttgtagaggaatgggtcaaacttctctctttatttttaatgattcaaatctttcaccttttatggaatctattctaagatgattcttgatgaaactgttctaagatggacgagtaaagtgggatgaaatgcagcaaaagaagaggtttagtttaattgatttgtcattattattgctttaagttaacgaatatgtaacgtgacgttaagtttagtttaaaaaacataaaagtaagtttatgtagaaagaaacattacacaaaatttgttaaattaaaaattgagattgaatagaaatatctaggaaaaaaggcatgtgatcctctctttgttctcccatggcgatgaaaaggagaggggtttttgaagcctgcacctacaacttacttcaccagagcttcctatgatccatggagaggcgtctactccgacggaggtcttcctggatccgtgtgaggagtttgattcggaactaaaaggttttgaagggaatttagctgatgaggagaaacagagtcccaaagctaattgggttgatgaagttgaggaaaatgatttccaaacttcaacaagggatatctggagtaagttcaatactaaccaggttagcactccatcttcttgtttggattatattgaaccgaccaagattggggatcaatttgtggcaaaattggacttagaggaaattgaagttgaatcttccttcttgaaatcatctctagtttgtattgtgttgggagttgatcccccattcagtctgtttgagggatttattaaaagaatatgggggaatttgggagttgagaagatcgttcggatgcatttgggctttaccttagttagttttagagatgaagcaactagaaatataattctggaaactggggttatacattttgacaaaaaacctgttgttctttgtccttagacagcaaatatggacactactcaaatggtgatgtctgtccctatttgggtgagattgaatggactggggctccaatactgggggaagaaaaatttaagtgctttagtgagcacaataggcaaagccaataaatggtggatagggtgactcttcaaaaggtcaaatgataaagtggctagggtgtggtgatgttgaaatctcggataaccctcctaaatcaatttcttttgtgaatgaaaggaagcagattattgagcagcaggtggagtatgagtggttgccttcaaagtgcattgcgtgtgctttactaggacatactgttactaattttaacaagtagactcgtatggtttggaaaaagaaacaacaggggcataaggaaatgaaagatgagggaaagactactacgaataacaatgctatagcaggggcaaatagtgactctcaatagaatgtttgtaacaccctaactgttattgtgattttaaaagtactgtgcaactcgttgctaattaacgaggttattgaaaatcgtgaataattaaaatttgcttatttagttaaaaacttaaagtattacagatataacatttcgggatcccatttacaaaatactttacaaaagtttgctatacataaaccgccccgacatgtacaatgttcatctactcgctctcacggctgctcagctttagcattgcccttacctacacatagcaatagcaactgtgagtcaacagactcagtaagaaaagcataacataaaacatactaatatggcgggttataatcaggcgcccatgcaccaaccataaccctaactgagtcgggaacgttctcgacaaagtatgactaactgcgaatctagcctatactcagtactctagtcgtactgatgtggtatcagataactcatactatctaatagcctagcatatatctgttggcatctcagtgcaactctacgtacacctcactgtggccctcatatgctaatctaatcgctatagatttgcctaacatgtatctgttggtatctcagtgcaactctatgtacacctcaccgataccctgatatgttattctgacggcaactgacatgtacgctaaacatgtataaacatatgcataacattatactaatcttaccttgattctgaatttaggtgtgccgaccaacctgagtggaacaactgctcggcaaattataggctcctaaatcacatcaatcataacataggtaagtgacacgctaaatcactttccggggacttaaacttgaaattaaaagtttccatatcgatggataacatggcaataccctaaacatctaaaaaatgggaaaaaatagggttcccaaaattgccccaaccggtagaccggttcccaaccagaattccggttccgaggggtttcttggggaccaaccgaaattccggttcctacaggtccccccgaaccggaattctggttcagtgcaggaaaggctcaaaaattaccatatctcaaccaaatcaatcccaatttacatgaaaccttccagacctgttcaaaacatcctaaatatcattttccaagcaacaaaaccagtaccaaaactcagaaataagaaat

SEQ ID NO: 227844 - DNA, 1940 bp, Cannabis indica
gaatgaatatttttgaattatattttaagtacaataaattatttaaaattttctaacaaaagttaaaacaattgaaattattatatcaattgaaatgttgaaaacaatgcgaactacacctattttttggaattgtgctttacaatttctctaaaactaactgcttctttttgtcactgatgaagaaagataatttttccaaccaccatatattatatccaataacaaaattaacaacatattaagaatttctatgcaaaaatgagcatataaaattatgaatatatgaagtttaagaaaacaaacatggatcaacatgaacagatggatgggcatcaagtagacccacatcgtgtctcgaacaactagtcttgatctaaaaaagaagaaggggtaatgaaaatgatggccttggcttgaaaatagggtaatatttttgagttttaataaaatggtaacttttgggttcttaattatataaattttataaacttcgtataacttgaataaatctagtttcttgaaagagaacaaactgactagaattataccaaaatcatcaaagctttcattgcctttgtataatataggcaatgaaatgaaatacaacttgtaaagacgttcttacacaaaaataggatcattaattaataccacatatggacaacaaagtaattttgactggttccaaatctcaaatagctggtggaagttctttgtttctaaaaataaactatttgtgatcactgctagttgatatatcaatcccaagcctcaaaatcaaagaacaaactcatccacataatataaacaatactcgagaaataaaggaagaatacttgaacagaataatgcactaagctttatcatacacttaatgagctttgatttacaaatgatatagagaggtatttagttaaccaactgtctttgcatgtgattcattacaaaggcatataaattatagccattatccaccttgactttgtaatgactagactttgacaatttagtttctgacaatgcttaaaaatatgaggcaatgatcaaattttgctgtaggaagagacttggtaaacatgtctgcgcattgtcatctattgaaatctttgacagcttcactttgtcacttgcaagtatgtcactaatgaaatgtaatcttacattgatatgctttgttcttttatggaatacttagttcttactcaaatgaagagcactctgactatcacagtgaatcattatgctcatttgatggattcccaactctctagagatccctttgagtcaaaaaaatctatttcatagcttctgtgcaggctatatattcagcctctgttgtgaagagtgcaacaattgtttggagatatttaattccaattgattgtgcattgatttagctaaaatacataacctaattgagaccttctggtatctatatcagcgacataatcaatcacattggaattctcttttcatcttccatagatgagaccaacatgtattgttcctctgagatagcttagtatccatttagttgcattccaatattctggaccacgttttccatgaatttactcactctacttacctcatagcataagtctggtctactacaaaccataagatatatattgttgcccactatgctcctttctatagtaatttcacaccttattaattgttcttcaccaattcgagccatggtgatagagtaccaagcccacacatagcaagttaagtacttaatcatagtgcggaagacggtggtaaccaacctgaaagagagaaggagatctaggctcagatgttattactctgccacaaaaagaaataatggttagagatttgagcagaaggagtcattattattccgctgcatcaatgtaagattttctaaactcttatgtgtttaatttcatcgtattagagaattcata

SEQ ID NO: 227845 - DNA, 2937 bp, Cannabis indica
acatatcattacaaaaatcctctaaaaattgtaacctagtaagttaatcttactaactctactcatgagttgttacggggttgacctccgagttgtatggatgtaccccgagacttgtaagcatggatttcaaagattaaatacccttaggccatatgcattgactcagtcattcttcgaccgactcttgcatttgatgtctctcgattgctgaggctgattgttgactaatctcgaaaatcaactctgtcgatttttgtttcatggtcttatttgggcaaaacgtctctatttcaattaggatctcattgaaactgattctatgcttttggcaaacgccataaatcatccaacatcgaaaacttttttcttttcaagatttggtaaatgatgttgaaaatcaattatcgtatctttcataatgtttgtgtatctcatgttcaacgggatgctaactaagctgctcgtggtttagctaaacaaactttagtgttggataataattctgttattttctatgttgttataaatgactcttttattttgtaatgacatacttttttttattaaaaaaataagtagaatatctatactttaatgttcctatagttcatcttcaaattggttttaagtatcaaattaaacagttttatttttttagttcaagttcaagatagatgtaaatatatatatgcaaaaagtaatacgtgctatttataattattgttagttttttatgttctttttatcattaatacccctatcattatcgtcggtatgtagtttcgtattatatgtaagcaattcgaagtagacaataacaaagatgactgttattataattaattttggctatttttcagacaatgatattcctttttttatgttttccgtttaataatatatcatatatgctgatatattggaataattaataagggagttactgaaaattgtagaaagatatatttggaaataaaggatttcctcattgccacaaatgatatgagttggtcactgacaactgtactttccttatactttcaccatgtaattgctaccattattagattgattcacaataactattgcatttactcattaatttagtctcagcatattcaaacactaattgaaatctctcttccattgaccattattcagtctttctccggcacattatacgtacctgttgtttgtctgagttgtctagtcatcaacttgagaatattaccaaatattttcaaataaaaactgtgaattggatatatctttctaagcttgaatacaatgcattaactccaaaccctccataaaaagaagaccaatctctcattaatcttcacaaaaaaaaagttgatacttatcaataacatcattatattttctattgagttctctctatttctttctcctttactagttccatcctattgtattcatggagaaattcagtactgccgaagcttctccttctgagacctcaaaggtagacgaaacgaagagactggccaagatgaagtctatcatgcctgctgcagtactagattcagaaaacaaatcccgttttcttctagatctgaaactgtcccataacgataaatcgttcttagcggctggtagtgggagtggcaccgacaagggcaccggttcaaggaaagaactgaatctcttcagttctaatcaacttgttgttagcgctgcaccttctcttctttccaaccacaaccaagaagaagagaataaaccctcatcggcggcggaggaattggctcaaccggctagggttttctcgtgcaacttttgcaagagagaattctccacgtctcaagccttgggtggtcaccagaacgctcacaaacatgagcgtatgatggccaaacgacgccaagggattgatgctcatgggccttttgggccccaccgttactcaccctattacccatactatccctcatcgtcatcctactatggagcttacaataatagatccccacttgggatcatggattccgtgattcatcataagcctaatccctacccttggtacaatagaccgttcgggatgactgattatggcagcagcggcggtgaaagaggcggcgacatggccccttggtcaaggcagccctcaatgctgaactctggacaacgttcgaatgatcagcgactcaacttagatgccactactcctcgttctcgtaatactattactactactactgctgctactggggttggtggtttggccggtaaggttgatgaaatcaaccgtcccagtaccagcagcggtgtcgatttcttccggcgtaaggagcccctcaagaccagtaataatcgttcgggtccttcttcgggaattgatttgtctcttaaactttaataaattaagtaattagatttcatttgtttttattgtatatatgctttgtttcgtttaatttatgtagacagcaagaacataaaattattagtttacttaatttatgtatatgtggtctgttgtttgttcagacgtttgcttagtttttatgaactttgtttgcacttgttgccatcatatatggtttaattttccaactcttttttaatgtgatagatattgtatttgttttcattctaccatgagcaattaaatcattcttgtttggcctaattaacaagcatggtgaatcccttccctttcatttcatgctaataatttcatcattactaaagctagggcaagatgaatttccacagatttgtttgacccaagattctttcatcccttatctagttggtgaaaattgtatatatacaactgcttaagtgaaacacttttgttggacagagttgtctctctctttctggtatataggaagtattatcaactaacaatatggtcgtactggtgacagggtgtgctggaactttctacaaatgtatataagatat

SEQ ID NO: 227846 - DNA, 1451 bp, Cannabis indica
ccacattgctaatgtgtggaaatgaattgtgatatataagatgaatgggctactcctcccattgccaattggttttgggatggaacctcattcatcttattcctcaaattctaacaatattcgaatcttattggtttaaacttaagatagtcaaactttgactgaacattaacgttttttttattatttatttggaccgattaattattaattattattatcacacgacaattatgcacaatctttaagccagctttgatatattttttatgattgtcgtttcttcagatttctgtaacagcctaacagctaggtagctatatatgatttcttttcactagatttttattattaatggttgtttggaaagaaagaataattaattgtttgtagggaaatgaaaacaataacgatggatgaaaagtatttatatataaagttgatataattgcaaaagaaaaaggggatttttatactcatggtaaagcgtaaatatgataccgacaatggcacgtctaaattctaacgggaaacgaaaataaataaaggtaaaaaaattattctttattgtattaattagatcaaataattaattattacctctcataattacgtgtgataaaatatgatgatttagtaaccgattattttaatttgttttggagtaatgtaatgcgatcaaataacactaaaaaaaactaatgttgtgtgaccaaaaaaaactaatgttgtatgaaaagttaatgatattgacctagttaaattagtgtgatgtgccgacgaatacgtgttgtgacataatagtattctcatgatttttttttttttttgagagagagagagaagtattctcatatttttgattttgaatgaaagtaaaatttatcccctgaattttgctttttattttgtttttaattgttaaatgacttacttataaataaaataaatagagaccaataatgagaatgtaccaactgaacttgtttattttgcaagttaaaaaaaaaacactggtttattttgccgtttaacgaaaaaaaaaaaaaaaaaacgaaaaaacttgttagttttggacattgcacttggatagaagtccatgtgtgatgtgtcccaagttatgtagctccgtatagctgccatgtggcaccgcattatttgggtttgactaagtcgtgtatagttgcacgtgattggttggcaaagctacactccatgtgtgcatttgcttttccaaaatatatgactttttcttcttaattaacgttggaaaatttctatggaatgcatctcctttcttttattgttattattacttttttattttttagttaatttttacatttgaaattatatgttaaaatattatttttttaaaaaaattatattggtatttgttatagttacaaatatcatttttataaatttttgaaaaaattctgaatagttta

SEQ ID NO: 227847 - DNA, 2327 bp, Cannabis indica
gaagctcaacacaattccgaccgaaacaactacagttcaattttgatatgtgataatatgagtcttataagtccagaatcatatttgaaaatttacccctgccctgcactgcagctattattacattatgagacaccattaattttgactgttagctataactataaatacatcatgccatatattcagatagattatatattacgtattaacatatgttttacagctacgactacgagtaatagttacttatcattggatagtcataacaatttctttcactttggagctgtcaataatcatatttcattcacgtttaaaagaatgaatatattgtttttttaggaaatggaatgactattgtttgaagggttgaatagatttttattttattattactggccagtttcttatgaatagaaaaattaatggagctccaatcaaagtgcgctaagatttgattcctaccgatttatatcctcaaattaagataatgacataaatgaaaaagtgaacaaaatactttttcaacaaatctcttattaaattgttgattggtttagaaatgtaaaaagaaaagtctaaagataacttaatatcaataataaaaataactagtacctgtttgtccttctctcatcagtcatcaataatttataatgcatccaactccctttgattactaaggttcaattattaatgcttttttctttatcaaaaattaaaaataataatttatgcctttttatgtgtttatttattttcataaagaagaaaaatgaaaaagcccagaccaagaagattcatcaattagagcactcggttcaaataaaaaaaaaaaacactgtatgtatggattttggataatatatgtggtgctctaaagcaaccccattgccagttcttaaacaatacacaatagaaacattttcaaaaacatctacaatatatttaatctcatgaataatgctcctgttaagattaaaagcatgaaaaagaagtcagtgcctcatattagccaacgaaaaaataaaataaaaaagcaaacttagtgtatgccagtgccaatataattataaaaagaatgaaatgatatctcccaaattaatctcttaattcagtttcaaaaaataaaaataataaaaaaaattattatcttaattttcatttgtgcaatccgacaataattttagcaacagctcaagattatagtagcataaataaagataaaagtgagaatatatattcacacctcaccttcttttaattattttatgctgaatatatttacattctataaatgtgtaaatatttatttattaaaaaatattagctaatgtacttttaaacatttttttttttatattattagtttattttttgtattaaatttaggtattttatttattagaatgtagatttttcaaaaaaataataaataaatttttattattttttttgaaatggaaaaaattttaattactttaaatgtaaatttttatatattttatgttttattttagatatattttatattcatatgtatattttaaaagaatggatgcaaggaaataaaattaaaagaaaataaatagaaatcttaaaaaaaaaatatatacgtgttaactttaataatcaaaagagcattgaacatctctagtggtggtgcttagagatgatgtggtgggatgtttgaaagatgctaattattgggatatttgggtgctaaattaaaaaagaaatattgatcacaaaatttaacattgatgacattgatgccatatttattttttaataacaagtaaaacaaataatgttaaataataatgtgtggcattattggcaaatttgaagactgtttattattgtagtacttaatgttgaatagagatacaataaaattttaattttctgatgattggagaattttggcactttaaatgcatcactattagagatgctgttaagtataagtagtgtcaaacatcatttataagtgatattttgtgattggttaacgatatttcatgtaagttatttttattaaattatatggtacttaatgcttaattgtactgacaataatattacatgttggaaggtactaaacactaataatacctttaattaaaaaaccaaaaaaagtatgactaaaggtgaaatgtccaaataataattatgttagaatgtaccggttgtattcgaaatcgcgtgaattaggaatacatttctcgacatataataaacatacagtattactttaatcaaatttcaaagggtaaattttgtcaaaaaaaaataaaattcaaagggtaaatataatggta

SEQ ID NO: 227848 - DNA, 5285 bp, Cannabis indica
aattttttttcagagttcaatttcaaaaagtaatgtgtaaattaatactataattaacttgcaaaagtagactatttttatccataaagcaccaagatatacattttattttatttcagaaaaatagcattgttaattacgaatgaaactaattaattatcatttatatgattaatcgatgagaaacaaacgtacgttcatgcatgcatgcaataatacattacattagtgtagattttgcacaaattaataagcatattatatatagctataatacaatatatagatatatgactatatataacatattatatatgtcatttattgttatgtttgtgggtagtgaaaatgatattagtttctttgtgattttcttggagagaaagatcagtgagttgagaatagatggtggagatgaatgatgttgcgtcctttacaggttcttccatagcttctttaagcttcctcaacgccatacaatatgcttcctatatatattcaaaacttaatatatattatgtatgtttaaataatattgcaaagtcataaaaaaagaaaaagggaaatcatatatatgtaacacaatgataagtttttaatgatcataaaagtgatgaccatataataattttagttacaccacttttatttatgttgcaaaaataagttataagactttctattatttgtgaattgtgagcatgtactggttttaacttaaatattgtatactattaggaatataaatatcaagtaattaaatatatgtactaatattaggaatactgtacacatgacaacccaaaaaaaaagttgttatatataatataatatacaaatcaaatttttgttactaatcatattaggttcatatagtctaattaaaagtaaaattaattataaataaaaataattaagtagttataattgatttgaaatgctaactcaacattagttataaagaattattaataaatctagcaagattaatttaattatataaattaactataaagaaatgaggaattccttttaaaaaaaatgcagaacttataattagctggattatttagtagtagatatatattatataggccaggagagagtagtattagaaagttgaacttgaagaaatatatatgtcattttgagtaataatagacacattaaattaattaatactctctatataatgtttgtttagaattatttctaatacatcttctttaactgtcaaacgtaatatttgaaaaaatttacagggtcaaattaaaaaaattgtgggtatacaaattaaaaaaaaatgtagattttattaaaataaatcaagaacctcaatatatatatacattgttctaaaatcccaaatagaatcaaaagaagacagctgaaactttaattgctctactgatattattttaaaaattgaaataaaggttttttagtaattgaggttccaatttaaaatcaattgatactaataaactataatgttatattctcaatgcaagtttatatattattaaaatattatattattaacgagatgataatttttgtatatatatcattagggttgagaatggtgaaaaaataaatcttaaagggaatgaaggcaatttaaagtatacaatacaaatctgaacaaatatatacatttatattatatatatatgagtattattattagataccgatagtgcctaatatttcgtatgtatagatgacatctcacgattagttagtaatattatttcacagttatttttttaattatatatgagacataataagttacaccaccaacagtaatatgacatcgaaaattataataaatattactaattgtaataggtacataccataaacttatcaaggtctggagaattagtggtggattggcagctgttattgtaacttgtatcaatattagcattcacagcagcttgtccatcaatttcacccaatcccacctgacatatatatatatataatcaatatatttagaatgtagcaatgaaaatatgcatgattgagaaaatagaatatgataaggtatatgtatataataagatagaaaaatgttaatatgtatggtatttagtatatttgtaagatgtaatataatttaatatcaaattttacttattttacttaaataaaaaagaagaaaaacaataactaattataaaatattattttataatagtgctagacaccttaatatctcataacaattaatacttgcatattttaataattccctaattaacattaattaattattactctcttcacaaaccaattacctcatatatacatatttttataattatgtccttctgtttgttttatttattatcattattatacgaaatcatgaaataattaaagaattaaagacaaataatattaataatattagaatagtgtaatttaatattaaatctcacttattttattttaataaaattattataagtggttaaattttgtaggcaccacctaattaattgtggtgctatagatttatctattatataatcaaatctatttaatgctaaattaatggtgtgatactatatgagatataaacacatatatatttatatatgtatatgaaaaaaaaaaaaacactacataatatcaatcaaactacacatatgtacatgatatacaataactgagaattaaacttaagttttaatgtcgtaaattataagaattattatcgcaaaaaattaaacttatctatatatttacaaccgaaaattaaacttaagtattaatgtcgcaaattactcattaattgataattatgaagatcgaacaattcaaacatttatcatatatataccctactgcaaatttccatccacttaatttcttctatattgtaatttatctaaaaaaattcataaattttaagcaatattctagataattaattatagttatacttaaaaatatgaaacaaaattgctttaaagcctgtttcatatacttataaaacaaatcaagtttattttcaacattataaattattagaaattttaaaaaagaaaacctaaaatgttctaactaattaattactacaaaatacacattgttatatatataaaaaaaattataaatttcttcacatgacaccaaaatagatccgctttgtaccagagcaaaatttactcctcattataaaaactccaaatatatatacatatatcaataaagcaattacatctatatatatatatatatataaatctgtatgacaattagtactgagtagataatattcattttgtagtcatcactgtctccatcccaattctcttttttaaataaacaaaaaataataaataaatataagctactatattgatccaatttatatatatatatataatgacaatagctattaataagtcaaattaatttgtgtcgtgcatatacacacacactaaatatacaaagaaatatttaactacatatatgaaatcacatatataattttgctttattttttttgggtactttctatttatagaccaacatatatatatatatatagaatttatatgttaaaataataataatgataaaaaagaacctttaaacagttgaagtgagtgtgaatcaagagctcaaacaaaggatgctccgaaatcatcttcttcatcagaatattattcttttcatcatcatcatcatcatcaccaaaaacatcattttcaacttcatgatcaactcctaattcatcaaaagccctagctaatttactattactactactattctcaccactgttttctcccattaatctctctctctcttatcttgtattttgccaaaagtgggtgagaatgagattgtgtagtgtgtgcatgagatgagagaatagccaacaacgtacgtactatactcttatctgcacataccttttcttttcccaatacttatatattaattattaattattatttaaaagagagagagagagagagagagaaattcaaaatgaaaataaagaataataaataaaaaacaaagattgactgtattaattattcgtacgtacgtaggcccatgcatgcagcatgaattacgattaaaggtgatttataattattacatctatatataatagaaatccaagtaactatatatatacattaatatcaaatcttaatttttcactttaataaaaattatgataaattattaactaattataaggtgtcaccttatataaaagttaaacactttaattagtgccacatagcaataattttaatattaacaatgcatacacattatgacattattatcaatttattttaaaaaggtaattcttaggtaaataaatttctattaggtaaattagacataatacattacatacaaatattagttattcagcaaaataaataaaaataaactataattaagtcgtttacattaattaaatgagtcattatctttgattaaataatccataatgaatcgtttacattagactctttcaatcttattttcagcttattaaaattttatagatacactcttttgagagaattcaccctgacaattttctattatatatattaattactcaacatcttaattttatctaaacttttttaagatttaaagttacgtacttattttattagttaattttagtttatttgatttttgattaaatacaattattatatatttttataaaataggggtgaaaggaacgtgtcaatggggttgatgttcgattaaagcagcttttgtatattctgaaattaagaccgaataatgtaataatgagcttaaattttcgtgtcgtttactgttacaaattgtagttttatactttgttgcgtcattcaatgccaggtaaacaaattcttacctacctacttttgtccacttctatttatatctacactttcacacacacacaccccattctcttctctctattttttttacatcaaattctccctttttttttcttttttaccattttaataggaaatatgggtggtaaaaaccacttaaattttaaattttttaacacttaaccacaaaaattaaaattttcagtttaggggcaaaactacaaactctcatttcgtaatttttttttgtacctctttgtccaataatcacatttaagtgctatagtgactttttacctgtacacacttgtacacgtgataaatttttagtgactcacgtaatattaatttttaaaaataattataaatatttaaaaaattaaaaaatca

SEQ ID NO: 227849 - DNA, 1354 bp, Cannabis indica
tctctctctctctcgattttgctaggaattcaagtagaaactgttggttaaatttcacttataatcaatcttattatttgccacataaccatacaacaaaggaattacacttaaaagtgattacaataaaatattaacaacattgcacaactaggtcaagactgaaagttaattacaatcaactccggattatagtaaaaacttaagctaaatctctgaggcaggttgacgaagacgtagccctagatttggggtgagctccaaaatcattctgagtgttttttcttctcttcccttctcatttttatttttcaatttgtgcttagatctattgttgtgtgcattcttatagattcaagcaagttcttggcaagatctttttatgctattgctagggtttcttagtctatgtttgtgtgtgaatgtgttgtatttgtgattttgggggattctcgatcattctaagaaagattctttgactcttagggatactacacaagttttgtggtcgtttgtgtctaataaactcaatattaatgtagtaaatttaaccaatgtatgatgatcatgaatagatagctatatataggttctaattaatatctttttatttgataattatgatttgtttgaaaaacttcaaattgttctaagaaagttcaaaatattctatcatggttagccaatcaatgagcaataatattaaaaactagatatataaaatcttaagagttgtttgtcttcaaaacttaaagactgtttccaaattttagaaacagaaaacaattttttaaaaaataataggagacgtttgactcaatttctaaaaaatacttttctaaaaattgagttaaaaaaaaactaaaaatcaaaaaacatcaaattattgtttttcttttttaaaattatatatttttttttgtctaacacattttttttttatattttttctcacatattttggtttgagtctggggtcaaaatttaagttagatctctttttttatttatacattgtaactgaatattttaaacattaatgtttttggcactttataacttatttataatttcttaagaaaaaaaaaaggaaagaaagaagtgaccatcatatctattataactacatatacaatgtcatattttaaataaataaataaaaaaagatataattactttagaaaatagagaatgctaaaaatgtaatatatatatatatatataaatatatatatataaatataaagatatattttgacacaacaaagctcattgcatgatgattaataatagggtaaatactattttggaccttctgttttgcaaaagttaccaattggaccctgtgttttgt

SEQ ID NO: 227850 - DNA, 2184 bp, Cannabis indica
tttccttgcttaagaccatatcaaacccacaagttccaatttcactctctcaagtgtgtcaatctcgggtttagtgagtcatttaaaggttacaaatgcttaagttcaacaggtagagtttatatttctagacatgttgtctttaatgaacaagaattcccatttaaaaatggttttcttaacaactatgctcctgagcagtctgtaattattcataactctacttggactcaactcccaaacatgcatttgtttaccaataatgagtcaaatggcacagatagaaccactcaaaagcacgaaatcccagcagcagcacctacggcttcatctatgtcctcatcaaataaaaatcaggtaagtcactctcttcattcacctttgaacactgacagtattgatactgtgttagcagctcctacaccaggtgaatcaactatttctacacccacggccaacattcctgctgcagaaataaacactactacagaattaaactctgctgccagcccgagtatccaaatagctccacagcccacacatcctatgataactcgttccaagagtggtattttcaagcccaaagtttatttcaacaagacaaattgggatccagaaagagaagaacccagaacagtagctgaagctcttagtcatcccggttggaatagagccatgaatactgaagttggtgctctcaaagccaagaagacctacaccttggttccatattctgatgcttacaatgttgtaggttgcaagtgggtgtataaaataaaaagaaatgcagatggttctactcagagatttaaagcacgactcgttgcaaaaggatatcatcaaaggccaggacttgacttcagcgaaaccttcagccctgttgtcaaagcatctaccatccgaattgttctcaccattgccatctcaaataattgggaagttcgtcagctggacattaataatgccttcctaaacgggcatctcgaagaagatgtctacatgcatcaaccagagggttttgttgaccccacaaagcctaaccatgtatgcaagttgcataagtcgctgtatgggttaaaacaagctcctcgagcttggtttgacaaactaaagaacacactgttggaatggaatttcaaaaattccagggctgacacttctctattccactacaaacatggcaagattattatcctagtccttatttatgttgatgacattattgttacaggaaatgacagctcaaaactccaaagcttcactcaacaactcaacaaactctttgctctcaaggacttgggacaacttcattattttcttggcattgaagtggttcgggatggtactggtctatatctcactcaaagaaaatacattgaagaacttttgaggaaaaacaatatggaaagcctcaaaccatgcccaacaccatttgcaacagggaagaacatgtccattaatgatggagagaagctagacaatcctacggtctatcgaagtctaatagggggacttcagtacttgtgcaacaccagacccgatatttgctttgctgtaaacaagctaagccaatatctgaaagcaccaacaacagtccattggggagcagcgaaaagaatcttgagatatctcaagggaacattagaccatggccttcacatcagctatagtgacaagttaagcattgccattgctggttggtttttcagatgccgattgggcatgttgtgttgacgatagaagatcggttggtggatactgtgtgtatcttggagacacactcgtttcttggtcatctaaaaagcaagctgtagtctcacgatccagcaccgagtccgaatatagagccttagcttttgtcactgcagagattacatggatagaatctctgctgaaggaattaaacttcccactgcccagcactcctgtaacttggtgtgacaacttaagtgctagtgctagtgctcttgcctctaatcctgtgtatcatgctcgaaccaagcacattgaactcgacattcacttcgtgcgagacaaaattttgaagaaagaacttgaagtgagatacatcccttcggcagatcagattgcagattgtctaaccaaagccttgtctcactcacggttccaatctcttatttccaaactcggtgtgactgcctcaccctttcgtttgaggggtgg

SEQ ID NO: 227851 - DNA, 2349 bp, Cannabis indica
aacattaacgatgggaatctggtggttcatggcaagaccatattgacaggtgttccagacaacattgtgcttacaccaggatctgatggtggccttgttactggggcctttattggggccactgcttcagataacaaatcacttcatgtctttcccatgggcgttttagagtaagtacttattccttaatatagtatataagatatgattgtgtttgtgttgtgttatcaactatgctttgtttttgttaatcattgttaaaaataaagttgcttttgctatgttattgtgatagggatcttcggttcatgtgttgttttcgattcaaattatggtggatgactcaaagaatggggtcatgtgggaaggacattccttttgagacccaattcatgcttgtggaaagcaaagataccgaaggaggtgaacaagttgatggaccaaccatttacacagtcttcttgcctctgttggaaggccagttccgtgctgctctgcaaggaaatgagaagaatgagatcgagatatgcctcgagagtggtgagtaatcatggccaatcaattcatcatatttggtctactcttatgatatatgcctacatagtaccactcttagtgctgtgttcctttgttactcaatctcatgtcactggccaataatgaaggactccaaccaatctttcaaatgaatcataatattggcgtttatagcatttggagaagatatagggaacgttcgagttcagaagaacccacacaaactctttttttgtgtttgatttggttttgcaggagacaaatctgttgagaccaaccaaggtctccacctcgtttacatgcatgctggaaccaatccatttgaagttatcaaccaagctgttaagtaagtgtttgctttatgccttgatacgtcatttagtttactctttgaagtagaataacttttttgcttgtatgtttatggtattaatgacgattctttaattactattcctttaaacagggctgtggagagacacatgcaaacttttcttcatcgtgaaaagaagaaggtaagatcatcatattttttctgcttcacataataacttgctccggtcaagtactataattcatggttactttgcctaacaaaaccttttttttatgttgcagttgccttcattccttgattggtttggctggtgtacatgggatgccttctatactgatgttactgctgagggcgtcgacgaaggcctcaaaaggtaattgccttgtgacaattcataatgattagtcaattaaaattataaaatcattcagaaacttacttcgatctgaaataattgcagtttatcagagggagggacgcctccacgattccttatcatagatgatggttggcaacagattgaaagtaaacccaaggatgagaatgttgttgtccaggaaggagcacagtaagaatctctcctattctctcatgtacctgttgccaagacacttcaaacagctttacatataagagactgatttattattattcattcatgcaaatttgcttcaagtttcaatgtttcacctttctagtcaggcaccaattgtgattgtattgcctttgcaggtttgcaagcagactgactggtataaaggagaatgaaaagttccaaaagaacggtcagagcaatgaacaggttccaggcctcaaacatgtcgtagatgaagctaagcaacatcacaatgtgaagtaagtgcttgtagtcttagtattctattttcttgtgctaatggtttcttatagttgatgcttgttcattttcaagaatttgaggtaaatgaattgatgtaaaggaaaaagtttctcattcaaaaggggaacgagcataatgaatcacccttgcatcagatattctaatgttaagctactatctgttacaggttcgtgtatgtttggcatgctctggctggttactggggtggtgtgaagccagcagcatctggtatggagcactacgatactgctttggcatatccagtttcgtcccctggtgttatgggtaaccaaccagacatagtcatggacagcctatctgtccatggccttggcctggtgcctccaaagaaagttttcaacttttacaatgagctccattcatacttagcatcatgcggagtggatggagttaaagttgatgttcaaaacatcattgaaactcttggtgatggccacggtggtagagtgtctctgacccgcagctaccaccaggctcttgaggcttcaattgctcggaactttccagacaatggatgcatctcttgcatgtgtcacaacactgatgggatctatagtgccaagcagactgctgt

SEQ ID NO: 227852 - DNA, 2176 bp, Cannabis indica
cacaccttgaagatccaccatctgctgtcactgctgcaacaccaacagaggtaaattttcctgatatagaacctggttctcttgttaatgtcacacccgatactactgttggtacaactaatgaatctacacagtatgttgatgaagcagctactcatactcaggttgtgccacgacaacatcccatgataaccagggcacgtgctggtatttttaagccaaaaatgtatcttggtcaagctaatttcgatttgtcccttcatgagccatattcggttgaagatgcccttaggcataaggggtgaaataaggctatgagtgtagaaattgttgctcttttaaagaatggtacctgggttcttgttccaccagaagaagctcactcaattgttggctgcaagtgggtgtttaaaatcaaatacaactatgatggtagctttcaaaagttcaaagctagattagttgcgaagggcttccattagaggccaggagtagacttcaaagagacttttagccctgtgataaaagcctctacagttcgggttgttttgactttggctgtgacaaaaggttgggaaataaggcaaatcgacatcaataacgcattcttgaatggcacccttgaggaagatgtttacatgatgcaaccaccgggttttgaagatacatcaaaacctggccatgtttgtaagttgaagaaatcgatctatggcttgagacaagcacctagatcctggtatgacaagttgaagaaaactcttgttgatcaagaattttagagcagactcatcgttatttatgctgcagcagccgaagttcattctcatggtgctagtgtacgttgatgatattatagaacggggaatgacaaccgagaaatagacattttcattagcaaacttgacaaaacttttgctctaaaagacttggggcctctcaattactttctcgggatagaagtttttagagacagcacaggcatctacttgtcacaagctaaatatatttctgaacttctgcagaaacacaacatgatgaatgtgaagccttgtcctactcctatgacagcagggaaaatgctatctctaactgatggtgaaactttaaatgatccgtttatgtacagaagtatgatcggggctctacaatatttgagtcacaccaggccagacatctcttttgcagtgaataaactcagtcagttcttgaaaggaccaacaacggcacactggaacgctacaaaaagagtcatgcgatatctgaaagggtcagtctatttttgcttgcacattgttccgagtaatcacttaaatcttgctggtttttctgatgcggattgggcttgttgcccagatgatagaagatcagtagcgtgttactgtgtattttttggtgaaaccttggtgttgtggtcgtcaaagaagcaaaccgttgttgcaaggtccagcacagagtctgaatacagagcactggctcaccttgcagctgaaattgcgtggattcaggagctgctagatgaaatgaagttcaaaatagtgggaaaaccagtagtgtggtgcgacaacatgagtgctagtgcacttgcatcaaatccagtataccatgctaggaccaaacacatagagatcgatgtacattttgtaagggacaaggttctgcagaacaaacttgaaatcagatttgttccttcacatgaccaaactgccgattgtctaacaaaggctctctcactctctcgattttaatttcttatagacaagcttggtttgatggattcacccctacgcttgaggggtggtgtcaaaagaaattgaattggctcaaggtatttctgtcattctgttcctctaccagcgtccaagattcttggactcagaatattcccttcaccagcacacgtcacattaccgttttccttgggatcccaaaatatctccttttgtaacaaactgtaaacgtggcagctgtccatttgttagtgttgattctgtaatgaatgtaaatttgtttatataacgaaatacaatttcctcagctacaattaagctgagatttcaccattgtcttttattaccaaatttgactccccattgaaatatcatgctcaaaattttctcttctttattttctttctctaaattatgttattttacaatactttgtgtataattgttac

SEQ ID NO: 227853 - DNA, 2074 bp, Cannabis indica
aaactgcattttttttgcggtgtggtgcggtgcaggcggtttgagcggtttgatgaacacccctaaaagatagttacattaacattaattttaatcgtattaccaattggtgcaattcagtgctcatgcccttcgtcatcttgtaaagaaaacaaagaggaataaaaaattttattttgagcacaacttcattgatcaaaactatctttagcaaatgaaactacctctttaacattcttattcttaccattctacaccttgtcattgtgcacatttcacaacgtccagcaaagcataacaactctatgtttcatcccaaaatcccaacaatgaaatctatcatgaagccatcatcccccaaaagaattatcaccaatctctatcactgaaatactcgtcatctgtcagcaagcaacagcaaatgaactcctttcaagacaatgaaaaatctagactttctaattcgtacgcatcttggacacaacaacaaggggagaggaatatgtttcacacctaattggacacgggtaggaagacaattggaaggagccctccaaaccaaatccttgactttaggaggcactctccaatcctacaactctttccaaaagaccgagttaccgactccaactaactcacatttaagctcttgaagaagtcgatacgcactcttgaccaaatatgactcactatttacaattatgttttgatgtacaaaagaccatcagtttgtgcttcgaacctgaaaaacctaaaatgatgttcatgagtcactatattaattttgagtttttttaaagcaatggaagttctttagaatttctacagaattttcgcataagaacaaagaatttggatccttgtacagttggtatggactcctatttataggcaaccttcttattaggtcagattaactaagcgagcaatgctattacaatagaggatttacaaatgaagtaattaaaattttcttcattcctacataaggaaaacctaatacaaaaggtaaagtttacttgtctagtttgatacgtgatgttaataggttcaaaatgtgtcgccaatgagtgcacgagaatagtatatgtcaaagcagtgggtacaaaaattccaaactttatgttgctttatagaagagcttttccgctcgtactgaagggacaagttgcaatgtcctatctttgagtgtcgaaagatgtgcagagcttcatctgaaaatacttgttttcatcagcagagcttttctttttatattttcctcttttatttttaccatttttttttaaagtctattatttttacctctttttttttaaaaatactttactgattttatccctgtcacctcaatatactctccatgtgactcccttatatcaggatattttgggtacaacacatataaaaagaggtatgtttcaattaaatataaaattagaggtaaatttggttaattgataaataaaataggtatttttcaataaaccacaagtacattgagaaaattacactctatacccgctttttatttcatattttaatttttactttcattttactactctttaatttatacccacttttataagttatattcccattatgtgctttagaaagtctaattttgataagttttgtgaggttatatttggtactttgattataaaagaggatatttatcaattaaaattattttagagttatatttagttaatgtgtaataaaaaagggtagttttcaacttatccccgagtacattttggaaccctcctcttgggttgggcctgtccaataatattaggaacaatttcataaatacacaaaaataacaaaacaaaaattacaaaaatacgtttgtatagaattttaaatatttttgcattttctaaaattttatttacagaaaaatatgatcttttgatgtatttttattattttgttgttaattttttttttatattggtatattatttttattgttgttttgtatattgatttccttgttactttctatgaagttttctttgttgatttggtgtgtttttattaaaataactataaaaaaaaaaat

SEQ ID NO: 227854 - DNA, 3354 bp, Cannabis indica
tgaattatatatcatattttatataatactatgttaaagtttgatttatattaaaatattatatatttaagtgtacataaaagttaataccacatataattttacataaaaatattgtataaaatataatttaatataatactatacaatacaattcggtgtaatacagcgtaccaaaggaacccttagagtaataaaactcttcctcataaggagtgcaataaattatttctctttgcattttagaatgtacaactttatattcaaattgcatgaatttctaaatccttgtttttttgtgggaaaaactacaattgttctagtattatcagtaatcacaacaatcaactaagtcagagcataaatgtatgtaagcttttgcggcaaaaaagtggccatagttgagaagttgctacatgacttatggaaatcctaagtgttttccattgcatgataatttgacaagagtgcaaactagtgtgacttgctttcacttggccgaggaattttcttgtactcatagttgttaatgtcgaccttctcttgcaaagcctataaaaatagacagccaagtgagctgaaaatgttctcatcatgatctcatttgaaatcgaaaatgtacaagcaagagaagagacatatgtaccttaagctcctcttccaaagaatatgttttggcttataggcaggtcctgttctagacagttgttttttggtctcaataatatcccattcctgatcatctttcaccttcgcaatatccttgctgagctacaaaatcccaccactttattaacgaacggacacaatgacaacagagtatgataatccgaacatataaatataacaaattcctttaatggttcgaatattacaacaatgtaaatgcagatgtacccagataactcaaaattagtttggcaccctgacccgaaggtcagaccttttattggatgcaatgatgtcctcacagttcgctagaattatgtaatgacaactattaacaaattcttttaaccttcagatgatgaatcattcggttaaaccctacaatatcaatagagaaaagtaacatctgccaaaatcttatgagtaaactcaagagtagagacactgacctgccttgtataagatgagcaagaccaacagctccgaacactgtgagagagatcattggaagaccgtatctaaaaaaggggtgctttacaccccatctcttaaatgttgaaggagctgaactctgaatcctagcagtggtagtagaagcaacagtagaggattttctcttggtctgagctgttgttggctcaataattgtcattttctcaaaccattagaggatcaattcaatacctaaatacccaacagccaaatcaatatctaagtcaaagctcgaatttcagaagaaaactttttaaacccatttgaattcactttatttggattgagatttaaagaaagataataactgtgaaagtgtagacaattttaagcattcaattttagaaaaacaacacccatcaagcaaaatgtggtctcatatgttctactggataacattataaaaaaaatagaagttgagtaattttttcaagaatatcaaataagaaaagatacatctacatgcacgcacacccatatgataaaattcaactaaatttataaatatttacttaaaacgatcaatcatagatttgaatgtatagttggattacaacttacaaggaagaccatcatgtacagatagaatttggtaatttaatttgtgtttggtataatgattgattcaagaacagaacacaaagtaatcatccacatagtaaattctgttaaaatgaaaaacactaaacaaatcaacacaatgagaaattatttgatgttcactatataaaatgagaaatcatttacagcacaaaaaaattgacaatatatattatattacaaacacaatggaggaattcaaataataaatttttaaaacaaatcacacacaaggcattattagtcttttgcactccatcatgatcatttatgtaataaaaggtcctcccatttcacagaacaaaaatttacgaagaccaactcgtcagtaacaaacaataaatctcatttcaaaaatgcatcatttgtgaagaccaccaaccaaaaattccgataatagattatattagcacaaattactaaaaaacacagttcaatctatagctaagtattcaaatacaattgtaaaatcaaatggacaacaataaaatatcattcatatgctcaactaaagctatatatttacagttatgattacatcgacccaaatattcgtaaaaatgaagaagataaacaattaaaagttaaataaactgaagaaatagatccatatcccaaatggagaaaaagaaaatgaaggatgataaatctatgagaaatgaaaactaagagaaagaaaatcaacctacgttgttgccgtttgcgagagaggagctgggggagaagttgcgccgtcgtcgtttgcgagtgggggagtttccgtcgactcttctgcggaggttgctggagatgggcggctacaagaattgagagagaaagagaaagagaaagagtgattaatgattaggttttgttttgtttttttaatgggaataatatataaatgatttttatatttatgtaataaaaacacgattttgtcgcgtgatataatttcacggaatgtattccgtagtacattagatgggtctcaaggtacattaaaggagtgtcagggtatgttactattttttaatcctaattacccttaaatcaatctcagcaaataactccctcatttaacggctgctgtagaatacattccgtgaaagtacaatcacggcaaaatcatgtcttataaaatataatgtattatttaaaaggctaaatataatttttttcgtccctaattatatttcctgaacttttttgctgttaaaattaaaaattcttgaacttagattgttagatttaaagatttttgtctaatttcattcaattttactgtttcagtgattatttatgtactaaattatgctccctatactttgatatttactctctcaaactttgatgtgtatcatgccctcagtaaaaaaaatcctaattagcctatttaaaactatacataataccctacccctctaaatttataataaaattaaaattttgataaaataataaaataaaaaaatataactaattacataagttaaattaatcataaaaatatcattcaaccgcatactaattttatgagaaataaaagtaaaaaaaaaaaaaaaaataaaggactcgtttggaacgctgtattaggtcgtattgtattgaatt

SEQ ID NO: 227855 - DNA, 2053 bp, Cannabis indica
tgccacggcctagggctcgggtcgtgacatgaatactttggattgttggtgtctccttcttcttcaatatccactgtagaagccgcttcttcctcttccaagtcctttgagtcatctggttgttgtagacgtgaagtgtttcctatctttaccaaaatattgactgggattttcggcaaccaataatcaaagttgtatgaaataattaatgggtgttagaatagaagattttttttacgtggttgaagcattgatgagctttagtccacatgtcattatatttatgaaagtatttattacaaagagttttccggatcgatcccccttgctttatatcattgggggtatttatagctcataatggtgataagaggttaccattgtcgtgtttgtttacaccatactttgtacaattttctaaatttcattttagggcataattgcttttatgatgaattttgggctgtctatatgtgtttggtaggattttacttatccctcatttgcgactttgacgactcgtttatgcagtcgtcgattaatgtatggggtctcgtaaaatcaaggaatgatgggtttaaatccttaaacacgtttgtcagcgtaaggcattggatgctcttctccatgtcgcatcaaatgcgtgtacattgttttaatcctagagtgatgtgttacacttcatcagtcctcccgtacccatatccaggttgacttcactcacgaaaaagaaaagacgagagatacctgctgtctagctagtctctcccggatatgactaatctatcatttttttttaaattagcgtgatgtcattaaattaaatagaaactagatctcatggtcattacataacaagttctccggtaacacagagactaatccaggtagcgtgtcttgtaacgcgggtctcattgccacctaagttgctcgcgaagcaccacatattttaggagaatttcaaagcaacacgtgttatatggtcttatatgatttaataggaatactctcatgtgtaactactaaccatacactacctttacctttggaataaaaaatccataagattttgctaggaaaaaaaatcttttgccgtacatttttctattttaattttcaccgacccagaaaatccaaactaaacccctttcatttctccctttcccgctgtgatcgcaaagccacacagatcaaacccagctactcactttctctcccatccgcttattacgattttctttgctatctatggggaagaggaagcgaacctcggatcacaatcagatccaacaatcatcgggtatgttccattttattgttcaatcacgtgttgcttaattcataattatcccatctcttcggttcccagaaaatttacgagaaagagaaatctttttggttcggtgtaaaagtgtcgttcagtaaattatgtatatcggagaacccactcttgaatttagttgaattctgttcttgtaacttgatttgtatatgtttcttcccatgaccttgtcattctatcattttctttttcactctcaaagacatcaaaagggatttagggttcttgtgtaagttaaaactatatgttgttgttgtttttgttttctgggtcttttctcttgagccatatgatctttcttggattgcctttttcagattagtaagctgatgatcattatcagttaaaactattcttgtttttattgcactttgattggtgcaacttaaaaagtggtttagctttttgctctgaatcggtcaacaaaacttgttgaaagtttgtaaaatatatttattagatatagatgttagtgttgttgtgatggttgtttttcaatattgtgcttgtgattaatttattactgtatttcttgatataaaacaagatgttgatgataattctttattgagttatttcagacaccgtgccatgctcctcaggaatggagctattatcagaagaggtaccttgacagtttcatagaaactctcttatttcagagtaagggggcaactattgttgtataatttttttttaatcctttttttt

SEQ ID NO: 227856 - DNA, 1450 bp, Cannabis indica
caagcgaaggtctcagtggttccgtcggcggcggctttggtcattaaggcactgaaggagccggagcgtgacaggaagaagaccaagaatatcaagcacaatgggaacatttctctcgatgatgtgatcgagattgctaagattatgaggcccagatccattgctaaggaactcgctggaacagtgaaggagattctcggcacatgcgtctccgtcggctgctccgtcgatggtaaggaccctaaggatcttcaggaagaaattagtgatggtgatgttgagataccccaagattaaatatggtggtattttgtatcttttctactctcagttttgtttcttaaagattgctcttttttcttatggcccattttctgaaaatgtctccaatatcaagtttgtaggagtttgatgtgaatggtggagaattgtaagggttttgaattttttttccttataaaattatttttcttggataatttttgggcataatacccctttttaattttacattggcactcttattttgatatatatatatatatatattatgctaacagctctaaatggagttactgttaaaacttgaaacccatttcatcattcaggtttgttggataggtattgaatagtcttggatgagcttgcaaatgaactagaatttttgtttgaatagtaaattatacaatatgattcatgggcagaattggttgttcatcctaatagctctcaatgaagatagtcctaaacctatctcacttttaagctttgttttatttgtattgaataatctttgatgtgcttcaaaatcaaccaaaattttggtttggagaagggtatggcgtggcataagattttgtgggaagaattgattgtttatgataatagttgtaaatggagttactgttaaatcccgtttcatcttaagttttattcatatgagttgaaaatcaactacagagtttttatatcatattatgtgaagggcgaatttgattgtttttttatcttaataactgttaaaacattaaacccatttcatgataaggttctaacgtgttttcaaatcaactatggatttgggtttgttagaacaccgtttctgatgttctcagcacactggtttctgatgttctagtattatggggcagttctgtaggtgtatagaagtaatgcaggagcatgtaattcatatttatatggaaattccaaggtagggtattccaccagttttcacgaaagcggtcaattgatcgttttttactttacttgtctaacattttctctgaaaactagtgagatgttgggtataataacataataccatcatcatataaaaaatattaaattatctctagtttggagaacagcccttatattattatttagttaagtttaacattatgtgatttggaagtaataatggatttttatttttgttacattgatt

SEQ ID NO: 227857 - DNA, 2663 bp, Cannabis indica
acctggagtgttcggtctcgggacatttggggattgtattttgatagtcgctgtgcgacctgtaatagatgtatattttggaatgttaacttttaaaagtttgaaaacgggatcccgatatttgtaaatattttattatattataaagtttaagaattaatataaaagttttaatttgacacgttttccgagaaaattcattgattagtaaagtttgcactgtaattgaaaaagcactgtaacgtgccttagtattaggacgttacatttagtatacgtgcctcgcacgtagctttttactagtaatatatatatatataaatttatataatactactgggtaagggtatagtattagtatacccgtgaaagggtgttttggtaaaattcttatttattttggcattcaggagaatttgtttagtctaatttgtttttcaagatcgtgtatgttatgtaattatttatgattacatgtaaatttcaaaaaatttcaagtagtttacaatgtcgaaaataagatttatatataatgtgttgcatgcgcgattattttttttatatgtgtggtaattaactatttaaagctattttcggcattgtaaattattcaaattttttttgaaaatttaaaaatggtcctaaatatctataatgtacgcaaccataaaaaaaataaattaaaaatattttatatgccaaaagagataaaatttaccataactattctttagggggtctattatagaaaattacaatactatatatctttgaaagatattagatagtagagtgctaattataacctcctagtataatttcttagtcaacttccacgcctcaaaaattacatgctggaatatgcattttaaaaataaataaataattcatagcgagtatttgttatacttacaatattactcttgtaaatttttcaaaagttccaaatagtttattgtaccaaaaacagagttcttgatattttagtttaccacgtgtgtttaaaaaacttcaaatatatcttcagcactgtaaactatttaattttttttttaaaaaaaattaaagtaatgatgttgtaactgtaacgaatattgatgatatgattttttttaacatatatttttaaaaattaagtttgactaaaaagttataagagctgatattcaatttaagacaaattcacatcacattcacattacatgcacataaaattataatgtaatttgtcttattgagctacaattacaagcttcttttgactgattagtaagtcattacataatttgggatacatatacgaacactaaaagaaaggaaaatttaaaagtacaaaaagagatagtgctctcgtctctctcggtgaactctgtgaattcctccatgctctgttcgaaagagcctactctaaagaagtgctccccaagcctacctccaatggaagatttgctgccccgcaccagcaaacttacggtaacagatgaggaagggtgggaaattaacgaatcaggggctgaagacattggcaagtcttgcctcattggccgactgtgcacaatgaaatccttcagtcgttctttgataaagaatattctttgtaggctatggaacttaggggaaaatgaatgggatttaaaagtaaagaagatttcaactaaggccacgtttttggttctttctttctctgagaacaacacactagaaagaatcctgggaagatctccatgggtgctcaatgcgagatttctaatactggatcgaatgaaggggataccgtccgattgggaaacgaaattgacatcattcttcatctcaggacgcgtctataatctgccagtgaaggtaattaccaaatctaacatggcaagactggtagcgatggcaggagacattgtcgaaatccaagaactggatgttaaccgaattactattaatgggttcttcaaattcaaagtgaggagctccattcaatccaagattttcccaggatatctttttccacatgaaaaaagacgggtatggctgcaatttcaatatgatagactcccatacatgtgttttaactgtggattaattggacatgaaatgaggcaatgtgataagaatcggactaccgtgatcaaggaggatgggcaactctctcaagcttacggttcttggctaaaggtggacttaacaagaagattggaaactaaaaatagagaggagagcatccaaaaatcccattcagaaggtacagaggacaacaattaccaatcagcaatcacattggaacaaaataccaaagaaagagagacaaccattcaccaaagcagaacatctacaggtacaattcctgtaaattctaaagttaataattgtgaacatttaagtttgtgcaatactaaaacccaactaatcacctctattaaccctccttgtgctgagacaaccgagacaatgatgccaaggaacattaatacagagatggaggaagttgagatgggtgttcgaaagagaaatggtgaagatctccataaagagacactattgaattcgactgaggaaagggcatgtaaagctagacttatggaagttgaactaaatgggagggataacacagggtcactcatagatgtacctgttgggttttatgccctaaataaaactcattacaatctgat

SEQ ID NO: 227858 - DNA, 1667 bp, Cannabis indica
aatgtctcctcaaagtctatcccagcctcttgtaaataacccttggcaactaatcttgacttgtatctgtttaaggacccatctttattcaacttcaccctgtgaatccacttgcaaccaattacattcatgttgggctcataaggaactagcttccatgtttttgcctttttcagagcacagatctcattactcatggcattgtgccatttagaatcggctaaagctgctttcaaagaccttggttcagagggtaataaagactcaggtaaaggatgtttagtagctatgtaggattttggtttggaaatgccattttgtagtcttgtgcgcatagggtgggttcgagtaggggcaggcagggctactggtgggtttatattgttgggaattgattgaatagggtggggaaggagttctgtagagggaatggtaatatctggtgatggatgagatatgtcttgtggtatagaaaatggttcagtgtttggtagagtggtatttgtatttctgttattgacagggacaggtgcatgaacatgagctgtatgcaaggtaggaggtacaactgttgcagggtttgtctggttagttgggaaagcaacgggtacaggacacgcagggtcaataataagagcatggtgaggagtattataggtggtactaggacaggggttattaggagaaactgagaactgagaaaaaggaaaaacaaggtctgaagttacctgtacttgttggtgctttatggatgcaggaaaaagcttttcattaaaaaccacatgccgtgctatgaatagccttccttcaggattttcacaaagatatcctttgtgtgaagaagaatatccaaggaaaaacattgttgagttcgaaactccatcttgtacctgttgtatggcctaagatgtggataacaagcacatccaaaaggcttgatgaaagtatagtctggtttctgtcccagtaaagtttccattggagtgctgtagttaagaaccggtgttggcagcctgtttatgaggaatacagcagtgtgaaatgcatgccaccagtagctgaaatctaaaccaggctgagcaagaatagttaaccccatttctgtaatatgtctgtgtttacgctctgcacgcccattttgctcactggttttgggacatgggtgttgaaagtgaattccttggtcactcaagaaccttgagaaaggtctatattctcctccccagtcagcctgtactttcttgacaggtaaattgaactgtttctctaccattgcttgaaatttgacaaagatgtctaaggactgagacttttgcacaagtggataaatccaggtatatcgactatagtcatcaatgaaatgaatatagtagagatatccatctttagatttgatgtgggatggtccccataaatctgtatgaatgagctcaagaggttgagtggctttggactgtgtgctagaaaatggttgtttgtggctcttgccaagttgacaagcatggcaaaaggaaagggattgtgtattggctttgtggttaatgtttgtaagtatcttttggagtatagtgggagatggatggccaagtttgtgatgccaaacatttatgtcattagtggtattagtctgtaaaacagtgggaggataggaatgagatggaaaatca

SEQ ID NO: 227859 - DNA, 2302 bp, Cannabis indica
gccgcaaattactcaaaatatttttactttttagtggtaaaactctctatctttaaaattttgttgcaattcactcttttatgctaaaagtgttaaatttgactaaaaggacacatgtttaaaaataatatatataacaaaaattaattaaaatatatttaaaaattattaaacaaaaaaagttcatatttttttgaatatatgtatctgctaatttgttaaaagaatataatttctattctaaaattaaatttaagataaaatagatatatcatttttaaattattattttaatatttaatattattttttaactctttttgtcttgttttctatattgaaaaatataatttatttaagtttaatttttagatttactatttttttttggtaagtaaaaagtttattgatatcaaaaaactgtcaagagaagaatctcctaaaccaccaaaaagcaaataaaaggttaccaacataaaacccccaaaaaaggacacaaacaatccatacatggttcaaagcccaaaactactaaaattttggtttttatgggaatgaatttgccttccctattatgtagaatatgcttgacaacccctagcaataatctcatcttctaaactttatactcttaaaaattagtatttgtaaatcacatagacaacaactataagggtagtttgaaacacaacctttcggaaataattcattttacttttagtaatccacctaactaactgagttaatgaccttgctgtagtgttccagcccaaccaaacttttaaatgagtcaacaatacgcaccataacaacattgtaatcgaataggctcaattgattctgaaattcaatcacaaaaaagacacgtgttatgaggaataatccccatgttcatcaatctgtctcgagtatgaagtctattagaggtggctaaccatccaataaacatatgtttagaaataacaattctatttcacacaacttgatctgcaaaatactctaagatttatatacttttgcaatacgataagtacctatacttgggttttgaaaatcagggagatgtttgagcatctttaagcgcgacaatcttacatcaataccaactcacatcatttggagaagaataatttcaccaatcagcatctttgagataaacggtactatttagtttttataataactattgaatgaaaattagttttgactaatataatggcgacatgtgtcaattttaataaaattactataaagtctccgttagagaaaaattgaagaaggaataaatatattactattctctcaactagtgagaggaccatggcctatataaccgagcttttaataagtagatctagaatttatcaagtaaattctcaacttactaattcctcattgaaccactatagaacttggaattgaatacactctcagttatatagaacgctttatatgtaccacgatatagatacgttatgattatccattgttacaatcctaatagttaaggatcctctatagatgatcgacactgaatagagacaaatttaccgtcctacccttcaatgtattttatccttagaacacttagctatctataaatgatatttcagtaaactaatataattactgaaatgtatctcaatcatttgcctctattaagccaaactcaaaggaaatcatcgtttcacttctatgtccaaatagaagctatagattccatatcgacactgaactgacaaatcatgggaattaaacttttgaacatataatcatgaatatattccactgtgctgacaacactataatcatgaaatatctaactatttagtgactacataattattgagatatttttgttctatatatatacaagtggtctaattttattataaatattttctattattatattattttaaatatgtgttttatataattttgtgttagagatattattacaatggaagaaaatcaagatattacgatctattgcattataatacaaggaccaacaaatagattaaataaatgttacaacacataatatacaatatatctacactatatatattatatatatatatgaaaggtagaagaagaagatacaacacatgtaatataatatatgtatatagaataatgtatatgtaatacactcactcacaatcttgggtgtaggttagtggaaatcactatgacttgaacaaggtattacgtctttgtccaaaagcttattttcccttatctctaagcaaaaagggaactctctaggaaatagctttgagaattatcaagcctt

SEQ ID NO: 227860 - DNA, 1262 bp, Cannabis indica
caaatgtttaaaaccgtcaggaaaaatttggtattcccgacggtttaaaagaatagttaatggaatatgcgacatttttaaaccgtcaactcttaaaaaatttacaatttcattccataacctcatttccccaagacctctatagtagcttatatcatgcctcctctcccaaacccacaatcctagccactcaaaacgcaaccacacaaccaacgacctaaccccactcgaacccaacccacataactactggtgcctaacccacctaaacccacttgaacccaacctacacaaccaccaacgcctaaccccactcgaacccaacctacacaactatcagtgcctaacccacacaaccccacctcgagcacacaccacctctctctcgtcatctctctctatattgtcatctcttcgatctttgcctctcttgtcgtctctccaatctctgcacgcgaccacaaccgcaaaggtcaactgaccctccatctctatctccgaccacgcaaaacccaaccgcaaaggtatatatatttatatatttttatttactattttttttattaaatttgaatatctatagttatatttttatatacatatttatttttttgagaaaaaattatatttatttatatacatatttttatagctgaatatatatatatatatataaatttaatgtgtttaatttaaattagttgttaatatataaatttaatgtgtaaaaatttgatgtggtttaaaaaagtaatgtgttttaaagttagttattagtgtaaaaaatttaatgtgtaaaaaatattttaaaaaataaagtagaaaaaatttaagtttaggttaaaaatttatttattttatttgttattgtaaaaataaattagctgttttaatttagtttagttaaaattgtaaattgttagtaaaaatatataattgtataaatttaagtaaataaatattttgttataagtttagtataattagggaaaaaagtttattacaattttaattttaattagtttgatttaattacttaattaattttttgtttattttgtttaggtgtttatttgttgtgataccgtttgaaaaaaatttgagatgctattagacctggtaatctatttaaatttttttattcaatatttaaaaactttagaataaattgaagtgtttcgcattgttaatttcaattatgtttaggtattagtgtgatgttgttcgagcaagttttttaatttaatattttaaatatttta

SEQ ID NO: 227861 - DNA, 2645 bp, Cannabis indica
ttttcacagttgtaggcatcgactgaggcttcacgatgtaaaaatagaggattcttttagagtgggcactcaaatttgaaattttacaaaaaatgtaccattcagcaaaaatttttgaagccggaggtgtgtagctggaatggagaaatctcaatcgtcgcaataaaaatctgtgaagtatgtcctgagagggaggtgtgctccgcttgagatgtgagcccagctccaggtgttgaatcagagctcacggatgcagactatttcgtgatagacaacctatgccacatcagtcctgatatgttgcaaagtctagcctttgaggcatacatttcaaacagtatgtacgagtggaaacaattctctttctattcgatctcctaaatggaattcttgagttcttgagcgggaggcagagtcgtagccttccccttttcctttggatcattagttttccttgacggagcaacctccaagatggtttccaaggtgccaccttgctaaagttccaagaggagggcctcaatcaacacctcttcagtagtcgcttcctctgtggaggcaactgtcggattttctttgatttccacagcctcaaggtggaattcttgattcagatccatcattgaaaagtaaaagggaaaatgaaaagccaagatattagacacccactatccaaatgaaaaaatgggtatcaagggaggcctcccctaaagttgcttggagaggtccccaccagacctatcactcccagaaatcttttcttcctagagaactcaaagcgatagattgggaacccatggaaagttacctgaacataatctaaaagcagaaatctagaaattaaagcccctcagagtcctaacaactccgaatgggtgtgaagaaaatacactagcctagtattcgtttaaatatatcttgcactgttttgtcgtaattccaaaattctaaaagtatgctaatgtctacggagcacaaacatccatacctaaactattcacatagtactgacatttttattgaaaaaaaaaagttcccacacaaccctgtcctaaaaatgaaactctacgggtaacactttaccactctaacatgagagacatcctagacctagcttgaactaattatttctatcttagatagaaaatagcaaacagtcaacaaagcgttgggatacatactcgttgtgtgagtttggaaggagaggttatcatggaaattttcccaagaatgttgatcccagtcgattacacaatcgtagtcagcttgagcgtcaaaactttcgttggtcaggtggaagagctgaagatttaatggctaagcatctagaaaacaggccaaatggaggtttagaaagtcttgaatcaagcaattgaaggcctcttgaattcactactgaagacgactatgaaagagaagctttttagaaaatggaaagttctagtttgaaattcaaaatggtattttgagtgtctgaagtgaagaaaaaaataacaaatgggtttggaaaatcaatttatactttgatacagatcctcgcgatttcaaatgaatggtccagatttccacttccgaaaagcacactttgttgcgatggatgggaagttgaaaagattgtattttaaactggcccttggaatttgttattcatcattacacaccttgaataccatacacattaaaggagaggtcattttaattgtcattccatcattgcaacttccccgaacatatgcacccctagcacacgtgtgttgtcaacaaatgcattaatggcgccacatgcatgccatgtatgtggtaccttcaatttgtggccctttagttgatgacagctcacaagatacatctatgatctaagtaatcaccacatgtcaagaatgtatctccaggatgtggaggaagactacaagctcccggatctcaaagaatcctgaaagtttttgggtaaatattatttgtatttctgagaatgtaacatgtggcatttaggaattaacttcataatttctctaattaaaatcctccactacaatcttgtgatggagaagcttcatagatccaggaacaactcatcaccaaaagatatatggaagtccactttgccctatcctagcttcctagacggcggcatgttacctcaaccagtcccggaagggtctaaatattgatgtctgccccgctaatacttgaacaagtactcaaagggcctattacggatgtcaacccccaggagtgtcgcgggcgtctacctttggaataacccaattcgcctagtgatagttatactttttttgacacatgatcagatcttgtcccctgtgtctaggcatggtagtgcgcacacctccacaaccttttttccagacggatattacaacctctaattttaaaggtgaatgatttgggtgacatgtggcctttacttttaaaggttaaaccattgagtgacatgtgtgcacaacgtacaaacgatccataattttccagctgtaacacgcaccgagacaattgttttcaacggacccaatattcagctctcttttgcatgtaatttaccccattactgggcttttactagaaatcctacttgggtcatggccatgtccatacctgccacatagtctataaatacccttctattt

SEQ ID NO: 227862 - DNA, 1532 bp, Cannabis indica
acccggtgtttccccttacggatcacgagactactgactgtcacataaaatattgctttgttttttaaaaataaaaagattaaggacctggtaatttgatatatcgccttagctcctataattatcttcctactcatgataatatgttttagtcatcggatcgaataatcatttttcttatagagaattaatctagaaaaatgtactgtagtgttgggtatagtgtggtgtgatttatgtattatacttaaccattaaaaaagaattagaaacatttcatattgtgacaattaaaaaacatgaatagtactactccaattaacatttaaataatatagttaatgtttcaaattttgacagtacaatcaaatttttaaaatcaaatctctcaaactaaaatttagatattacaaagttgaagaaggatacggtgcagtactgtaattgaaaccatattaaagaaattttaaaccttaaaaactggatcagactgtgaagttcataatttatttttttttttttttaaaaaaccgcgtgacaaaattgatatattctctttgtactctaatatattaagtacggtggtgtgggcagtttatgtgtgagttgaggaacattttgaacagcccctactactaaatgaattaattgatcacacacactcgagtacatgactaaaattgatatattctctttgactcttatatttagtattttagttaattagcttaattaacaataaggaataagtagggttcaattaataatgaaacattagtttgtggctagctgaaaataacagcgtaccagctttcccctatgtcccactgttattttaattgtttaaactaaacataaaaaaggcaaaagcagagggccccgatcaataataaaataaggatgtatcgaccctaataatgttatgtatatattatatatatatgcaaagtttaggaaccccacttctaaaaaattcttttcaggatcacagatcatagatcacttgagagtttcctgaacctcatctggtgaaagagaatagcgctaaagctatagtacactactcatgataaagcttttgcaaaagctggtattgggtatgtaccaccttatattatatcataaacatatatgaagaaataatgtaacaaaagtagagagagagagagagagagagaggacaaaaaaaacattaaaatccattttgaattgggttttcttgagattacattatatagtaagagataatcaatatagaggttgtttatgatgagaggaggtatatatatatagtgcagtgagtgtggtagtaaaataggtagaaaattaaaaagaagaggtgaatttaatcatatcagatcaaagacaaatgatggctggaaaccctaactggtggagcattcaatatccaccatctcaatctcaaacgaccactctcagctttcctcctcctcatcatcaccagactacttatatgcttggatcttcatcttcttcacttcctcctttcaattattccaataatttccctc

SEQ ID NO: 227863 - DNA, 2245 bp, Cannabis indica
ttgtaattagttatacattttctaagtcccgtattaacaaagtatacctctatataagaataattacatatcttaacaaaaaatatatataatttataaatttattctaaattataattacatttattcaaaaataagtatattatcatatgttatgtacgtataaatccaataatcatacaattaaaaaatgccagtactatattaattaagcattaattattcaacaattcccaacaaaaaaattggacatttagacaaaagatatcaattgatattgtatcgtttcctcttcccatgatgcttattacatctatcgtttcctcttcccatggtgcctattacatttatcaatattgtatcttttctttttctataaaataattggaccaaccctatatctcttctctaagatgtcaatttccagtagtgatattattcagtctttctctgtaaatattcaaccatacctcccatagccaaaatacgtgttcatctcactgaaagtattcgtgttaaattatgccgaacaaagaaatcaaatcccacttggagtcaaaaagatctagctgaatggttggaaaaaactcatggtctcaaagtgacacaagcaacaatatctaagacacttaaacgctcaagtgacctccttcaagaagatgtattgatcaatccaaatgcaaaacatccaaagattgtgaagtacccagccatggaatctgctctttatgaatggtttgtatgctaccaagagcatgtcaatatgagtggtgatttattaaaagagaagggaaattttttcctaaaaaaactttatcctgaagctacctcatttgtattttcaaatggatggttggaaaagttcaagcagaggcatgcaatccattcctttcgacgatttggggagagtggttcagtagatatgaagaagattgaagctgttttgccacaaataaaagaaggattagataaatggtctatgaaagatatttataacatggatgaaacaggcttgttttatcgcatgcaagctgataattctcttgcaacaaagcaactagagaggcgaaagcagagtaaagagaggattacaattgctatttgttgcaatggtgatggctctgacaaactaccgctttggatcatcggtaaattttctaatccaagatgttttaaaaaatattaatcgtgataatcttaactgcaagtatagagcaaattcaaatgcatggatgacatttttgttattcaatgaatggcttcaatggtttgatagacgtatggatagggatgttttgcttcttttagataattgcacagctcatggaaaaaaggagaatcatcccccacttcgtcatacaaaggtaatgttcttaccaccaaatactacttccaaaatccagccatatgatgcgggtattattagaaatttcaaaggctattatcgtcaacgatttaaccgccaaattttgaaacggatagaggagcatgttttcgaaccatcaaagataagtatccttgatggaattataaatgcagttgcggcatggttaattgatgtcaagccacaaacaattgccaattgtttcaagcattgtaaaattaggactactgatgttaatgaattgcaagttgcgaaagaatttgaagaggaaaataaagaagtcatgaaaaatttgggggaacagattcaagaactttactatactaatgcaatggatattaatgacttccttaatcatccaagtgagcaacaggtcacgtatactttaaatgaggaagaaataattactgcaattagacaagaagtgcaattagaagatgacttggaggatgatagcacagaattagaaaaaatttcttgtcaagaagctttcaacatgttggaaaagttagaaatattttggattcaacaagaaggtgctcatactagtgaattattagatatccgcaagtttaaagatatgataacaaatataaagagcaaatcaatgtatcaaacaactatagagaaatatttttcaaataataagtattaaggattgtttattataattattgtagttacaattgatattttgggtttttttagtatgtacctctatttagttataacctctaaattagaatatattttgtatggtcccaagtgtattcttgaatagaggttctactggaataaagtaagagtttctataaaactaccaaggtataaaaattacttatttataaagagaatcttaaa

SEQ ID NO: 227864 - DNA, 1152 bp, Cannabis indica
aagtgtatttttaaccactaatcacttatatataatattactattattataaaaaaaaggaaagaaattttttttttatattaatattgtttttattttattatatattattattacatacgaaaaaaaaatagttattttctaattatttttttaccgtaacctgacttcacccccaacgtcttcttcaaccttcaaacaaccccaccgtcgacctacagtcgacccccctctattcgacatccttcccttcctccatttgcccagacccgacccacctcagacttctgccccaacctccaccgttcgaaccccagccgcgcccacctccgtcctccattgttccaggcgaacccaacctccccagtccgactgcgccaccacctaaaaccactgttcagacctctccctctctcctcagtcgccccttgctccattttccccagatccattcccaccagaaacccatcatcgaccacccccatcgcctcctcgccagcactcagaaaaccagacccccgcccagccgccactgtccaccttagaaaccgcccacattcgacctccatttttccaggcgaaccactcttctccagtcgacccgcctcctccattaaccccatagcccgaagctcccttctgcaaccaccatcggaggagcttccacaatgtgaacctagccgccccgtattccacaacacctcggggctggtttcagatttcattcagtggattttcagtcatggtgagatctttctttatttctctttccagatttgggttgtgataaggttggagtagatttctcatcaaaaatgtgttgaaattaatcttgtacgtgctgcccatttttggttattgatgatttacctagtgttgggcaatggcattttgagaatctacactgtttagaagaaggaatatcaaaatgctttaggattaactgtggtgaacaatgattttgattctcgtgggtgatattcaattgggctgatttgttgctaaactcagtgtgtttttgttggttgttgatgttctgttgatattcctgagattgtgtagcagatatctttgcccctatcagaggattttgagcctactgttgtgatattgagccatggcaaccaacaaatccaaatctcgtaagcgtaa

SEQ ID NO: 227865 - DNA, 2783 bp, Cannabis indica
caagatgttactgaatgaaatcaaatccaccactgcattgaaaatcgttaatgagaaggaaagggcggtgcccgtgaaagaactaagatcatcaacaatcctctgatctgggttatcaataattgattgtgattgaattttgtaaaaggtttggttctttaggtagcgttccatgtaatagcttgtcatccaagacctccatctcagagcaagagtatctcttgcataatctctcagcacaaaaacctgagcaacagaatcaaatggaacaattatttatgtataagataatatctgcaaagtacagcaactgccaataaactgtttcagtttccaaacattctagtgtgttctagctgttgctttcaaataaagacagccacaaatgcaatatacaatcctcatacaattcagtacagcaatataaaatcctctagtgttgttgctgttgatttcatatatgatgacccagtaaaaaagcaatgtataatcctaacgtttgatcctgtctttcctagtgttataggggcttatcaatgtacaatgccagtagcctttgtgctattacagggtctacgtcgtttatggaagcatgtgggtgaaatctggctatgtggaggtgaatctattaggaatcatgttagagaaacacaaaagcagcagaaaaatacctaatgcgaaaatgcagcaatttgtgtgctcaccggaattccaccagcgaaggcacccaagtagtagagcagttgtttggaaaattgttcttggtccttgtcttgagtatttcacaaacaaaatcaaagtcagtgagtacattgaaaaacaaacgcaaatcatatgaatgaatgaatgaatgaatgaagagtgaggaagcaagactactgacttgctagggcattgtagaaatcacggccaagaaaattgaagccaacgctaataccagttgtaccaagagtaagagcaaaaacaccagcgagtcgcaacctggcttgagctttgtcatcagacgaccaataaggagccgccaccttccagaatcgcctgagcagcgtctgcagatccggaaccttcctcttcacttcctgttaattaaaaataaataaataatcaaacacacacatcacacatcaaaatccagcactcaatttcgtaatcccgaaaatccaaacacaaaagaaccttatctggtaatggaggcgaggggagtggttcagtggccgagttacgacataagaaggaagaagtgagattaagcttcctcctgttgcggcgaagtgttggagtattagcagaggtggtagaagaaggcattgggagagaataatttgaatggaaatggagagatgagaatgagaaatggggatgttgtgaaacaaaagtcatcgtcatttccctctatctattctaggcctaaggccttagctctctctctttcctttctttctttctttttcttttctttcttttgttataatttgaatgttgtgttattttagttttgttaatggtgatttagttttgtgatatgagttgtggttgtgaatgtggagatgtggcgtctccttataactactatgcatgggattgggagagtggggccattgtcaacacaaacaactattcacactcacaagtagtgttgacttaaataactaaaaaaagtagccaaatagtgcatggccagagagatttctaagttttaggaggtagctataatattttattattattgtctttgtccttctttaaagaattggttttattctaattatttactcataataataatagtgataataaagaaggtagttaacgagtaagaagaaatatagaattaaaaaaataataagatatttttgaagatatactagtaaaattaataattgttcaccattaggaacatgttaccaagcttacgagttctcctatgcacttctcaagctcttgaattctttgagtattgctcaccattaggaacatgttaccaagcttctttttctcttggctctgataccaattgtcacaggccaactatttggactagggctgcacacgggtcagattttcgggtggtcgggttcaggttttcgggtatcgggtgtttaaaatgcctaactgaacccgatttctcaatttttgggttcatacgggtttcggctcgaatgcaccgggttctgtagggggggttcagattttaataagtcagatccgatttaaggattttttggcccaaatgatattttatttttaaaaataccattaaatttcattccatcaagatttacctgaaattaaatacacaaaaattaaagttgtgtgatgagaataaaacatcaaaagacctactaaataaaattggctcatagtaaaatgggaaaagttgcccaggaagaccaccttgaaaataaatttcggcccttgcagactttcagttatatatataatacatataaaatcttttttttagaaagaaatttcattaaaacaatttgaaagaaacaaaaccttttacaattacaaccatcaaagcaggaaacaaggagaagaagaactcgtcggattgagtcgcccgctgtgatgagaagaactcaccggcaactgagaaagggagagtagatgagggtcgacgagggaatgagggatacgactgggatttggaagaaacctagaaaatgagaagaatagggatacgataggatttaggtttttaagtttttgttttttggttttaacttgactaaaaataaaataatatttaaaaagaatatataatattataagtatta

SEQ ID NO: 227866 - DNA, 1225 bp, Cannabis indica
aacaccaatttacaacattataatcagaaagcaacttcactgagatttgttatggaagaaattgaaaaatcatcttgtctatgaagaataaataatacccttctttgtagagaatcacaacaacccaaacatcagatggagcttgagagacctctctcacaaaatctgatcctgaaattggaattattgatccaaattttgcaactttggctgcttctctcagctgtgctagtctcttcttcctattaaaatgacccatctaattttagttaaacagatcaattgtcataaattgtctttaagtctctaaacatctttcatatttcaattctcaaataaaatataataactaatctaaaacttcaaattcaaaagatatcaaacagtagctaaatccgagaaagttgaaaactttccattaaaattttatttgaattgttaaataaaaaattaaaaataaaacctgtaatcttcgaggaatcgatcgtcatcgagatcacggtcatcatcgaggtcttcaagctcgtcttcagtcttgcggtcgatccaggacttgtccttaggaatagaagcttcgtccggtgctggagcaaaggcaggaggcttgaacaccggtggcttctccgggagattgccaagctttctctggatatcatcccactgtgtggatgctccttccacatccttgtacacgtagtgataatctcccatttcttcttcttcttcttctaccttcgatctctctctctctctctctctctctctctctctctctttttccttttcgattttcttctcttttatcgctcaaattttctgttgggccaaaataaaagcccaataaattaggcccaagatttattacaaagctttttaattaaaattgttctttttatatattgatggattataatttacatttttacaagttttctttaattatttttacggaatctcataaaatcaatatgaaaaataaacgaataataacataatataaatataaaataatatgaaaataacgaagcctaatataatgttgttgatatacaattctacacgattgtaaaagcttagttcataaatttaataattctctagttttaaatttatctttgtgtttaattttagatgatattagaattttatgctcttatttgaatgttgtgagttttaattatgggcccaatcctagacactctaagatcctttttcaaacctgctc

SEQ ID NO: 227867 - DNA, 1428 bp, Cannabis indica
aatccgcgagtaaactgcatttgcccccctaatagatctgctttgtttagaataaaacagcatcagcttgagcataacatgcttaatgccctcatattttggctcttcaattctcagtggggaagagggatccaaagccaatgagcagggcttggaccaaaacattttatcaagattaacctgttgaatattggcagaccagttttcaggagcaatgtaatggccagcagtgtccataatatgatttcaaacttattgacaaatttaatataaccaacaactgtgcatgctgacactaattttaaaaaaaaaaaaaataacacacaaggcatgtatagtatttgcaatcatataagacatcacaagagtcataaaatcactcaaaagattgtacacaaaactatccaatacttttctgttttagtttttctgaaacgaaacatctgagttttattaaagggacatatcatccaacactaaatgattcttaaacagaagctagaaatagcagggaaattaaatttcaagaagggtgtcttcgaaaacctaccgcagtttcatttcttggaaatctcatttcaacgttatcagaagtagtaggagccacagatgcagttgcagcagccttcttataactttgacgtgaaatgacatagaaatcatttctaagattcaagttcttctgtgactgtgatcccagtcttgacaaatgagaaaaagccctgttccatctttgtaacattgtgaaatacctaatggattcaaacaaacattaccacaaacaaaaaaaaaacaacacaatagcgaatttctctataccgtttaacttttaggggttacccctctacccaaaaaaaaaaaagaagaaaaaatagactgatacactcatattatcaatctttcaattataagcatcttcgttttccccctcaacgaaaccaacgaatcataaagaagagaacccgtttatgaaatcaagtgattttcatcattcaaagtaacaaataataagtatagagaggcaatgagtttgtcaatctgatttaccttagaaaacaaaggcttctctggtttcaatactgaggcgtaaacaaggttcaatgtgagttgtggttaaaatggatgataaacctcagaagaaatataaaaggaaatctaagggctaagagtggtagggcgtggcagtatgcgttgccccacagttggaaatgcttaacaagttattttaccgaagaaattgaagaagctggtttcgctttcctcccaaacaagcccttggaattagggagaatgcattttccaaacgggtgaatttaaaaatgcctctttgattaatcaattaactaaatttacctctaaatttttttttaatcgaaacatatttaaagtaagagaggcaaaattagtacaatattaaaaaaaaaaaaa

SEQ ID NO: 227868 - DNA, 2272 bp, Cannabis indica
ttcttttataaatatatttatatatatttatatatatatatatatatatttggcttataattgacttacaaaataattgcagaggttggcttgggccttattgggtttggcatatttttctccttacttggtgtaatactattctttgatagaggtttgcttgccttgggaaatgtatggcttttctttagctcaatatatggtattatttatctttttggaaatgattcataatccattacttttaatactggtttcagatcttttggttgactggagtagcccttttacttggttggggcgctacatggaggctttttaccaacccagcaaattacaaggtataaaaaacaacacttggtatgaactccttactgtgctactcagtgtaatgagtaattataatacgtttttattatattatgtaaagaggtcttaatgtgatcctcaccttctgcattttacgtgctggatggagtccacggtgactactattttcatcgaaatcctgtactttttatctttatgttggaaggtgcagtcgacttgttacctttgaatatcattttgtctcttgttctaaatataactttggattacttttggatatcagtataacttgataggatactgtgtgaaatagctgccaatttgaattactataattatacgtatgctttgaaaatatatgtatttgcaataaagattaatcttacattggtctctatttgcttcttcagggttctatatcttttcttctcgggctattttttattttcgttcgatggcccatagttggtataatatgtgaaatatatggttgttttgttctctttgggtcagtttctgcgcttaatctttaacttaaagttgaataattttgtaatgatcctattccttactgaagtttgtctaatctatggctgtagtggtttttggccatctgtgaaggtgttcttgtgtcaaattccaattgtgggatggatcataagctatctattctggtgagttaacttttgctgcttcactttcaatatgctggaaattgataccttgcttttaatatgcatatagtgcttttattcccttctacctcttctgtcatatgagtgtgattccaattttgcccctttctctgccaatttgttcgtttaaactttaatgtttgaggtacaaaaggaaggtaaacttaagaagtctcctagctaaaaatcttttaaccatagttattcataattctgattcaataatatatttgcctttgcaaacttcctaaactcctcatgcttctgtctttcactttctatttctttcctctcgtccgccattgaagaccttacattatcttactctaatatttctcctgctattaaagagttcatgtttacccttttgaagacctgtccctcatgttctatatcccactttttttccctttgggttcgctgtatcctattaaagaagtttctccctacaaggtcattgaagagatctgtgtttactcatcatcctctctctctctctctctctatatatatatatatatactttgtatgtatatagatacatacgataaatacctgaaatgtaaatcccataacaagctgaggtcttaattaaaaaatttgacgtaatgaaagattttatacgaattatgaactgctactaaatacatgttttcattttattcgtgcaaattaaattaaatcgagtattccatgaacactcctaaattagacacagaaatttgaacttttgctgtcataaatcaacattgctatgaatttaccgtgacttgacagaaacaattggtgacatgcagattcttgattgcctaaaatgacattccgattgatcatctgtcagactgtcaggtacatgatatatgcgattatgaaatgcttgatttcttctctaatctttagtttcgtacacactacctcaaataaaggttgtaaaaaataggagtatcataatcagatatgcataatagagcaagtaggagtactagtacacacacacataggccagactgatggaaatagaggagttttaccattttctccatcagtttttatcgaaatattagagggatttttagaattttccctagtttctataggagattttctacaaaacatcgtttcctgatttcgttaaaaaatctttttagtggctgtaaatacttttcattagctgtcttttgtatattgtattctctaaagcctactgtaatctatgatatttttcaagaaaaggaattcattttttt

SEQ ID NO: 227869 - DNA, 3046 bp, Cannabis indica
aaactaagcggtctttacaccccctgattttcgtactgagcttcagctagattaagaatcatcaaattatcgtcaatacattttgcttgattttggtgatgactctggctggttttttgacacaggtgctaccaatcatatcaccaatactatggaaaatttttattctgttgttgcctataatggtgttgaaactttagttgttgggaatggtaagaaactcaccatttttcatatttgttctgcctatttatctttctcaactcaatcttccttaaatttaaaatatgttcttaaagttcctgctatgaccaaaaacttagtcagtgtatcgaaattaactaatgacaatgatacttttcttgaatttcacaaacattgttgtcttatcaaggacaaggacactagcaaagtcttgctgaaagggaggcttaaagatgggttatacctactcggggaaggttcttcttcacctttgatattagccatacatcgtcatcttacttgtgtgccttctgaaaattctattcaatgtttgtacttcttgtaataaactcatgtacaaattcttctatcaataaaacatcttctaattttgatttctacctttactctccataagtttttcattcttatattagcaaagatgttaatgcttgtcacaataagctacgtcatccaactcccaatacattaggcatattattaccataattgcctcatactagttctttaaaagaaccaaaattctacaactcgtcaacaaggcaagagctacactcttccattctaatcaacttttagctctaatacatattcatctatggggtccctcacatgctacttctatagaagggtataagtattttataaattttcttgatgactacagcaagtacaccttgatttttttaattaacccttaggtctcaagcatttgtgtctttataaagtggaaagcacaagtgaaaaaataatttaatttgcctataaagtcagtccgagcagactgaggatgagaatacaagactttaaaagattcatagaagatcaatgagtacatttttaacatccatgccctcatacccatggacaaaatggaagggcagagtgaaatcataggcacataaatgaaactagactaactctcttggctaaagctggtgtagatctcaaatattagtggcatgcattcattgatgtagtgtttacaataaacagattacctaccaaagtgttagacttacaatctccgtatgaagtcttattccacagtaaactagattatgctatcttaaaaacttttgggtgtgcatgttttcctcacctaacgccatacaacaagcacaaatatgacttcagatctcaaaaatgtctatttttggggtactcttcacaccacaaaggctacatatgtgagacatcagaagggagaatttacattgctagaaatgttgtgttcaatgaagagtgcttttcagccatgttgtctgcaacttctacctcttcaaactcatcttaggtataatttttccatttctcatcattccctatcactcatttttacactggaccttgtccaactactactaatacaacatctgttgatggttctgttggtgtgcaaactgagaatgctgtttattcactagaacaacatgtttctgctaatcctatacatgagcccttaaatcaaccacaactaatacctacctcaccctcacccctattaagtagaattcgcctactatcttaactccaaatatttcaacccaacttccaataaactctaaacatactatgcctgcaccaaccctacctgcaccataacctcaaaccgggaaagcacaaattaaccaacataatcaaattgacaatataaacatctcactatagaatgttgttatcacatctgtaatgcccgccctattcaatagggacgccacgtgtgtgattttataaactagtttaatactaatagaataattaattattaaaaatcgtgataatactaaaaaaatttgactataacaaaacactaaaaacggacatcataacgacaatgaaaaagtatttttggggatccctgttataaaagttttacaaaagaactatatatgatgacacctcaaaaatataaaaccaaaacacatgatacatacaacccaaaacaactcctgacaactcagcacgcataccggtgaggttaatatgtacattgctggaggagactgtcttctcatggttgctctaactttcccttgctcttacctgcaccacagagcacctgtgagtcaaatagactcagcaagaaaaataataaaaagggtacattaaataaataattatacattttattatcataaaatgattaaaccataacattcaacaattgacaatatgactagccatatgcatagaaatggatatactcatatatttgcattgcctaatcaggcaagcccgtgtcataatgcaatatcatgtataatatcataacgataacatttgaaagtagataatattaccagccatatccatagaaatagatatgctcatatatttgcattgcctaatcaggaaagcacgtgtcataataaaatatcatatataatatcattgcaccacctaatcaggtgagcccgtgccacaacctggcaccaatatatcgcattgtttaatcaaacgagcccgcacctacgcccgatacttatcatatgtcactatgccataaccaggcatttttatatcaccaacgcttgtacctacgctcgatacatcgctaggattattgcattgcctaatcaggtgagctcgtacctattctcagtactcatcatatgtcactgacacccgtacctatgcttggtacattgccaggtatattgccaggatttattaggcatttaaataatgaagaaattaaatggaaaataccacacaagtggtcggccatggatatgggcccccactttggaattttgccattttacaataatctttccttattttctcaaaaatgccatttttccaattctaagcattt

SEQ ID NO: 227870 - DNA, 2276 bp, Cannabis indica
ttattattattattaaaacatttggagttgatgacgaatagttaggctattgtaatgttttgggtttgtggtttataatatatgaactcattttttggcctattttcatgtgacatttaccaaaaaaataattaatttctttcgttattttgttaatttataacgaccattacctaactttttttcactcactcttgtttcatatccaaaattaattgtcttttgatatatataattatataaaatgatgatgcctaattatattgttttgattttaatttggatatttctgtttttataaagtattaatttaattggagtagtcttcattatgtcatcaataaattattgaataatcacttacgtacgtttctttgaatgacaaaattatcatataataattaattattttcttgtaaagcatttaagtttgactataatgggaaatgggtccaattttgaaaagttaattttctttgagaggggttatagttataatataaatgagaaccaaacgtcaaagttaaatatttgtttagagataacaaaatttaaatttgtgttaattaattaattaagctgacaaattagttcgatggtgtgattacaaatgtaagatgatccataattaatgatgaattaataatattcaaatttttataaaggttgtaaatttgataataaagtaagttacaattctcctttcatattctctttttgtgattttatttgactttcatttttgtagatcgagtctatctctcttaattaggtttttgttagggtagttttctcgaggctgaagcagtttagaatatcgttacttatgtgtagaattattcacaatcgatatgttgctaattagtattttatatttttcaatgtagaggatgatattagtcttgggtttatgctcttcttttgtaatcggccggcgtgttttagggtttgtttggtcaattttcttgtgagatatgtgcgattacatttttgctttacttgtaaaaaaaattgtccctttaaacctttgaatgaatgtatattttccctttttaaaagaaaatatacaaaattagattttgtgcttgtgtctatttttttttatacaagatatatattttgcatatttcgagaaacgaaagctattgcacaagccaaaaaatcgtcatcaaagacaaaggtgataacatagacaatatcaagtagaagaatacaatgaatatttgaagtcatggcattcctaaaacaactaacaatatctcagagcctctttgacaacaacacatgagaaccatagaagttgaacattaaaaatgttagttcaatacccaataataatactaaaaaattcaatacaactaaaaagggaattgattattttacttgttagaaaatcaataatctagaacaatagtgcaatattattaattaattagtttttcttcctaaatttctaaatcagcaattttatttatatgattattaaaaagtgtataattgtgatgaaacaatatatatttataaataatttatgttagatgtattgatgtattattttggatgaatatacattagttttatgattaattatattaaaattaagtggaatatgataattaattataaattagctaatgatgtttgtatttcaagactgacataaatattagcgacagatgtttagttcatcgctaataatagttaatagcgaccaattattagcaataatatctatagctaataatattaaatattgtagtgtaatcgcctctaaagggtaacgcgtattaccctttaaaggtggttatttccaaataacatcctctaaagggctttcaagatatatatatactaggtggatggtacgtgccaagccacgtaaatgttagttttatttaaggtttaatcttttatttttttagattttggtattaatcttttatttttttagattttggtaactaaagctgtataattatttaaataatttattttataaatgtaccgtatgtcaatatatttggtaaataaaatataattgtatatgtaaacttataatatgtatattgttattaataataaaatgtacgttaatctcaaaatttacatactcatataatagttattcttactgtgaataaataatttataataagtcatatatgactttaagtgaaaaaaaaaaaatatatatatataaaaaaagtgtcatcttaaaatagaaagaaaaaaattattaaataaagtcttaatataaaatacctatgaaaaataaa

SEQ ID NO: 227871 - DNA, 1848 bp, Cannabis indica
aaaagaaaaattttaattaattacgatttccataaacctcgttgattagcaacgagctgcatagtatgtttaaagatcacgtaatgcgcctatgctagttagggtgttacaaatagtttccatgcgggttgctacacgaattttagttgcgatttatgttgctcttattataagaatttctgtgtgaaattccaaaaaaaatcttttgcaaagttattcggacataacataaataaggaaataattggcttatatgaatttaaaaaataatagaaagaaatgagaagaaaaatgctaaaaaggatgttttgcatttaataatactgtgcaattaatattagtagccaacccaatcaaaataaggtttcgtccttcaaaagtaatttttaataacaacatttctgtttcttatttagttattttgaaaaaaggatttagaaaagaaaaatagtatagccaacccaattaataatacaatgcaattaataataaagtattgttattgaacattaatggtactttaacactttttataagtaacactttatgattggttaaaaatatttttttaagttatataagatacaatatttaattataccaattaaattatgatactaaaaaaattactaagtatcaataatatcttttagctattgtcttaataatagtagccaacccaattaaaataaggtttggtcctgcaaaagtaattttcaacaacttcatatttgttatttatttcccaaatagaagaagaagaaaaaaagagttcatggtagttgtggtttttcttgtacaatatttggcaatttaattaataattgagttgaaaataaacaaacatatatatatatatatatgaaacatacataaagtacgtgcatgcatcatcttcacatatttaagattaaatttagtagtcaacttaatcaatatattcagtcataaaatgtaaataaatactaaaaaatgactcttaataactacgatgattatattataaaattagcccactaaagcaagaacaaaaaaagaaccccatgctatttaatgcaacattcactcataacccactcattccactgctttttggaaaataattatactttattttttaacgttccatcatcccaccagcgtataataaaataatactaaattttattggtaccaaagaataaccttttactatcaaactttaagagaaattagtaaccaattctaaaaaaaataagatcaaacattttcaccactaaattattttagtaggcaaaaattatttttagctactaataagttttggtagtaaaatatttgtatttagcaaccaattgaactactaacattcttaatagcaaaaaattttttacttttagctaccaacagctcaactctaagcataggcgggttagacctgtgcctagggcccactcagcccaggggcccaattttttttctcttttaaataaaatatatatttttttcactgattttaaaaaataccatattttttctaacataagggcacaaaatatttttttttccctttggcccactttgtttcacgggcggccctggctaccaattatatttagtatgaaaataatatttttagctaccaattttatactatattttttttggtaacaaaatataattttcttttttaacacaaaatgaattgttagatttacccattttgttatagaaaaatatatcttcacgcaaccaacggtaaattattattttctcttataaaaaaaaaattatttaccacttttctcttttatatttaattaaaaaataatatttgttacatactaatttattgtagtaaaaatacat

SEQ ID NO: 227872 - DNA, 1173 bp, Cannabis indica
ataaataggggttcaccccattggaataaataattgataaattctcattcactttctctttttctcttcatcttcttctttcttctcatctactttatataattttataacaatttataatttataaatattattaataaatataaaattaaagtaaactttttttttgaaagtgaaattataaccaacttttagagaattgtaacaaataatttaatcagtatttttttaaattcattaaaaataccattaagggagattttcccataaaaataataaaatgtgtaatttctctgaataataaattactgtttttcataaatgttatatttggagtgatttaaacaaaaaaacattggcaattttaatttctggtgacttttctgatatcgatgacttttttggcgtcgatgactactttcacaactttttcggcgatagttgttattataaataccccatatattgtttttaaaacttttttttttttaaatttacgatatggatttctaaattggttgcagcactagttacaatagggggtttttatacgattttttattgcaatttaagttgcagcgctagttgcaataaaaatttctatgtagaattccgtaaaaatgcaaaacaaactgttttgaaatgtataaatgaaaaatccctacaaattttacaaactttatttatggttttatttattttctcatattttaattattactgattttttattcacatattttttttgtattatttatttctattaaagtaaattttataattagttttttccatatttataattagtcacacaaaaatatgagttatccaactaccaaaactttattataggatcatagcttgcctctatatatatcttaaaattgataacttaatattatatatattagaggtattagtggctaattaatttctttatttctatttttaaatttcatttaatatttaattagtattaaatgtgcaaatcaattaatatgctaactgtatacatatgcttatttgaagtttctcttaagtgtacgataataattaagaatattattctttcgacctatagtcttttcaaatggtagtgctttgaaacattatactcaacgactcaattttcattatttttcgttacaatataggcttttttttcaaaaaaaa

SEQ ID NO: 227873 - DNA, 2560 bp, Cannabis indica
ggagattctctctaattaatctcatcccctccactcccaattaaaaagcttttaattaaataataaaaactttataccaaacatcacataaattgttgtaattgtttctcttttataaataatgacaaatataattgataattaaataatgttatatagactaaataattatacattttaaagaatcaaataatagacaatcatctagctaaataccttatttatctatttaaaaagcatctacaattaatttatgtacagttacattgaccgaccgatgtatatggatcaaaaaaactcttaaaaatttaaataatatacttattatattttttaacaatgatcataaatcactaaaaaaaagaatatctcttagcaaaatcaaacataattgctaaagagtctaaatcaacaaccacaaccacaacaaattttgaagaaaaaatatatccaccatcacttatattgccaaacttttgtaattgttaaccaaaatctaaattggtatttgaagaaacaaccaaaattatataaaatcttttgtttatttatttaacatgcaactacacataggtctaggtagtggagttgaattaagccaaaagctttgcctgccacttttgccaataagatataacactagtgatatcattcatatctaggtgcatgtttttattcatatttattaattatataacaactctattcaagagaaataccacttgtgaagtaattgcctcagaatttattatgtgaaactgcatatggtccattttgaataagaccctaaattgactacatcttaatatatatgttattcttataataataggattattattatatacttagtatattagtagtatttagcactatttagaaagatagatgcgtaattctctatcgaaagataccacaatccactcccatgcgtataaatctcaaccattgacatcatcacacgtggctccaaagttatgggtcctcaccaaaccttagacggctcagatcacatcacattctctcccactcaaacttatccgcttcgcatgtcggcgctacccgtttaatttgctgaacagcccctccttttctacttaattacattctggccccatcaaaatatttctcacaacatatttaaccaaaaaaaataaccgtcaaaatatcgacacgtaaaaaataaaaacaaaaacacattttttctctttaaaaagaaaaacaaaaaacagagaacaagaaagaaagaaagagagagaaagctctaaaaaagcgggaaccatctccggcgccggcaatatcaatatcttctcctccgttgagtaaatagggctttcaaatacaccatttccgattcttttgcctcaccccaaaaatatagttactaaaaataatcagagagaatccgcatagatcgggagatttttctctctatctgaaaatattattattattatttgttttattttccttttttctctgttagtttacattcaaattaatcgaagaagaagaagaagagggtttgctctgtttctctcttactctgtttttgttttttaaagagagagaaaaatggaacagaaaggttatttgttatcggcgttgagtgttggggtaggagttggagttgggcttgggcttgtatcgggccagagcgtgagtaaatgggccgggaatttaccgcccaatgctataaccattgaaaaaatggaacaagagatgttgaggatgatgatccatcatggcacagaagaaactaaagatcaagtcacttttgatgattttccatattatctcaggtcacacactcagattcaaattcagtattcatcatcatatcattaatttattattatctattatccctgaatcacaacacagaacaatatcttctctcattattattattattattaatgtggataagtataaaagataatgaggattttctagtttgtgttactttatatatttttatgttatcaatgttgcatatataattattgcaacaatatatgctaatgtttatattattgataattacatatttttttattattattattcaaattggtaattacatgtcttcatgttaaaaaaaacattatatatttcatatgatacgtgtcataatgtgtttttgttatggcaatatggtggcccatactctagcttatcacattttattatttcattgcataaatattttatttttattcttttttttcaaaaatgtgtcattgtattgctgaatttttggataaagtttcttacattcccattacttatttgttttatttatttatttatttttgaataaagattcttacatttcttttatttatttattatttttttctctcaagtagatattctttaatttcttatgtaaaatttatcttatgtaatttgaaattgtcaagattacatacaatgtcaaattgattttgttacttgtttctttttttttttttgttgttcttttactccaaatttttataaagtttgaagattggttatcaatgacgaagataggggccaatttttttttttttta

SEQ ID NO: 227874 - DNA, 4084 bp, Cannabis indica
cccaatccgccagttgtgcaccacatatatttttgttttccattttattgtgaaagggtctcatacatttttctactatatgcagaagctaccatggtgagaattagtgttcttaatgatgccctgaagagcatgtacaatgctgagaagaggggcaaaagacaggtcatgatcagaccctcatcgaaagtgatcatcaagttcttgatcgttatgcagaagcacggtaaataaatgcgaaacttggcttcttttctgtatgtgtaatgcattgcattgctgtgcctaatgtattgttttctacctccctttattataggttacattggtgagtttgaatatgttgatgaccaccgttctggtaaaattgtggtggagctcaatggtagactgaacaagtgtggcgttattagtcccagattcgatatcggtgtgaaggagattgaagggtggacagcaaggttgcttccatctcgtcaggttagtccaattttatgaatgatgattactgaagtatctgtatgttcaactagaataagtccatttattcttatttatttagggattttctgtttacaaaatgctaggatgtctagaaatgctgtttagggccactttaaatgaagagttgtatcttgtaaaccttagagtgtctatctcagtctatctcattcttgcttacattcattcctctctatgtaataacttgcagtttggctacattgttttgactacctctgctggaatcatggatcacgaagaggcacgtaggaaaaatgtcggaggcaaggttcttggattcttttactagtttctccgtgattgagtgtgagggttatttttttgtcagcattttgaggtcgatgtattttatatttagacaatgttgagtaaatctatttgtcatttcttaaagaggatttttttgttttgagttttgctactttcatgtctggcctaaaagcagcattcatccatgtttctggttttttatttgcttgttactttttatttttatttattcatttttatccattagctcattacttaatgcttatatctagttgcattttgagaaaatgcttagctaaattacaaacaatgtcttttagtattgaagcctcaataatactagttacattttgagaaaatgcttagctaaattgtgattttgaaacttttggaaaaattacttccttaaaggagtgcataagatttgtacaacgagtaatatagttattaatttcccacttccaattagaactcttgacagctttaataaacaataaattgtaagcctttgtgggcagccagcaagttctagcgttggaaggtccacgcattgatagaagggaatgattgtaattgatacaagagagtgatcatattctggatagtaatgagctatagaatgatgtcattttatgctagtgtcaagacgcacatattaactcattattaatattcacatatttcacatgcaaactcaaaatgaatttgattcaatctcatattctagtccctagaaatccttgtagaggaatgagactctaaggagacgccctccacatatgagatgccaagttaccgtgaaggaaaagatgcttctttgtttcttcctctctacaaattgggcaagaggagtcttcgatgtctgcgaagaattttaagaatcgatctaattggaagtgcatttgatagaatgttccactaaagcaccttatgtcgttcaagtgttttgcaattccaaagtttattttacaaagagggagcaacatgacagtattggtttctctcaagagcctgcaaaaggtaagcagattaggtggagaatttaccactcggttccttaattcaaacacaatgattcctcatttgtcttgatggctttcctccttccgaaatggcacgtacagtgtcttggttatacaacctatttagtttataaatttttcactctccattttttaaaaataaatctgccatagttataaagcctggagtagaaaccccattaagaattaggcaaagttcaatggatctttccaaatattgatatctttcctattagctatcacatagcaagcatcattcctcaaaacacttttagcttttactgtattcttccagaacaacgaatcaaaattcttataattgcattgaaggaaaggggtattcttaagatatttggtagcaaacaccttgcaacataaaaagattgatctttattaatgagtttccaacccatatcaatagaaaggctcgattcatctctatagtttttcggaagcctaaccctcccagaggcttggggggataaattttatcccatattttgagacaaaatctactatttccttttcacttccccaccagaaattctgaaccataccatcaattttggatgccattcatgagaaagttttgtagtttgcatagtataaatcagaagggaaagactaatcgatttaataagcgtagcacgacccgctttggaaaggttttcactttccaaccttgtagcttagaagaaaggttctccaagataaaattaaaatctacatcctttcaatgagttctaaacataggaagtcccaagtatttgatgttttccgtttggactgtctatgcctaaaatatctttgatacccatttgcatttcttcaattgtgttcttactgaaaaaaaaatagacattttaagcttgttaactttctgtcctgaccaagaacaaaacttcaaacaatttcaaaagttacgggcttcttcaatattagctctacatacaagaataaggtcattcgcaaggaaaaagtgggatagtcttggcccacacctactcaactagattccgttgattctattgtttggataagagtgttgttgagtaagtattgtataagggatatttatggtaggcatctctcccttcctcgaactcagtggtggaaaaagaattttgggaaactaaaatttttatcaaacataattctgtgaggattgtaactaaacattctagggtggatctttggaacactcattggctctgtgcaaaacttttgttatcaatgaggcaacttttaatccattagtgacttcgaaggttatggtgagtgaccttttagatcattatagtgttggatgggtaaaagaataggtgctttaagtgtttatgccactcattgttgataaagtaatgtgaagcttgatctctaatctttctgttgttgacgtacttatggggaaatagttgaatgatggaattttctcattgaaattagcttactaaacacttaatcaagcaaaatttaaggaagtggatccttgtgtcttaacctgtggaaatataatcttcacgatcgtcttaaactgttgtcttggaaggattataaggacatccttcccatagagtctagactacaatgcatctctgattctctggtagaacactagggtcatgtgcattttgtaaggtggatggtgaggataccattctccatttatttttcagttgtctaaacattaaacacatgtggttcatcaataaatgaatttttataatggacaatgttatccacatttttaggaacatgacacgtgtaagatacaacatctcaaatcctttttattggcccattcacaaggcctagatgagccaatgacccagtccaagaacaaaacaagactggggtttggattcaaccaagactctattacgggtaaagccagacaaataaattcagaaggttaatacttaaccaatttctcgagcatctagcaaagcatagacgaatacccttaggggtatcccagatgagtagtcgaaggggtgtcgcacaacatcgaccaatctgacttagcacatttttgcactaaatcccaaagaattaggggtatgtctcctgtgttatgccttggaaaggcacacaataaaaatcagaccacctttgtccaacactcactactttaacattctttatgcacgatcaacgtcgcacacccccacctatcaccgtcaagtggtacggtcccatacagacaatggatatcttccaaattgggcctcacctacccaactcaaagt

SEQ ID NO: 227875 - DNA, 3915 bp, Cannabis indica
cgggtgtctactgtgcaggaaagcgtaaatctatctcaaatcagccatgagtgcgagagctaagcgatgtatgtacatctctgggccacactagaccaagcgggttggggtctaccagtgatgtacttttgaaactctgattttgccgcctaggaaggtgagagcctcctggatcatatagtatcatgtttaaacaaaaagtagccttgatgacgtggatattaatgtttgacatgtttgacatataaataaagcccatcaatgggcccaaaatgacaaggattgggctaagcctaatttttttaccttccaagaaggcaatcgtgttacttgtccaagtgagtctctaccaagcataacttgcatccagaggacttctagcttcgcatagccggaaggggtgaccaacttgttcctagaagtaaattatagtttccctttttccaatccatgcataatcaggaaattactttccataaatctcagacagagaataatatcaagcttaaaagggaaaccacataattaaagaacaaataattaatacatattttattacccacaatcaaaagacacggtatgaatagctatcatcgtgatcaacctgtgaagtcagcatacagtcgttgtccaatgggttaggcttcttacgataagtccaacgtaccatattatatgtaaataccgcattagagggaaaaggataattaggtataacctctagtactctataaatatacaacaaatccttcttgcaaagggttgaaaattcttaactctcaagtttgagaagaaagtagagaaaatatactcattgtaatcgttttggattttcttgtccaacatataataaaactgactcgtggactaaggctctttaatgccccaataacataaaaatcctgagtgttctctgcttgtttatttcttttgaccgtttttccttagttcttatattaaataatttgttttctaaaaatctcgataaacattaccaaatacccttaggccttcttgaccatgactcctaggtgggtgttacacatgtgagaactctccacttatctaaagattcgtggggcggcaatttttaactcattaaagaaataatcaaagttatctcaagaccaacacataagctttaccttgtgcttgagagcgttgtaaggtatgtgagctataattgattaattttaatgaagtactaaaaaaaaaatatgtttagaattcttattcatcaaattaaatacaattacattactatgagcttagttagaagaaaatgaagaaatagttacagattttattgttcctccaagcttggctaaagggatccccactacactaattccttgtttgacttatagtaaaggggccataccttagtgatggacctcttaactcagagacaatttcgtcgcatccccttggtttaagaagcgatcaattcacttgtataagatgaagtgaatctcactgtgaagctgaagataattgcttttattggtagtacgatcgtagatacaccctattctagtaccttggtactggtactggattcaagttgtagtcatagcatgccaacttgtatgtctcaggttctagggcttcagtaaggacatatggtccttccaaattaggcccaagtaatcctgttgatgcatcttttgtgttcaagaatactcatcgtaacaccatatatccaggcttaaatttcctatctttaaccttagagttataatgttttgtgactctttgctaatacaccgccttttgaagcttatacctttctttgatttcttcaattccatctaaagactcggccaaaaattgatggttggttagctggtcatatgttagcctttgatgtgatggtggtgtgagctctacatgtatcatggctttctacccttaggttagagcaaaaggagtgtgacatgttgctattttttctatagtgtgataagtccactaatcacattctcgagcatacctacaactagcgcaggctagagattcgtatgtcccctagctggggctttaggttgtacatatcactgaagagcatcatgtttctatttgatgataaattctatctcatctcgcaactcattacattcattagtatcattaccgtaactattgtgatagtgatagaattttttcatgtttcttttccctaactctttgaagggaaaatgtttgcaatacgacactatggattgtgttgtcatatacatctcctctcttggggccaataggatggagtaggttgtgtaacgaggctcgtactcttgtaagggcctacccccagtttaggctttctttccactaggggagttgtgttgttttccaccattgttggatcttttccctccatttgaacctcctttcttcccactaccatgtacttcaatgtcaggggatagggagtctggtgacttcttcttgccaccttttgagccctttgatttagtgacagcttcttctagcttgataaatccatctgctctatcaaggaagtcattcatggtgtaaacaaccttgagacgatggttgaaccatagaggacttatctccttgagcctggctgtgatcgccattacccttgcatcctagctaagcctcttagtcatagtggctacctcaaagaactgttgaatgtagtccttgagggtcttatcttctgattgtttgatgtctaccaaatcattgggcatgatttggcattgccgggaaggagcacattggttgccaaaagcatccactagatctttccatgagtcgattgatctaacagggagcttaaggtaccatcactaagctaggcccgtcattgtggtatggtagattttgcacctaatatcgtctctcactccttgtagatcagtttgcacttcaaagtaatgggtgtgagacactggatcttccttcttgatatattgatgttaggaaggattcttgaactttggagagattaatagagctttgatttgatcaaagaagggtgagcatcgctctctgtcaagtatgaattctaaaagcttaggggtcatgattcatatcaataaggctgctaggttgtctaactctaccctattaacagtgtggatggttgtctgcatcctaattggaacttctgttacccagtcatggtctcctctaaaagcccctgcttccaccaatcatttttttggtcaaggtgtcacgcaggtctcttggtcttccaagtagatcatggactccagtcgacttgggtcttgttgttgtctcctaatcatagggtcatgaaggcaatattggtgatgattttgaaatgaactctcgatggttttgagatgatgcatggcatgagcggtcatttggatagttgtagtggctacttgcctcaaagtagcttcatctggatcacaagtatagagagaattgaattggttggttaggtttaactcctctccatgtactcgagggaagtattcatactgttggccatcggagccatgggcaaagtaatgacacaactaaccctttcatctcaaaagtatttttgagtatgaagtggctcattggttcttactcgccagatctcatagcctctagtttcaaagtagggtctttgattacctccattgtcttgaggggcaagtccctttcccttggcatggtatcaaggcctggtgtcatgagagtgttgaagaggacttggtggaggagtcatgtttgctctctcagtattctaaggtagctccacatcaggtggaaggctcattggttggtacccatgagtttgagtcttttcagactcttgctcaaagtttgcatccctctgggcagcctcagcacctggtgttttcttagtgctttcacggttaccaggtgtggtagtagcatcccgtgcattaagggtttcccctt

SEQ ID NO: 227876 - DNA, 3049 bp, Cannabis indica
acaaaagaaactaacaaaattcttaagtactgatgaaacttaaaaagagaaaaagaattaagtacgtaggtatatatatatagggtctcgagatggagcttcacatgagatgaaaatcccatgaccttcggaccactacgtacgtggagaattatcatattgatcattgttacttacacattatatgtatatatatatatataaacaaatatatagtttcttaattaactgaaaaattccctttttattatttatttcttcaattttggaggagggagcaaccacttggaagcctggacgtagccgagtgtaataaaaggtttaacttcttcatcggttaagtgtttcacatatttctctcttttagttgccattgacccttctccaaaacttttgtattctccataataaactttactgcattattcattatcatatataaacaataaatcagtataacgccactcgttgatattgatgcaattcatttatagtaacgagaccatataattaaattatgtcatgttagtttgtgagaccctaaaataaaaatcctacatatatttggtgaattaattaaggattatatatatacttacccgacatcatcagcgtcgacgctccaaccaccagggtggacaactttggtcatttcagtataggcataaatgactcgaggcatgtcaccccaaggcctgcctaaataggtagttcctttgccgagcccacgaataacaccatgcacgaatgaatatccagtgttctctgatgaagagttccttccatttgctgttaccactgttagccctttgtcacccagcacaaatacttgtgcgttctgcatataatacattaactactattatgtattgttgttgttataattacatattaattaatgaaataaattattacataccaaatacatagatgttcctctgccgaagataaaatcaacagtaccctcaatataacagttcttaaagaagtgaacgcccatgtcatcacaaagcgtgtcttgaaacccaatgaatctacagtcatagaatgctcctttatttccagcaattctcaatgccacagcttgaccatcattcttgtatggatctggcctcggagcagaattctacacatattatttaaacaaatcaattagaataaatgcatattttaataaaaaatataaaaatattaattagtaccttgataacgagattcacaccaatgaaatagtcggacaagacaatgacggttgcactatacactgtgccgagcttcttagccgtatcaccgaaggtaataatgggtttgtctgtgacagaagaaccaaccaaagcaacaaagtgttgtttgaaatcgatcttcaccttctccttgtactcacctggtccaatatcgatgatcacccgttgcgtgttgtcttccggtaccgttttgacggcatcattaatggttttgaaatctccactgccgtcttttctaactgtaacggtcctaggtgtttcttctgccttaaccagagctgggtccaactcctttgatctttctttaaaaggccttatgttttcgttaaaccatttgtttacctctgtcttgatttccgggaccggcgtatcgtcagccgccaatactacggtggcggccgcgatgagtagcgatattgataagagtaaggtaacgggtttttgataaggtggaaagagccattttttttttctagtttaattacttattagttactcataatagtttttatttgtttgtgttgattttgaattaacgttaaatgcatattccttatataggtaagaaagttggattattgttttgttttcagaaataatgccagagactaggagaggttttcgctttgtttttgtttggtttgtagtttagattattttttactggtggttgaaaaattcctaccatttttctctttctaaaaaaagaaattataattctttcttacccatattacaagttctaattatggggtcttcctcatcagctttagatggaagatagaactgggaaataacacatgattcgtacctgagacagaaatggtatatgattttattgtgtgtagaaaaaaattgagactgagagttgatgagtaaaagaaaaaaaaagattgtttaataaaataaaataataatagtaaagaagcaaaatagtaagtatagctctgaataaaacgaaaaacatgaatagtagcagcacaaaatctgaaatgaagatatacttgtgtttaggtgtgaatgcctaaaggtaaaagtaactgccatttaatttttttacgaagatagggttcacctcaaagaggcacaataagctacctctatataaatatattcacccaagctattagctaggaacagacagagagaaggaaaaagaaaaagaaggcatctaatcccatcaagcttgttttatcaatcttgaaagaaattatccttgctttctctttctctacacaggctgcttgtaagcgtcaaagcataacaacatgcttgtataaaaactccattgaatccttcacctcaaattcttcagaaagataaacttcaaacaagcgtgtttatatgcacgctctttgtttattttatctttttctttcttcttcatcttatttttctctacacaagcaaagtttgcatcaatactgcttctatttactaaaatatctatttacacacagctgagactattgttaagaataatttcttgaaacctgtagaactctattttattgataaaacctaatcataacttaaatgctaccgtaacgtagacaaatgatattaggtcgaactgcataaatttgtttgttacatattctatatatatatatatttaatttatatgggtatctagcaatgtatacacattgttttgctaataattcatatatatattatgctataattacgtttatttatataatttatattaagtttataattgttgggttttgtgccctaaataaaatccatgccatttcaatataatcagatttactaattaataaagatcagaaatcatt

SEQ ID NO: 227877 - DNA, 1675 bp, Cannabis indica
taaagacaagaaaaatgttacaaaattcatctctatcgactcactcttgactttcgattttttctcttactctctccctcaatctcaactggttgtgggtttcggtcttgtatggtactcttcccctctgttggattgggatgaccttcgttgcaagtggtcgatggactacattgcatggttggcccttgggtttggaggatgagttatgatggtctataacagtgggtgggtggtgtgtaggtgcgttgtagtcagtggtgtactgctcgacagaggtcgtggcccgtgggtacctatttgctgttgcttacaatgatggtgtggttatggcgatccaatgccttttttcctcgagggggtattggatcactagcccttgcagggtagtgcactctcgtgtctcttttatgggtgagttctgtatttggaagattacgatttttttttttgtatgttgttcaggatatgttattgtttttcttattaacattttctttttgttgtaatattagtgttttgtaactttagctttagatcattttgtgaggtttttctctttgtatcctttcatgttgtgatttggtttactagctcgtctttataattagcgcgaattgctattgtttagttatcttcttaagtaatttgtatggttttattttcgctttatttgttgaactttattcctttaatccatttgaatgattaaagaaaaacaagaaaatttatgtttaatatggttcttctaaagtacataatttacttaggaacttcaaatacttagcaacattgtgattaatatcttatcatgacaaaacaaaatgaatatccaattatggttaagactaaagaggaatctcactttaagaagttgactccaacaaatctctttagaatattaacttctttttacatcttctaatttgaaaaataacacacataaaaagaaagagagaaagaaagaattgtcttgcttgagatgcaatattcttgacccttttgttaaaattttgactagcttttttctttttatttgataaatttataaacaacacaatacaaaaatgtcccttcgctagtcatgtatgtagatatgatatgttgctttattatcaaatataaataattaattaaaaatataaaagataaattccttacttgtaaactaggacacctatggtcccatcccttcttataggttattacttgtgttctacccctaaatctctatttaatcaataattagtggtccctattatacatattgtaattaataataatattggtaatttggtttatttttattgaaaaatgttcttattataaattaaccatttcagggtttgagtacacaaaaagctttcattaattacaaaccaattctttcaaaatctacttaccaacatccattacaaattttcaaccaatataactactattactactactactagtaagttggtattattattattatattataaagttgggttaagcttaaattaatggttttgtgtatttttgtgtacagtatttactaccactactacactccatccacaacacagtcaactatgttagatggttaaatagtatttaattggactaaagtttcaatctttactattttacactctttttttataggaaaaatacaatttttttttaaaat

SEQ ID NO: 227878 - DNA, 2126 bp, Cannabis indica
tgggagccagattgaaagatgatctctaagcacaacaaccatattatatctctattgtcaaagtcaatagttgaagttcaaaaagatatatatctttgtcaataaatgtctacaaagtataatgcctctcacttgtgctaagaaaataaaacattctatgatatattataatatgtcccaaaaaaatttcaagtttctgatataatcattaaaacactcacaatacaaaggttcaatgaagcaatactaccacaactcacttcgagggaaagtgttgaagagcccttccaccaagaacatatcattttcagttgtcactacaaataaaaacaagtaataattgtatcgctattaatgagcaaaatcaaaatatatctactaattctttcgaaattcaaaactacgtctaggaacacgtgacaataaaataaagaaaaaataaatacttactgaatggggataacctgcttcagacaaaaagacaaaatattagacaacaactcgaccaaatataagaatcaacagcaaaacataactgtcactacaatttatttatcaatattctactctgcattgccttgcaatagagagggatccacagtaagaggaattgaacataaattacacaatatatatactataacatctcacctgaaagaaacatgatatgttgcctatctccttgagtatactacttgtaaatttgttccacatgaaatccttgagataaaattgaaagccaaatcatcatatggtactttgtaatacttacagaacaccatccaattactaaaataagattttaaaaaccaatttaacgagtatcctcgatggtttaaaaccgtcagaaatacattaccccaactgtttaaaaccgtcgaaaaattcactttttgtagcagtgatgacctctgtttagtgattaactatggacaagagctccaaataaaaatttcaagcacaaacatggtacaaagagagaataatcttttatttactgcaagtattagaaaataaatcggcacggaacattaaaacaccggtgacaaatcaaatagttgagacacaaatatgtcccaatgtttgtcccctgaagaaaataaatacatcaagatcatatatatatatatataatagataatataaagatatagtaaagatttttggtataaattatatataaaaaaatactacacttttgactaatatcacaagtcacctggatggccagctagacacccaatgctagctagaagttctaaattgtgccagattaaacccaattcgtacaacaaaaacttctatagaaattatcctaaacacaaaaaaaattaatattggattcatgaccataaaacctagaataaaaaataatatcataaacacaaaaagttcttaaatcagaatcacatatattattcctatatatttaagaaaaactatttatattatatatcttcatataatataagcaacttctaacttctaacacaactttatctaaaaatttagtttaattataagcattttaatctaacaaattcaacacattctgaaagcctctcaatgaacagataaacttattcataatggcaacccataacaaggtaaatcaaatgaaccaatagcagtaataggtcaccataagagaggattcacaccacctgtaaaaatcacatacttctactgcttgacttggcttctttgtcaccagatcatccgtttcctttgtatccaaatggggtgaaacttttggagaagttaaagactcaatttttggccgagcaacacactttcctccagcaactatatcagataacacaagaacatattcacaagcaaaaataaattcctaaaatctgatttaaaggtttaagaattctagtgcatggaatgaaacaaataactcacagtccacatatatgttctttatttccttcatctcataatcaggagaccgagatcgcaaacttgaagtccttactatggtcgacgctctctatgagctctcatgatggcaaacttgaagtccttacgggttcgatcgtgatttttattgctgagtttggtcgtgattttcttgaattgagatattttaaaaccaaatttcagcgacatcaaacaaa

SEQ ID NO: 227879 - DNA, 1915 bp, Cannabis indica
gaacttgttcgatatttattcgaatttatttttcgaattaaatataaggttggatggttttttgcaagtaaattgatagttgagggagttttgccgcaaattactcttaaattttttgtttttattttaatttttattttgtaaaatatggccacgtaggataattttttattgacctgtcattgccacgtgggcaaaattaagacttaacgaggctgaatagacgacaccttaaaaatgtaaacgaaacagtactttggagggttttcccaccaaaatatgaggttggatggttttttgcaagtaaattgatagttgagggggttttgccgcaaattactcttattttaattttaaactgaagatggtggtagtgggagtcagtagaatcatttgggaagattacaaattgatcagaattgatatattttgcattaaaaaaaccgagcaaattaatgtgtcgtctgattcttaaatcgtttgacaaaaaacactaaaataaaattagataaaaaaaccttaagaacacttcttcaatttcatccatcaatcagattataaaacagtttgaactgttgcactaggttcatttaaccttgtagcttgagaactcaactattgagcaaggtacgtaattggacgactaataaccccttcaactgcaaataacttgttatttctaactgacaacgatttgatggagagtcatcaaagaataaagaagataaactaacaacgaaacaaaataaaacaaatgttacagagacacaacaaatactcaaaactatatcacagaggcaagactaattgcagtagtaaaagtctaatcgccataacctaattgcagtaacaaaatcacaaaccccaaccaagccacaccttagcccaaggagggtctgagaaaaaagacaactatcgattgctaagaatttcggaaccaaaaaatcctaatatattggtgttattagaaaatagaaatcacattattctgaatattaattattgaacaaacacacactggtgattggcagaagaaatgtgtagctttggagtggtgctacttgagattatttgttgcagaagaaatgtggatatggatgaagattgtttcactcaaaaattgtagcgttggggtattaacccaagtcccacatcggaagaataacctcaacatttaaactaactctaactttgggttttgattagaagcaaatgtaatcacataaaagtacatggagtctagcttggattggaggtgatctaattccatggagttgacatcttgaaaatgtaccacattaaggtatgataccatcaaatgctgcttgaactttcagagattataatttcatttcctttgtgatgactactttattaacttctgtttatttattgtatttgcattgcacaccaagtgtttgatagatactttctcttatattttctcaatatttcatactctagaccgattgcataacaaagttgttttcaattatttatggataatacaaaaataaaattgaaactaacacacaatttgacttgacaacatgaactattgcataaaattttgaatctatattgagctgataaatgaggatgggtctggaggaactgagactccaatagtaccttcaagcatgagaataactttcttcaatgtgggtcgtaagtgatggagtcctcttggatacaccactaatgcaaccattacatattcctccacctttttcatgtcttgtgatgcttcatcatcattctcaacaagaaaatgaagattcccacctgcatagcaatcatatgcccagtcacccaatatcgtttgggcatcatcctctacatgttcttcaacattctttctgcagcaaatgatctctaacaacaaaatcccgtagctgtatacatccaccttgac

SEQ ID NO: 227880 - DNA, 1503 bp, Cannabis indica
tttatatatgcatacgcataatatacatacccatctgtaattgtatgttctgttaaaatttacaaattgactgcttaagaaacaatcaaaatagctgaagatcatatatagaggggacggaaaatatacatacgcattaatataaataacgtacgccaataaattttgagttattgaagagttagttgcgagcatctatccatctatatatatatatatatattatatttatacaaggggagtagtacactagtactgtagtacatcatatatccatatataataaataaatttaatttatgacttgaataaatttagtaattgttatttactatgtggagacgtcagttaatatatatatttatcgaagagaaagagaaataattaattaggtaggaaatgataatttaatttcgtcccttattatttatagctttcataaatataacaaaatagtagttttatgtttacttgcttaagtaatacgtaattcgtttgtatctcgtaaaattatggtttgttaaagccgaaactaagtacgatcatcatttttgtggtcaacaaaaaatatgttgaatgacaaaccaagctttttcctgagtggggcgccaatgatgatgcgcccagtatatctttattattattatttattattattcttttggccattatcatcagtgaataaaaaaatgaaaaagtaaaaaagatcaattttagattatataatggggcaaaatgcaaaatgcattgttttcttacaaagtaattaactgtctgtcatactaaagttactaccatatataaaattgaatcttcagctgattatatacaaatatatatatatgggtgtatgtgtgtgcacatctgtatttaaagtatgtagtttaggttgtcatgtctctcaaaaaggtgcttgtaataattcatggaaaaaaagagaacatatattgatccattttctagtcatatttatgtgtaagtatatgatacttaacagcttgctagcaatgatcagcattacaattttaagaatatatctatatatatattatatatacaaataaatatagtgaaaattatatggaatatggaattttataaaaaaaatttataaaatatgatacttttatcattttttttttcacatttaaagtttgttatagtatttaacatgttatatttttataaacctatcatccaaacccattttatgtttttgttcgggactttaatttaccatatacaaaaaattttaatttttttttatattgtggggcagaatatttttcaaaaatgttgggtaaattttatattgtgtactgtgttaagttttcactgttgttccacggttatttttttagttgtataactgttgcttttaattgttatattttgttattttacggttattttataaaaaaaaaaaaaaagtatttttgtaaaaagttctatataacagtaaaattgtaaacttttccttaaaattcaatattttttgtaaaa

SEQ ID NO: 227881 - DNA, 3124 bp, Cannabis indica
accttcttcatattcataatcatcttcgtagaatagttcttcatcttcacgaaagaccttcaattctgtgtgctcagattctgtcgattcatcactagcactttcttctcctgattctttatcagaggctttactatccacttcttcatcctcgtcttctccatcagatatctcatcaggataatcattcagtggattattttcatctgcgaaccacaaaaagagggaatttgtaaatacaacgttttgaatgcataaaatggagaaagaaaagctattatcatagctaccatttgaatcatcgcttccatattctgaagcatcaggcccatcgcagtaatcctcctcatctacttgaaccctgaacagaagatataatttacatcaatataagcaccactttttgttaataaagaaataattttgttagttttataaacagaaacaagttacttacagaggaaaggggtgcaaagcatctacagtggccatgtctacctcattgtttatagtataaaaatcatacacatagtcctctgcatttgcaccattaaacacaatagagaaactcaacaaacagaatatattaacatagacaaaaacaaataccagtaagataaagaatggaataatacatggattactttagtcatcttgaaataatcacttaagttgattattaaactataccctaagccccaaggcagaccaagtaggaatttacaagtccaagcagacaaaacatgaaattgaaatatcaaattcaaaagtccagactgcatggacagatttgcttataacacaacaactattgacaaaaatggtcaggaaaatttttaagcaatggaagaacggcaaatgtacaagacttctgagaagtgggctgtcaaaaggtatgcctcccataagaaacttaaaaattctttccttttgcaagaggaaaacttaaatcatcatactggcacggactatggatgaactcaatccaaaatgtttttctagttagggtcagcgctcttagccatttatcttaatcttaaacaaaatgagcacagtgggagcagtagaacacataaaggcatacgaaagaggggatatgctaccaatcaacaaccttttccaactttgtaggattgtaaatctgattcaatttcttctgcagcacttgggataaactccctcagaagaggcaaataactgcacataagcttgtggtcttctaaagtttctctgtaaattattgataaatcattttccatgaagtttgcgaacacaattggaaaaactactttcataagttcaaatcttactcctgctgtcgcttctcattggctctttcctcatcatctacacggacaacatcatagaaatggcacatttcatgtaatttgccatgcataacctcttttgccccctttctgctcctccatatttgttcaaaacgagcattttttgcaacttcctaagacaatgaaagatggctagaaaatcaaatttcgacttagtaaattttagaatatgtgtatagactggcaaaggattggttcaatgaaatcatagtctaaggaggatcaataaaatatatattggtattctcttcaatattttgggaggacaatatataaaaagatttgagaagttttaaataagaaactgcaatatatatagcagccaaactctgagcaaatactgctccacttatctatcatgcacaaagtaacagcttgagtcaactcatttaatgtgataatctatcattatattcttgctggctacacaggaattccaatgaaaataggccttgttgcttctagctcttatttcaaactccacttaatgatttcatgatctaaaatagagataatcaataaataaattccacaaacaacatagaagtagaaagtttaaaacaattgtcgaattggtgagaaaacaactagtaagaaagaaaagcaacaaaattaataaagttctatttcaaagcatacaaagatcaaacagaacagatgtcattagctatcaagggaaaccaaagaatacattgaaaataagaagcgaaacaagttcataattttgaacatacctcttgtgttttcctggctttagacaaaagctgatcttgtatctataatgtaaaattggaaaccaaattcttagatacactacttaagtatctattttaatgagaaaagctagcttcttcatcttccacagtaagtgaatgaaaacaaagaagagagctcacattctccttctttaaattgtgttttcgttcctcgcccttcgttttcgatccagttgcatcagcagaatctgattcctaaagaatttaagccaatgataccttgttgtgctaaatttaaacaaatcccagaacgttgaaaaattcacaagtatatgcatatgtcataaatttacaagaatggcaattggacttggacactgaccacaaacaactgtacaatatcaatggtggcctcagtgctgctcgcagtctccagatgccgtaccaaaaccttcttactcttaaattcctctactgcaaaagaataacaacacataaaaacttgaatgttcatacaaaagtaggacattaaatcccaactccaatagaagaaagaaataccttttccagatgaaccagtgattgaaagattctcaaaatccaacagtgcgcgcttcaggggcctctcattaatctcaagccctaaattactcaaccaatttaaaatatagtatgaaaatacaagcaaacaacttgtaaattatttactaattgaaaaaaaaaactcacagaaagcatctagtggagactgaaatgctttgcgcttaaccctaacgatcacgggcttagcatccgtggtttggcacgaagaagaagagctttcgccaattttcgccattgaaattgaaccggtatgcgccagccaaccagggctgggacgtcgtcgaggtagctgctgcagcagctcacagagaactcccttactgtttattttattttatttatttatttttagactaatttgctgtttttaaaggaaagaaaatataaaaataagaataacataaaataaaatttaaaatatataaaacatttcataaaataattattaaatttttt

SEQ ID NO: 227882 - DNA, 2010 bp, Cannabis indica
gtacttctatcctttatatgtacacattgctatttatctcagtgtttttaagtgaaagaaaaaacgaacagcaattttttcttcactgttgatctttccatattatattttgtgatagtgatattctagttcatcaaaaatttgatttccatattttgtatgtggacttagaaaatgtttctctctgatcatgttttatgtatggagagaattttcactcatctttttcttctggatatcgatgtagatgaatcttcaaaaagttcactgctagtcagatatgagttgggcagtttctttccttaccagctttaactttttttaaaatttttttgagcttttagcataattgcgcaatttttgattgtcagttagcagatgtataattttcagattaatataacttcatggtgtatcaatgaccaagtataaaattgatattaatgcttacctatttatttaaatatacatgtattataatttcccaaacaagctcaaaacaaatttgagctcgtgtcttgtggctcatgtggatgccaaattccgatcgattacattctgatgatttagttgagtacatgagtgagattgtttttgaaacttagggagtttttcagaaggatgagtgggtgtgggacattcttattacgtttaatcaagtcatttgctttgttatatattcatccttgcatccttggtttctctcatttattttggaaatactaatgagacaaatgtctcgttttctttctaacactaggatcatgctgcagcctatgcatgtagtggtctctaacttgtagcagccattacggcatagtttctgagcaggtgactatatgcctacaaaatgtcaagcttttctcaaagtgtcaacaactatctagatcgtgctcggcgtggggactattaattatgtcacgagccctttgtttttggtcttcttgatctccttcaagcctaatgcactgctatcccccatagacgtcctttaagttaatattggatgtaccttccttgtaaatgtgtcatgctagcataggagtcattgagaaattacctgatcgtttttggaaaaaccttttcctgcttctcttgatgacatctagttcatcccttcaaagggacccaagggcctaaaatcaaacgggattccatatcaacctgcaatagtccttttcttcgtttattctccttttatatcttttgtcattcactttgaaattttctctcgtgtctcatgattcatagaattttcacgctgcttgcaattttccaagtatcatctctttttccattctactagtgtcgtcttatttatttattttttatctttgtttcattgttattctttcatgggtgattctgatatccttatattatctgtaagaatcaatatttttgttatgacaaattatgtctagtgttgtttagagtcttaagttgttatgactagagttttattgtatagacattgtccatgccaacttattttaggttagtttgttacagatgtcggttatttggttattacctaatttagctaggtatatatatatatatatatatcagtttcttgattctattggggcaacacttttgatcggagattgagatcacactcaatctgtcctctctattgttcgtgttcttgtaggcctgagctcgaagctttgtgaatgaagattctaaatttcggtacaagacctagaattgattagtgtgagctaaagggagttcagctatatcttcgcaagcagatatgaaggtgttcagatctagagtttcgttgaaaggatttcaacgtttaagaagcaatgggatcttgttgtgtttgccaagggagttggcatttggggtaatttcttactgtaaggaaattggcaatttgtacagaactagtatttgtaaatttgcaactcatatagtgaagttacttaccttggttcatggaacccaagcactatttgattggaatgtgtttccagtgcaggagaagcttgtaaattg

SEQ ID NO: 227883 - DNA, 1534 bp, Cannabis indica
attaaaatcaccaaatgaaaacatacttgcacacacactattgtactcagatgaagaaaatttgatcaaactatatatgtatagataggataagtctctctctctctctctataaatatatatatatatatttatatgacatagatgtatatagatatacgtaccattcgaagaaaactctgaagggggcaatggctaaagtggcaaatatttggcgataagagacaagaacaagagggttcattccagagtccaaggcaactttggacgtaatattcatccctgcatagcaaaattgcactataaccattaccaagaatggcatgcaatctcctactcttgacttcattattcccatctttattttaattaattataattatatataagtataaatagtactctttctttctctctctctctatttattatatatagagagagattagaaaagaaaatataagaacagaactaagaggccgtatagagaaagagagaactgaatttatatgatgatatgaagatatagaaatgaggagagggtgtacatatatatagacataataaatggtgaacggaaagtaataagagaaaagaaaatgttacatgaaaaaaaggagaaaaaaagattaatgggattgatgatatatattatatatatatatatatgatatgtatatttcttgtaagtaacaacacacttgtgctgctgcatgaggtagaagccaaaaccgattgccactacttacattaaagacgctgcctttcagttttgtctttggctatatacgtacctagctagctactttgtttgttcattcatatatctaaattattatcaaaccccttcaacaagctactacacatacccaattccacgtcaccctcaatactatatatatttatatatagcatttgctataagatcatcatcactaggactctgttttctcttttcactatatatatgaaatataattacttaatttcttttatataaaaaaacatatattatagttattgatcgacattattgataatttaaaatatcaaaaataacattaaaatagttattagtatgttacatgttacgaattaagattttcggttaaaaattggtgttcatgctttgttaaatcaatcaaaatttgatacattaactaatttaatttatattgaatatgttaactacttttgttgattaattaaaaaattaattgacgtgttaaattttgattaatttaacacaatatgagacactactttttaataagaaatcttgattctacattacacgtatacttattattttttaagcgcatttaatttactaatttaaattttatttttgacatatcgtaaattattatttgtgttttataattataatataatattgagtgattttacaatgcacccccttgaaaaagatgtattccagaaaaaaaatttagtctaattttttttttcatattcatgtacgttatagctatttaacatatcctacaaaattttgagaaattccgaataattt

SEQ ID NO: 227884 - DNA, 1265 bp, Cannabis indica
tttcaaatactatctatgtataatgccacattattaatttaacagtcaactttagttaattttaacagaattagatagaaggattatactattccaactgatatattttagggggtatttttaactacacttataaattaaggggcatcatagtatagtgtcataagtacagggactaaaaaagctaattattcttttatattttattattcgtttcttcctttcctatgtttgacccgaatgataaacgggtttggtttgggccattggcccatcaatgggcatgaataagacctaaccgaaaacccataattttgggaggaaaataggttgtgttttgattggtatttgaaaatttcataattgtacaaaataaatagaaaatttaattaaaaaaaagttctttaacacttggaaaataaactactctaatcttttatctgaaactaattaatctttcaacgtgatttatgtttttattttttatcgaaaaaagtagactacgtggttcaaatttcttcgattctgaaaatcatataaattttaaataatttaatctgtagaaaattttgttagttgggaccaatttaaataaaaatttggtagttattatttatcaaactactgagctccctcgatgtccgtctttctcattctctcattctcaattatgcacaatggtgccaacttcggtcatcacagaccgaaatagaggccatggatggcctccccaagtttcgagaggcccaaaaatgaggaagatttcatcgaagaaatagagggtatggatgagttcagagaaattggggatttgaattttggttttaggagattctcaagataagagtttcatatcgtagactatttgagtcgatttttatttccttctaagcattattttatgaacttatacccttttacaactgttagagtactttaaagaggaatggcgagtggaaggtggttgtggtgtgttctgatggaactctcgtggttggtgaagaacaaaagaaaacataagtaatttgcagcataaatatttaagtttaactttttgttgtaagttataattcttgaacttttgtaaatatttagttattaaatgttaagtaaattctcacgtgataattcttgattggtttaaattattaaattttttattttttaaaaaaaatagtttaaatttactaataaaaaaataatacgtgaataataacttaacatttaacttacaaaatttcagaaatataactaaagtattatta

SEQ ID NO: 227885 - DNA, 2256 bp, Cannabis indica
ggggcatgaggagatggattgcaagcgcagacgacgggttataacagatgatttcaaccatactgtctcgatgtatggtccgtgggtgcggtttggatctcgtatgaaacactgctttgaaagtatcttggctgaagaggcggcaagagagttcgaaggtttaaacttggggggtgggatcgctggcaatggccctctgaacccctttgaggataccccctattaaatattaatggcgagcgacgcgagacggtgatctttgaaccagggttggtagggactatgattcatcaagaagccattcttgcgcggatggggtcgacagaggttgatggtgaggcggtccggggagtttctctgatcgtttgccacatcgggggggataatgtggtggccaaggaaagggtcgatggaatggatgacaccttggccatgcagaaggacggtacgatgggtacagaaaatggtagtggtgaaacgttgtctaccctggaggggcccactgagattcaaattggccacctggccatggtattcaaaggtattcttaaccctaaaggcccttctgtggataaggcccaaagagtaggatccaacaagatcttcaaaagtctacagtcctctcaaggacccaaacgttatgggccctggcccaggcaagaagcaaagattggaggaactgggcccatctcccttgcttatggattgggtttctgactcgggccatcgggctccaaagactgtcaagaaaacatgtactgaacttctacttccatctattcaatcccagcctcagatttctgggtctttagctgcttctgagttgaacaggtgctctaacgacgaccatgagggagaggttatcccctcaggggaaaagacggtggatacgtgtgagaatgggttggaggatttttctgtggccgaggaggcgggccgaatcatgcccctcaatcccccatgttagtcctctcttggaactgccgaggtttggccaaacctcaggcagttaactcattgtaaaagttgattcgtagtgagaatccggatatcatttttcttatggaaataaagagaagtgatactgagatggaaggaatttggcaacgtttgggctttagagatggtgttgctcattcttcttcaggggcctcgggtgctctggctttgttctggaaagctaggtgggatgtgcgaattcttaatttgagtttcaataagatcattgctcgaattggagaagataggattttaaaccttagataggctgcttcatctatgcccctcccaaaagagctgaacgtgatcccttctgggcttcaatgacggagctggctggggattttaatgaagcttggatggctatgggagacatgaatgcggttctcagtgaagaggaaaaggtgggggaagacctgtgtgtgacttcgagggcaagggtttaaggaatttcatgtttgattgcggggcggttgacctcagtggggtgggggctctttatacttgggctaacggccaagattggaaccatctggtgcgggagaagttggatcgtgtggtgtgttctaacctgtggatctctttctttccaaaggctggaactcgtgttctccccatccgccattcggatcatgctgctgtggtcttgaacacggttcttgacgcagcgcctttcaaggctccgtttcggtatattgatgcttggaatagggatgagggctgtagcaaagttattcgtgaagcctggcaacaggtggtttcagggtaccacagttttatcctatggactaaactttgcccgacggctaacgctgtaaccaaatggaataaataatgtttcggcttttgtagagctaaattggagttattagagaaactgctcatggatgtccaaaatcgtgccccatctaaggataatttacagctcgagagtgctttgatgttagaaatcgacgaggtggaaacccgtcaagatgaaatttggagacaaaaggccaaggagctttggcttaaagaaggtgaccagaactcccgtttctttcatgcattccttgtcgttcgaaggaaaagaaacttcatctgggctgtttccgaggatggggttcattggatcgataacagagagatggtggtaaacgattttagagataaattcattgattccttctcctcttctaatccggtgcttggggaggatctcttttctctggtttcccagtgtataactcgggaagagaatgcctcccttggatctat

SEQ ID NO: 227886 - DNA, 1201 bp, Cannabis indica
aagtagtaattttttgtagtgtacatttggtatacatgtatttgttcttcaacccagtgatggtggtgtagtaaagtagtagtacggtgttttccttcatcggccgtgaaaagattcaatctacttttccatcaaataattttagtaagctgttgtcgagttgagaattttctatcgaataataaattcatatactaataaaaatgtagtatagccctctcaaaaaaaaaaaagaaaaatgtagtatagccatttaagttttcacaacttcaaaagcgcaacaaggaatagtgtatagtacccatacttatctttaatttagacagcatttcatgttggaatgaaactatttcctaatttatgttacctatacgtaacctaacaatataatccctactacctagttagctcataattcctttttaagtatactatatagaataagcacatgatatcatattttgtttagtgattttcattagtgtagtctaagtgcatttaataaagttctgacaataataataatgtcatttaattatcggaaaacctgtgtttgttctttcgcctcaatgttagcttaaggattgatacagttcaatttgatcgcaggagatcattctcattaataaatacactttaattattattattattattatttttctttaaaaaaaaaaaggtaaagagagttttcaattaggtgcatagtttacctacgatttcatataaactgattatagcaaatgaataataacatataatttttcttagatgtctaaaataatcacgagaacgtgagaggctatcttaaattcagtttttttttagtaaattttcaaaagtagatatgtacttttttatttacatacaaatttgaataataaaacaaacatacaagattaagtttagacagaaacacacaaatagcaataataataacaccaaatatatctggtgagaaataaactttggaaaataatttgtcacactttggaaaataatttttttattttatatttttataaaaattcacataacaactctcataacaattaacagaacaacttaaatatcaaaataattcaaactataaaaataaaaaaaataatatataaaataatttttctaattttattcatatttgttggagcttgatagggtgacaattcgtgtttgtgggttgtgttcgtgtcgtgtcgag

SEQ ID NO: 227887 - DNA, 3562 bp, Cannabis indica
agctaaaatagatgaagtacacaagaacttagtattttatggatttccaataatctcttattaatataacttttgtctaatatataaacataaaaagtttcacatttatgttttttttttggaacaaacaaaaaggcgttcaataattaatttgaggagtggagggaaggagtgtggggggttggggataaactttatgttaattgaagattggcttgtgcttactgcaaatatgacttttggaattccttttgtagggagaagatataattgctgtgttaccatgggatgagtggtgggattttgagctgaacaaggatgactccaatcctcagattgcactgcttcccttgcatcctgatattcgtgcaaagtttaacgagacagctgcttgggagtatgcaaggagcatggatggaaaaccatatggatatcataatatgatatttagctggatagatactatagagggaaattatccacctcccttggatgcccatttggtaaatcatctaccctttaagagttaatactggattttgaatttaacatgattccaaatgtgttgtgttttagccttatcaattcatttctaccttaatattggtttaatattgctatggtcccagctcaacaccacatgatgtgggtatggtgattggtgcaatttaataaaaacttcacatattttattttgaattcgaacattttgtaccaatcatcatatgttgcaatatccaaattggttttcttacaccgaaacatttcaaatttgcgtttaattcttgcatggttcttttctatctacattgtaatttacataatgattcaaagtatcatgcttagaaagggtattgacttaatttttttactttgttaccgtctcgcccaaacatataaacaccaacatcgttccagcaatcattaaattgttcttcactccttctctcgtgtttgtttcaacttcaagttcgtgattcaatgttatagaattcttgattagtaagttttaattgtcgaatctgttgttctgtaggttgcatctgttatgacagtttggaaccaaatgcagcctgcatatgctgctaacttgtggaatgaagccttgaacaagcgccttggaactcaggtcctgtaacagtctccattccctttactcttatgagttttaatttgtagaagaaccaattgtggattcctaggctaaccatttcattgtttttctgtacaacatatttattatgctcaaatattataaatgaaaataataaattatttttgggattcctgggtaccagggaacataagcgcattatgaacattatgtttgttttaagatttcacatttcctgctcaagttgagagacaaaactagataaatatgaatgataatattctattatttccccatatcgttggtggaatttgtaatttgtttgtattggagtggagacatgatatcaaatttctattgcgtgcagggccttgatcttcctaacattcttgtagaaactgaaaagcgtggatcctcttttgatgagttgttgacaattccagagcaagatgattggttgtatagtgatgggaagtcaacatcttgtgttgctttcattcttgaaatgtataaggaggctggactttttgatccaatttctagctctatagaagtcactgaatttacagtaagtccatcctggatagtttaatgtaaacgtactattcatcaccataacttagcagaatgtaaaaggagaaatttctttaaaatttgctgtatataaatattttagttttctcaaatatgatagatgataagcagaactcatgaacagtcttctataataaataatcaaccttttaggagagaacaaaattacagagaaatagaattgatggatgtgcattgtagatgtgatatttttggttatgtagaactttctttcttgaagggtttttctgagtttccgtttttactaatgtattgctgattgtgcagataaaagatgcttacattcttaagttctttgaggatgatcctaaccgcttgccaaagtggtgcaatgatggggacacggtaaaacttccattttgtcagattcggggaaagtatcggatggaattacctggctataatacactggaaccatacccacacatgaatgaaaggtgcccttcccttccccccaaatactctagatcccagaactgctagaagaagttttacggcttcacattgttacacccttaagatgttataccgatatcttactagttatgttatgtaaattctccatggattctgtgccacgcaagttagaagatgcaagtgcaagcttttacttatctcccttgtaaatataacttaagatagtacaaacattagaattgtaattcttgtacaagttatggtagacagctttagaaatattgtacagacatgattagttaatgaattaaaatgttcttttggaatttggaactgaaatgtccttgtttttggtcattatgaaattgagctcttttgattcttgaaaacaaagtatatataccatgttagtagcaaaagatcaactagaatgatacatgttacagtggtttcttttgattgatttgaagtggtaacccttgagctggtactggcatgggatctctgctgaaagtgctgtctgcacatagcttccaagtgaaccttgtgaccagataatggattgtgataagcgtttctatccttgcaaattcaattcctggacacattcgaggtcctcctccaaaacccacaaatgagcaaggtggaactgaagcttgattttcaaatctgttgggatcaaactttgttggctctgggtatatgttattgtccatatgagtcattggtgaagcccagaatatctgaagagttggagtcacagcttttggtgttagtactagtatgaaagatgttaagagagttgagaagaaaagactgagattttgacttacttgccaccctttaggaatgaggtatccaccatactctatatcctttagcgcttttctgaaactaccaaagataggaggaatcatcctcagagtttccattgcaactctccatgtgtacttcatcttggaaaggtcttcccatgtgagaaacatccctgcttccttggttcttgctatattttcttgttctgaaaccataaactaacaaccatcagccagaacttaatatgatgacaaagtttaaaaacaacctttctgactcaagctgctacagtagagaaccttatgcttattggaaaggaaactcacatgttaatcgccacaaattgtgacatatggaggacattggggccacttggattttccaaagaggacataggaggtatgtggggtggcaatttggatattcaaaatgaggaattcaaagaattctcttgttttgtgctttgaacaattagtctttcagatatcaaatgagagagagtttgtttaccttgaagaacactttcgtaaacagcaggctcgttggatagaaactgcaacataaaagtaataagaatagatgaagtgtcatgtcctgctg

SEQ ID NO: 227888 - DNA, 4511 bp, Cannabis indica
tttaaaaaattaaagttattttactaagaaaacaattggtacccttttgggaattcaaatcacacacacatccttacactttttcaaacatgcatgagttgttcaatagtgttagtatatgaattgcacaatgaaaatttagaaaataagaagaagaaaacgagtaagtaagtagaggggtgtttggcagacaagattcttattaatgctgaccacttttgttgtcttgtttggtcaaagaccaactatatctgcaacctatttggaccatgaaataaatttatttttgtcatatgacattacccaaataacatgtgtgctcaattggtgtttcaccagctaagctttacaacatttttagtcataaaatacatttttcccaattaaatatgtatatcctttttctcactttctgtgcaagtataaatggttttaatatttaataataacaataaagtctcttaaatcttaataatatgtattagtatatttgagttgtttgcttcatatcttcagaagcggaagttatgggccagttcaaagagacttttacacgggtcagatcttagttttaagttgctaattggtcatgagaaagtgagttcagaagaaataccaaatggaaaatggaaagtttaaaatagcacataaactaatgtctgatgaatcagaaatatgggatggaagttttgaaaacatgcatggaaaattctgatatttttgaaactattgaatggattacatttttgaaaagcatctcagtagtacaaaagtaacttgtgcaaattgcttcctagttttttaaatcatttctaaaactaccatattttctcactcatatgcaaaaatggcatttatgtatactcttttttttatatatatatatttaaaagaaatactcttccatttttttttcctttgaaatcacatttatttatacttgtgacaaaattaaatacagtgtatttgtatattttcatgattttgttttgttttaatgaaaaaggacataagaatttgagcttcttcggaaatgaaacgtgtttccttttctgacttttttgtcataggcctggttgtataaaaccatataagaccaacctctcaactagttataggcataagcccaataagaacccaataagaccttggtgggcccaaagccgtttaaaagggatttattcatgggatattttcataaatatctaaaaatgaccaaaagtttataagaaatacagatttacatttttttcagcatttttacaaatttaaactttttacttaataaaataaaaatggttgttttatattattttcgaaaaaaaacgttatttttacattgttgcagtgtgaaaacaatattgttttctataaaaatgaaactaaaataatccacaatttgttttttttttttgagaaaatgtgaaaagaaaaaggtgtgattttaggtactttgtgtaatattttttcatcaataccctgttaacctggaaattgatcttggtgatgtggacatcaatgtttgacacgtggtaagaaagaaaacaccccaaatttgagtagtcatgagtcatagcagtcgacctgagaagggtccctagccctgtgcccaggttgacattggggactccagaatatgtgtttaaattctgccaagttatttccaactcactatctttcagcatcctataccatgaagacatgaagaatccaagttcgaggcccgagagctaaaaatacatgaaatagcatcttggaagtcaacttgggtgcctagagttttaccaagtgcccaggttgatattccaactaaggtttcagtttctaggatcgtcttagcgcaaataggtcaaactttgtactgggacatgaattataaatgtcacaaacatatttgaggcatcaaaatcagatttagagcactttcacttttgagcacccagagcaccaggtgccccaaacacccaacccctaggttgacatctagggcactttcaatcatcatacttaataactatccagagaattttcttcgccttcatccaaaacgaggaaacatatgccttgatggagaattagatcaatctagaggctagaatggggagctagtgcccagattgacacttggtacggggctcaatacccaagttgatattttgtcaacctaggccatttctaaggagttttttttaagaagtattccgagcatattctccatttttttcaaagattaagatactagtaattctaggaatcaaacacagccatttggtggccagaaactggaccacacacctaggttaacacttggtgctaggcccaacgcccaggttgacaatatgtcaacttgggctatttccaatcattattctaaaaatttgttctgataatttttttcttcaaaaaaaaaaaaataaataagaaagattcaagtaaactcagagagaaaatgagaatcctggagggccaagaactgcgcccagtgctcaagttgacaattaaccttgaatgcaaattctactccaagcattctctccaacatggtcaaaatggggtaggagatctcttccttgattttgaagaccttggaagcatcaaaataacatcttagaagctctaaaatgggtacctagtgcccaggttaacgtacgacctagtgcgttgggtacttcttattcgattttgatttcatcttgagcgtttgtatactttctcatagtaaataagagctatgaactcaggtaagtcaatttcataacttcataatttcactttttcggcaaagtgacttagtcgcaaatcgggtagttttgagcctcctgatttcacgaaatagcaacatctttaaaaacagacgagcgtcttcaccataaaaaagaaattgactaactgatgtcaaaatatcacttaggcatatatgtcaacctggcgtaggtattagagcggtcttccgtaaaatagccataactcaataattattcaattgacacagttcaacttgcgtttcaatgctatttaaatgttctataaacttatgtctcacactcctatcgcaattctaaagagataaaatccaaatttttacatcaagagtgttacaaattttaactacaacttatatgaaaaaagaccccacgaatgcgatttaagctccagaaattgacaaccgagctctggagttaatttcaccgtagaccatcatcaacggtaaaaggtagcttaaacatattttttcatatttttttaatattttattatttcaataggacctcattctctagaaaaagagagctcctctagctcatttttcacatttagaaaagtacccataagttcagagcatctctctctagaaattagagatttcagacttagctattttcttataatcattctcgtgagaattataactcaaagtagatgtagctctaatactatcgcgacacagtgagtgaactgctataaattcttgtgtgtgctctctttttgacttagttacttctaactttcatctcgtctacacatatgagcgagttggccagattttagcgtcaatatttttgtgctttcattgatagccacaactcaagaaatcacttacaagatggtttcaacataatcaactagtgtggaaagaagtactacaattggccaacagactaggggctcgtcagttacaaggactggtgatgggacaacatctgcatcttagatgccaggtggatgcctcgaaacaagctccacaacttgtcccctaaggccaccaactgacactagtactgagcctaatgaactaattccacttggggaaccacgcgtggaactataagacctcgaggaggccgatcctcaggtggaatatcttagccaaacagtggctggtctgcaagaacaactgcgagattttgtcaaaaaataacatgaataatttcaaagttggttcatagagcatttggggaacgttaagaattggcatgttgagcaagaacaacaaagagctaagttttctcaacagatcagagagtttgaaatgagcatggtaggtgaactcacctattttctaggtctccaagtgaaacaatctgatgagggtacttttgtctctcaatataagtatgcaaagaacttggtgaaaaagtttggtcttaaaaatgcaaaacatagcagtactcatatgaccataacattgaaactatctaaagatgaacaaggagtaaaggtagatcaaactttgtaccaaagtatgatcagtagtttgctctatctcactgctagttgtcctgatatttgttatagtattggtgtttgtgcatgatattaggaaaattctatgtaatctcatcttcctgctgtaaaaagaatcatttgctatgtaaatagcactgttgattttgggatttagttttctaaagacattaattctaatttggtttattttagtgatgttgattgggtaggtcatgcagatgataggaaaagcaccagtggttgatgtttctatcttggaaaca

SEQ ID NO: 227889 - DNA, 2270 bp, Cannabis indica
tatatatatatataatcatcacctcttacttcatcaaattagtagggacgaacaaaagtaatatggaatggaatcaaagtaattaaaccgccaaaaaagtatccaaattgttttgtatatatttcagtcaattcccaaattccaaaattaataagttttataaattgaagcatttgatcagttctcttaattaaattgtgttccttgtttgttctcggtgttcggttgtttcaaattaaactagttattaattacatatggtccatggatctgaaaaaataaatatatatcttgtcttgtggagaaaaaaatgaaaatgtgttaccaaaaagatcttattaattagctgtttgtgtgtttggacccccaccaattatatatgtgtgtcatgtggatgtggctcatatggtttacacctacaatattttaactttgtaggccaatctcatttaaaatactcaactactactaacagtactgtacttctgtgtagagacatagataatattattgcacatgcattttatgaaaatggcactaagtaagtcccatctaatttaggttagtatttatctatatattttaggataaattaattataatcttcattataatttttctattgggctagcttttgcatatatcctagattatatatatatagttggatggtaaccgaccaccattgtattggcgatcgaagatcaatattaatatagttgcaaactgacaagaaaagtcaaaggtaaatagttgactaattgggtggaaagttatagttgtttgatatcatatcaatccaaattccaaatactaaagtatgggtctgtaacttaccatgatacatattctaaatttgtcaattttcctacctaacttcaaaaagtttatctgagtgtgggtgttacatatatgtggtaatttaataataaagtggtccacatgcattaatgtatgaagtatagaacaccatccatgtatatgatcaaacaagaaagtaagaatctgaaagagagaaagagaagtgaaattggatggagatcaaaagatcaatcttagttgtttatcaaattaaaaaaaaagaccaatcttagttttattcaatagctcaaatgtttatgtatagaattaaatagaaagtagagaacacaaagtagttagctataagggtacacacataaaataatcgatccaattaaatccgtacgatctaatttaatctaatctcatatgcaaagtataaattagattggattgaaaaatttaaaatttatatttgtgcggattgaatattgattgacatgtaaaagtagcgatccaattaaattcacacatatttataaaaaaaataaataaataattatacatacaattaatattttaatgtaaagaaaataataatttaaaaatctaatataaaacaaatatattttaaaaaattaatagataaaatatatattctattcgtatatttatatatattcaatatacaatttaaaaatatatatatttctttatatattcaatttttttcttcctttaattcttttatttgttattttatttattttaacttttagttgaagacataaaataacaataatttattttattttattgctagttatgtgaaaatatatatatttgtaaatattaaataatttaattaatattgacaagtaaccaattgaaaataaccgattcaatttgtacttttgcggattagattaaatccaaaatatgacatccacacttagtgcggatcggatgtactatgagaaaaatagtgcgaattagattgaatgaacacccttagttagtgacagctgacactactaactgatctaactaatacagttaaaggaataccaattgtaactaccaaaaaacagagttaagactttcacaagtcataaagtgtctaatttatatagatctaaattatgtattgaatatatagaaatgagcaacatattatgcgaccaaataaatcactcatacataacaaaaaactctttcatgtaactagacttagaaactataaatgttgaaacaccaataacaatatatgatatctatgacatttacatcttaatcatgtttgactatgatgaaatttaacgactaaccaaaggcgacctttgaaaaaagtgagttacaagtctacgaatcatgtgaagaagtcaaaatgaataaacgtttcattctatgcaaagacatatagagcctaataactacttaagctaatataaaagcttatggactttaga

SEQ ID NO: 227890 - DNA, 1999 bp, Cannabis indica
attttctttgagacatcattttttttttcaaaaaatatatatgtaatgggtacccaatgggaagccttcccccgtcggaaatccccgcccctcccctgttttaatttaaacaggtattgagacgagtatggggtgaatttaaaaagcgggtatgggagcgggggagcaatccccgcacccgccctgtttacatccctagtagttctcagggtaaaaatgtaaaaatcttaatctctataatttactataggtatatatggtatatataggtatggaaaagtagtgtaataattaggtttatatttgctaggtttggcgggcgcaaatgaattaaagtggcatctaatacattaccacaaaacctttccccacgacacgttttgtccccacactttcatatatatatatatatataatatatatatatatacacctatacatacatatatatatatattatttatataatatataattatgagacatatgttggcaacaagcgcgtgctacgtcaaacatgattggtctataaatcacatccaaaaaacacaacttattcaattatttctctctatggaccccacaaactacacaattttattccctatcataactagctacaccaaactacaccatttttttaaattattttttattttaactacatatttataataattaaactacctacatctaactagtactctataaaattatatatatcatatcactttaattcattaagggtgtttatgtttttgctataatcaaagtttttaaattatatgatcataccaatttataattatactatggaattccatatattttataatatattaattattactaagtactagctatatatatacacagctcaatatcattatagtaagaataattaatcatgtattataataattatgatgaatataattagtataggtcatcatgattttttaaggttgaacggaatcatcattattattagaacaattattatataacaatatatattcaaggctatatatatagtatatatatatagatatagatatagatataggagaataagaagaagaagaagaactaagtagacgttatcgttcgtggttttccaatcacatcgatcgaggccgtgcatgcgtgatcaaccatgcttatacttgtacaaaacattttcctcaattttcaacttatcctatatataattcttttacaatcttttttatttatttttaatttattaattactacattcatttctttttttcatttaatcaacataaatatttttattacaaacctaaatatttttaacagatatttttttatgagccctaagcgcggctctaatccatcttaatctaggaccggcctcgattatcgatttcaataatcatatctctctaattttttttctttatctaacttaaaacttgacacttattgttttaatttctaattttttttatttataataataataataatataattttttaattatagaaaaaaaaaattgaaaaggactagaagtgttatgatcataataaatatggctccttagattgccatctgtactataaagataactgaaaaatactgtgtgaaaattcccttattgtgatgatggtgaattttgtctacaaaattcatattatatatatatatatatatatcattatatatataggttgctacgttagctaactttgttgacaaattaaaagatcatcatatatatataaatatatgctagggccaaaataataaagaggaaaattaatcttgttgctcaagttattatatattttgatgagcttattaaattataaaagtgagtaatatatttggataatattgtttttgtttaaagacataatatatttggtcacgaaaactcttggaaatggcacctttttacattaagggtaaaaaaggaaagagcttttggttaattaattatctatatatatatagatggaatattatatag

SEQ ID NO: 227891 - DNA, 2655 bp, Cannabis indica
ttattttttaacgggagatcaaacctcatcgttaaatttaacagaatattctttttaagtatattctgttaaaccaagaaatgccgttagataggcacttttaatatataaagatatatattttaaatatgattagatgtgaaaaaatatgttgtctgcagaaaaaaatcaagaagcttcaaatcaaacaaaacattttgttcataatcgaaaatattttgacaaaaatcaaatctaacaatgcaaaacacaagttttaaatttgtataaacactctgtttatttgtaattgtttcacttaaataacaaactaatcaaatgggttctagattcttattagttaagcattcgaatctttctacttaaaccaagaaatcatcactaagaaaaaatggggttgatgccaaaatcttcaagaaaaagtaatatataacaattagaatacaaaataatcaaagaggaaaatttgtgaacatgcatgtaaatactggttctacaagtaaatacattttcatgcattgtttgaataagactcagaaaataacacgatgaactggcggcattcaattcgcctccatattcccgggatttccggttgaaattctagacatgttcatgcgtgttaccaaagctgatgcctgaaattgttagatagcaaaacaaaacataagtttaacaatataaagatattttgatccaaataagagttaaaacaaatggaagattagaataactcctaaaattcatgagtttccacaaaaggctggagataatcttgcagcggttaacccgccatggaaggtaagtgaaacctctaacaactattaacacggctttcattaagaatacatatgtttaccagacaatacataaacattcagtgggatttcatgattttgaacaccgagaggtatgatacaacaacttggagttgtgctctacagtggccctaggcctaatccacaggtagcctaatatcacttgagtagaactcatttccaaaaactaacctaaggtatgtgccaaagtaattatatactactaacttatctcataattggtcaatgtggaatcttaacaatgtagaatcttgaaaaatatcatacagttcctaatcgtaaataaacgaagcttaacctaataaacaagaggggcaatccaagtttcaaaagaaaagggagggagagaagcatatcctattgaacgaatgcaacagcaaatgaaaaactaaagaaaaactgtgagcacaatggtctaaaatacaaacacaacaatgtcaagttcaatatattgaaatgcttaagaaaactgtaagagtacctcttgcaaaatgaaactcgcatgtttggatccgttgtaaagaatgtaccacatcaaaaccaccaaaatggtatctgttaataaacattaaggaaaatacagcaaaactcaaaagattttagtaacaatacacattcaatgtgtttttgactttgtacaagacaatacacactcttacaaattcaacctcctccaaaatttactagggaatgtcccttataagcgaagaaaaccgtggtaacatcaaatcaagcttccaaaacataaaataaagagattattattgaagaaaaacagaacctttatgtatgagtatttagttccaatgatttgacaagctaaaatctagtactgaacagcattcattagatatatgtatgtaaaacgtaatccaagtttactaaataccatacatgagacaataggaaaaaaacacaatgaatagaaaaggatactgaaaagacaacgctcccaccaatctaacatatacaacccaaaagtaacattgtaaagatagattttacgttgaacccagttcattgctcttacaacctgcaaacacaaattaaactcaaaataacaaatccattttaacatataagtttccaaaaagatttatgcaaaataatcattgattagcttccacataaacatgtcatatactaacaaaaatattgaagagaggcaaatgaataagccataactgttcacaacttctctaaacagggtagaataagttggtagctattcaatgaagtaccgtccattttggttcaaaacttctctaaacatgttattactgagcattggtattaaatatcagtagtgcctacaaccatgtcttacgattagttagcgatattttatataatttattatattaaattatatgaaattaatatttaattgcatcagtagtcatatgacacgaattttttttagcatttctcgttattaattagtaactattcaatgaatcactgcctattttgcttcccctattaaaattatctctccaatcaacaaacacaacattgttcagtacgagtagttaaaataatcacaatttaaatcacctagaaaaatcaccaaataaatgagattgattcacaaaaagaaacagaattgttttttattgacaaaaatcagaaacttatcaaagtctctttggtcttcctggcccttacgattcaaatattttcatccagatcagaacaaaaaccactagaactactaaaacataaatcaaaactaaattataaaaaaaatctaactatgattatagaaattcgtataacagctgagcaaaattcatatcccaatagaactctatac

SEQ ID NO: 227892 - DNA, 2139 bp, Cannabis indica
tccttattaactttggtagatagattctcttttctggttctaagctgtatacaccctttgttttccatcctgctcagtcttttaagtcctttctctttttgcctaacaagcccttcaaattagtttttcgatttttgaatcagctttggcctttttaggtaccccttttcacagtttctttttcccttgtctctcttatcgttaaataactcataaggcttcagcttcacgatttcgttagtttcctttttctttcgaatcccttttaattttattcgggtctaaatctttctttcttttcttcttttcgcttgatgagaatctgaagtgaaattttggtatagttatgatggagcagagtatcctatgtccgataaaatgcactgagcaccggagtatcaccaaaaagttaaccagaccctctaagaaatcatcgtcggattcaagtttcgccgttcccagaaccgtacggatatccattaccgacccggatgcgactgattcttccagtgatgaagaaggagagttcttcagtcgtcaaagggtgaagcgatatgtacacgaagttaacatcgagactagctgtaaacccaatcttgtctctaatgttcgaaaaagaccggcggttgaagccggacccacttgccggagacccatcaaaacctctaatacttcttcttcttcttcatctccggttaagaagtttagaggagttcgacaacggccgtggggtaaatgggcggctgagattcgagatccagctagacgtgtacggctctggttaggtacgtacgatacggcagaggaagctgccatggtgtacgacaacgctgccattaagcttcgtgggcctgacgctttgaccaacttcgtcactccttcggcgaaagaaaatccggcagagcctgaaattaccggaagagcttcagcatcggtatctgggtacgaatcgagcgaagagtcgagaaacctttcttctccgacttcagttcttcatttcagaactcactcaaacgaagaagaaggtggtcaaaaacccatactagacgacttcattctagaaccagaagtattgtctcaacctctgaaacaagaaccagaagaagaagaagaagaagaagctgtaatccaagagtgccaaggcgaaacgacaacgaacggtgtagcaaacgatttgggtgattacttgtcgtttgacttacctccattcgaggacgagttcttcaatttcgaatactccccagaatcaacgacactatttgacccgtcgtttttcttattagacgacataaagattgaaaacgacaacaacgaagttagcgcatcagacgatatgattattcaacctttaccggactatataataaaagaagatttcagtgacatgttcattgagtcaccatacgacacgtcgtccggtactgattcgttgtgtcaaggtggagacgatctctttagagatattttgtttggttcagaccctcttgtggtcctctgagaaattcacagtggcagccacagtcattggaccgagtgttgccgccgttgccttgccgatttctcggcagattttgttcaggctgcaacaacaaaattaaaataaaataaaaaaaaattaaattaaataaattctgtttttcttttctttattatattatttagttttttttttttaaaatatttattatattatgagggagtagtagtagtaagaatggttgactgttgagtggagttttgttaagagactttggccatgtaataccttttcatttttggattaaaagagtgtatctatattaattaagtctaattgtataatttatttttctatttttctttattattattatttatttattttttatgtaagaaagcgtggcattcttttgtgtcccacacacgagcaagagcgcaatttacggtccttgtggccggttgattggtttgaaataagtgggacccacacacaagtgtgaaaatttaagccttttatttcgtaactactatataatatatatgacttggccaaaaatatgaaatgaaaatgtatactattctttagtaatgtgaacggttacaagttaaattttctaataataataacaattttttttttatttttttttaaaaaaaagt

SEQ ID NO: 227893 - DNA, 2706 bp, Cannabis indica
aaagagagcgacttagtccgcgactcaacccagaattcttcattcggtaatatcgttcctcttttattttgctagcagtttactcaacagccgatgattgtgaaaattatactgaattgttggaatattttttatgttttttattgggtttttaaaaatgggaagcgtttacttaacagttgttataatgctaaaattttataaaaattaaaagtttggcacttttagaataattactaaagaagatgattaatttataaaatgaactaaataatatttgattcattactaaaaatttctaaaaaagcctttaatcttggttataatccaacactatatatatgcacactttaagtaatagttttaaaacaatactaacacttattagtctcggtttataattgacactaaactttaattttttgtcattgtggaagaaccgacaccataagtataagtgtcagtttaaaactgataccaaaagtgtagtaagagtatacgtcggtcggtttacgttacattttattcaacccaacatataaagatcgggttacaaaaattgaagtgcaacccactcaattacgaaagaaaaaaatttcaacccgcccaatgaattggtcaggttaacctacctaaatcgagcactaatgtttattttttttcattcaattgttatattttagttaattactataatgagacaaatatataaattaaattcaaaattcaaatcaaccaccatggaaaaaatatagtagtttgaacgtttttttatataaatatgtgtatataaattatattatatgtaaactatatatcataaatatatatatatatatatgtaaatctattaattaggttggtcgggttagtttgggttgattggacagattggtattatttttaacccgcccaatctttatattttcgtcgggatttttaatttgtattttttgccaggttatctcagtttgatttgagcgagttattgggattggatggtttacaaaaatttatgtacgactttaatttatagtagtgtcgccagaacccaaaattcgaatcagtattccatcgccctttagaacattgctacaacttataagtattctttatcgtatgaaagccttgtatgtaactattttttttttctggtgagatatttcaattattatgtttgtaacactaaatactattttttttataacaccaagtacttattatgtttaaatactattattatgtttttttttttattaacatgctacaaatagaatataacttagttacttttactacaaatatcccttatttcccttgaaggaagacaccattaaaaacttaattaacttgccatttgttatcaaaaaaattaattaacttgccaattgccatatacatatatatatatatatatatatttatataattggatgttctctttaatttcctttccatttccttaaatcatgccaagctgaaactcatgtgacttcaaaaggtggaaaaaaaagaagaaaggaatctcaagattttgcacccaacatgaatctttccccttgtgttttattatacatatatataatatagtgtgtggagagagagaaagataataaagaggcatttgttaatcatgcccacttgattgttaatgggtagtcaaattatggtgcttggataatcataaacaactaattcattattgggtttcttgttaggatatcatccacatgatagttgcttcattctccaacatctgcctctacaaccaactccaaaccaaactaattaaactagctatctacttacttttttacaaaattaattcaaaataacttctttattgagatatatatatacacttgattacaacttctgatcataagcactatcccactcacaattatggtttatttcttactaaattaaaaacaaaacaaaaaacccactaaaaagtatgtacttattaataaacgtacatgtgttgatttatcatgtcaaacccttttattgaattttgtaataaacccagcattaatatttacatgcaactagctaggactgaactgattattcttctaaagcatgctttaaaagaaaatacatatatatgtaataaagggcttaatctttatcttaatatcaagttcttttttctttttctttttttttttttttttgtttgtgcttggaagtcattatctatagttgttggtcaactttattagtcagcaaataaaggagatgagttgtattaagataataattatgaactcgtgccctgtcagaaattgaagtaattaaaacttgggcaagaaacttattattaaaaagagtaattaatatgtagaaatggcttaacatagaaaagttaagtcacatcctctaatgatataattaactttcataaacatatctatccaaaaacacacataattaaaggctttctccactaaaatcataacactataaatggtgggcattcaactttgagatgatttgctgcctttaatgttttttatattctaattaaaaaattatttttctttttgtttttttttttgacattaaattggttctctcatagtcactatgtcactttctccaccaagcctcaaaaagatatgtgaagaaataaaaaacttgttcatctcaaatttgcattaaagcttaaaattgactattccaatgcccatcatcaactca

SEQ ID NO: 227894 - DNA, 2558 bp, Cannabis indica
tcttaatatatataaattaaattcaaaatcaagtttattattattattattattattattattattattattggatgacctacttttctttagtgttcctccaatttcaaaggctctctcttctataactccttctacttctccacacacataagctgaaaatacataaataaattatatactattaaaggccatcaatgtttgttcaacaccattacgaaatattatatattaggtcctacatatttaaattaataattattataaaaaattattaatcatttacaaagagcattacttttaagcactagctagttcataaaagataattatattaagttattatatgagatatgatatttaagtacatcaataacaatactacacctactagacaccaataatatcttttcacatttgttttaaatttaatttatatatattaagaaatataatataaccatgcattcgcagctaatcatctagtactaattacaaaaacatcactaatacctaataataattaattagctccctctataattaatttagatacttgcatattttttttttatttaatgtaaaagatacatatatagaggtagcatacattaataatagaaaaattaataataataattaccggtagagatatgaagaagagtgatttttttacgacatttcttggcaaagttcaagatgtgaaccactcccattgtattaattgacaatgaatagtcatatctgtcatatatatatatatatatatattatattaattaacacaattaattataatatattaatgtatataaagagtaaaataatattaatacctttcataaaaatcggttgttgctgcagaattgataataatgtctaaattgtcccaaatttgatgccttaaatgaatatcttcaattctgaggtcttcaaatgaaatgtctccaccaattgcttctaatttttgctctataaaattcatcaaaatctttccctctttcttcccttaaaaccctaaacacttcttttttctataacctatagaaaaaataaaaataaaaaacaagtttaattatcatcaacttattatctaacaaaaagtttacttgcattacgaatgggttcttttagcaaatcgtatacgagttgtatattgtattaaataataaataatattaagtttagataaaattttatattgtattaattatattatgaccataaatttttatataatgtaactcgtattatttcatacataacgaataattcgtattagcttgtattataatatttagaaagtgtctggatttagagatcggggttgatagatctacactcagacccgaacccctaacctagactcagactcagaccccagacccccgaatcttgtattagcttgtattataatataacatttaatttggctacaatactatattagtttattatttagtataaatgtgttgtgaaaaaaaacaaattgtagtaaatctatgaaaaaaatatatttagtaaattataaaataaatttacattaatagctaaatacatataattaaatttactagttttttttaatataatttaagtataatgtaataatattcataataagatgaatattttgtaaaaatagcttttataaaaaaaaattataagttaaaataacttaatttaataaatttttatggttgccgaaatgactataaattatattgtgcgaccactaaatgactattataatcgtaaaacgactataaatttacattgtgcatctatatggtcgcatagagtaaattaattgagattattttacaaattttggtatttaaaatagttagtttaagcaaattactttaataagacacaaaaaataattaaaattttcaatgtttttccttaatttaataccaaacaagcaaaacataaattataagatatatacatacataataaagtttgataataaagtaaataactaactaatatacctcgttatacatacgatgtcttgcagagttggtatcagaagtccttaaaagaagataaatcttcttcacatttggcgaaactctaagtattttctccaccaaaactataaatatatataaatttaagaaatttaagttgcaaagaaagaatttttatttcaaaaataaaaataaataacacatgcaatatatatatataattagtttaatttaaaaagaaagaaaaaaaaacatataatgtaattatttgttgtacttacgttttgcaagaaatccagctgctccagtcactaaaattgtcttattctctaaaaatctcatattattattttggatttccattgagaaattaagaaaatatataattgtgttgtgaatacctatctatgttgttgttgtatatatacataacacaatgctctatttatacaattaatttattataagttgttatatatattaattaatttgtgatactcctcaactacttaaaagatttctatgtttgcacatgcttcttagtttaatgaatagagagaaaagtctcattatatatat

SEQ ID NO: 227895 - DNA, 1487 bp, Cannabis indica
cttttttactaaaattagaaaaaagtccttaaatccaacaatctcaatagttcagggggcattttaacgatcttaaaagttcagaaggcatgatttggtacatgtcaaagttcaagggacaaaaatcctttttagccttaaaaaaaaattgtattttggagattagtttgaaggactttttggagcacctttgtgttacatcatgggcatattttatgacccaaagaacattggtacatggtacaaacaatataatagttagttttactaaacttttccactcataaccttttcaagttactttttttttgggggtgtgtgtggaaaagaacaattactttacaataaattcaagacataaaagcctaatcttttgcactttcaaagttgaattgtaaaaagtagaaaaaaaaaagtaacaacatttactaatcaatattcacataaaaatacaatctttaactacccataatgtccaatttaagatatatgacattttattattacttcttctaattcaaaacttaaaatcaataactttagttatattattaattgttatgattacttcttgaagtgttgattgttcttactattgaggtaataatgtcaacatttgaaaactactagtatagtagtggaacatcttatgataatatctattatgttttttgcaatcatagccaatagtggcaccaccataccactcccatgcatttgcatagattgtttagttgaagaaaaagggcattttagtaacatcaactctcattcctacttatgctaaatgaacattatatttgcacctaaaaaaattaaataagcacccctatactaaaaataaaaagataaacacttattttttataaaagaagttctttcacaagtattttgtattatttttaattttgttttcatatattttttaaaaatagtgtatatatttctaattttactttagtataatttcatgtattattttctcaaaatattaaattatattctagaacatttttatagtacaccacttaaaaagaatagactgatacaccttctatttatttgaatatatagaaaaaaaaataagttaaatttttttatagtcgtgtaagttatgattatttaagatatatagtcgtgtaagttatgattatttaagatattgtacaaaattttgagaaatttagaataatttacaatatagaaaacaaagctcaattaatgtaattcacaggtgtatacaataaaaaaaatcacacatgcaacagaaatagactgtttaaatcctatttttagcgtgttaaatttttctaaatttctcaaaattttacaaatatttaaataactactacaacacaactatataaaaagaattaggctacataaaatttctcaaataccaaaacaaataaggatgtatcaatacacttcttttaccgtgttcattgtagtcttcctatattttatttttattttaaacatgtata

SEQ ID NO: 227896 - DNA, 2438 bp, Cannabis indica
tatgggaatttatccaacatatagaattaggttatatgttctattttacttatataatattttaaattatcaatatacgcaacgcgaatttatttcctaatttatataaatttaaaattaacatagatatatatataaagagttttatcaattaaaaatttatataaatacatttctactttggacaattcttattatagttattataatatgaaaatttgacaatacaccatcaacccacaacacactatgccatatttttatgatctatttttgtagtcccatatttttgactatgaacccacaatacactattcttaccagatctctccctccatctacgaacccaaaatactttcttcaatctatgttgccttcgatagtatgtcccgtcgccgatcaacagccaccatccttcgactgtcgacccaagcgctccgttagccacaagtttagtagacccaagcaaaacttctttgagcgcaactcctttttttgttcgaatttcaaggcatctatctcctctgagatatatatatcgtaactaaaaggatacatatatgtgcatatatatatatatatttatatttatttttattttcacttctagtttttaacaatttttttatttttcatttgagaaagaatgttagttcaatcatcttcatatctcttttacttttaaacccaccattcattcattctactacaaaatatatttttttgtatttgtataaaatagtttggtactcctctttttcttttttcctgcgatcttctttttacacaccaaaagaaattggaggatttaggatgttcactatgggttccataacttgttgatcatatgttcaatgttcacttttaaatttcttgtctttctcatttttatagttctctgttagttttagaaaatatacactgattttaagtttggaacataatggaaaataaaaaaaagaaatggaatcaaaatgaagcccttaatgtgtttaatgaaatgtcacattcagaactttgtgcttatatgaattgattctataataattgagttctacatataaattttaatggtagttgcctattaggttctctttaaattatttgttatataaattgagtaaaaaatccattattaagactaactaaacttttggttgtttcaattttgaattttaatgtctatcgctttctggtaattttgccatctctttcaattttactttttcatgactacttttttttgtgtgttttaaaacacatatgcgctataacgattatattttctgatcgaggagtggtttctttgctttcaattccgatattttggatcctttgtgggcactttcatcggtgaggttgtatttggttttttatgttgtttaattttgtagattttaacacaaattttatgttttggattgttgattttgggttcctttttatttgactgtgattttttattttttgttttgtatgtatgcttgcatttttttttaccaataattaaacatcggtttcatggtaaattaaattttacgttagtgactcacataattgactattgactaaatgtttgtaattattttgcaatgtaattataactagttatgtctgagttctatttttaatttatgtctcagtgtttttcaaattgattctctcttgttttttttttattataactagttttctgagttattgtggaatcagatctattttaactaatgttttcatattttagaactaatttcctcttgtttgtatgtaatttttttttattaattttaatcggtttttaatattttttatagaattttatttttgtcatactgacccaaactatatgtttgctagtaagttacaaagtccgtgttgtattttaattgtgttgtttctcaattagtttttgatttaattaaacggtaggtttcaaagggttctcttaggaagcgtactagtttttatgatgtggtatggtttatatttttttctttaattataaccggtctaagttattgtctgttgtttatttttattcgttttcttgtgaaatcagttctattttaatttatgtcgcagctagttttttattcaagtcattttagaaaatagttcttgaattatttatttcaaaaactggtttttaatttaattgattcaacgaactggtatttaatttagttattttatgaaccaatttttgatttagttaatttaaggaaccatattttaatttatttaactgatttttgtatgtaagttttaatattggttactttacggaactagtctctttatctcagatttttaactagttgataaatataactggaatctttatcttatattttaagttactgagtgttatttatttattttttacttattttgtaatggaacttcttctgtttagatttatgtctcagtatttttgg

SEQ ID NO: 227897 - DNA, 3182 bp, Cannabis indica
catttataaagttagaataaaaagatgaaatttgtagaaaaaaaaaaaaaagataagtttcaatataatggtaaaattgaaatccactacgcctactaaggttcgaccatgatgggtcaagtaaagctaaaattttttttttttttaatttctattttaattcaaaacctaaccctaaaagcacccctataaatagaataatataactcttattttcataaactaattttgactatttttgtcggacaaatagaaaataaagagagctctttctatcattcaaattcatcatcatcttcttcttcttctcaaaatttttgaaccctatagtaattgagtaattgaccgcacaattcaaggcaatacttaagatagtgtggaagattgtgtagatttttatcaaatgaaggagaatccaggttcagatcttgatcttactctgcaatagattggatcaagagttagagatttgaacggaaggattcatataattttgctgccattaatgtaatattttctacaactttttttgtatttatttcattattttagggaattcatatttaggatgttagattatagatttataatcaaatatacatgttagtaaatctagatcctaataaaataacttccaacaacatatggctcagagtgtctggtgacggaaacaacaacctcaactgtaggaagatttctaactgtaagagttgcccatccagtggacaacgtgtcaagcacaccatctcagacaatatgattccatgacttggggaggaacttcctccacctctagttcagttccaatgaaccgaccatagaactcaccgcttattcgctcgtagtggtggtggtgcttaatctcaagttttggagaaccactgctgacctcgaaatttttcaaggaactattcgaagaaccctcagaagatgaactagttgtctggactagatgatggtcttcatagagaagactgagtaagtcttcttcaatctggttgtcacctccccaaaggtcgcgcgagttcatctgtgtaaaaaaggtagaggaaggtgaacaactggacaaaatgaaaagacttagacaagacatgggtcaactaaacttaagggtattagctagacaaccctaatgtacaaagccattaatcaacaaagtacaagattcaagtgtaaaaaattaaacaaacattgagtttaggccaccaattggtcgagatagactctacctaagacttgccatacagagttcctaaaggaatcaagtactagataagagtggaatgggctcaagaagccatacaaagtccttacaaagactaagtatggacaataaaccggccaacctaatgacactaaaccacataccatgaaccgaccaagtatggggttcaaagtaatgaaccggctagggtcgtaaactaaaatcatgaaccagcaagggtcacgaacagaccctgtgtgccggccagaggctcctgagaatcaaaagttctattttcaaaaattgtaacaatgttcttcatgttcttcgtgactcgaagagccaagaatccaaatggagttcaaaatccaatcttttttatcaagaagtcatacattatgcatcataaagctataaagtggattataatgtaaaaaagactacattacaatgtgagaattaaagatttcaaaaagcttgaaaaaacttaaagtcatcaataacagattcaagaaaataatgagaaattgagattttaagacttacccattgatgaagatcgttgtagatgctcagggaatggtcagactgtcgaaagaaattgaaaagcttaagaatttaaggggcttaaagtatcgggtttgaggaggaagatgataaggcttttttctctttttcttacaaagagttcgaaggagagagatatagtgtgaggatgaagtgaaatgaaaatgaaggaaaattgaaccttatataggttctgaaacatttttcccccaaaaaacttaatgggtggttatttctccataaaaataaccatgcaaagtcaaagaagaccaacaattcaaaaataggaaagtgtgcagccaaaacttaaatccccataatgatcataaagatgagtcatctgaagagtcaaatatctaactaggcatatctgcccagttaaggctagagttgaaaagtccttatctatacagatgttcacacaaggacttggggaaaatgtcatcccaatttttgcccacttgacacggcacgtccacataggcaaagctaaggccatgtagaatacaacttatcaatgggtgaacaaagtcaccttgcacgacatgccaattgtcaagggttccaagcagtcaaataagatcaagcaagcaggaaatggacaacaagggaacactggccgaaccacaccctagtcgaccaatgaggtttcatgtgccagccagaccttaagaatagggctggctggccaatgttaggttatttttagtattgattttagattaagtttagtatatttttaatttagttctactcttgtttggagcaattctacgctttttatcttttatttttacatattaaaaataaaaaaaaaatattagaaaatatcaaaggaataagatgaagaaaagataaaaaatctcacaaaaagatgatatataaaatagaaaaaattgtggaagaaaataaagctaaaagttcaagcctgaattcgactatcttctaattagattttagaaaaagtcaaaacatgaaagttctagatctctcttttatctttccagaacatcttgaatcgtctaatttcaagcaatatcaagagagttatggccaaaatactatcagtcaatgcagtagaaaactcaccaccccttctaatcctaagcagaatagattttctttttcagtgatttttattttattttataattttttggctataaaagaagtggagttcaatagttttggaagaagcaatttagaagggaaaaatgagtacgaatttcagagacaaaagtcaatactggaggcattctgcagagggttttcaacattattttattctctatcttcttctctttcttaaagttaatatgtgtgattttgcttccatgagcatgtgtagctaaacacttgattagggtttagatggatgttgtttgacattgttttatggttttaatatgat

SEQ ID NO: 227898 - DNA, 2876 bp, Cannabis indica
ccccacactaactaagataatatttttttgtagtctcaattaattgatttatttaatcaatcaggattctaaataatgattatgtcttatttgtgaattttactatggaatgacatatttaagaagaaaaaaaaatgagtttatttgtttgtgggtctaattaataaaaatatttaaattgtattttatttgataattatttataattattaaattaaaattagtatttaaataatcaaaagagataagtgataatataggaaaagacacattctttcatttaaaaaaaataaagtagtataaatctaactttaaagctcataagcaattcgggcctaagagtttacccatgtctttattttaagcacgtctcatctaaacctaacactgttgtctccttatagatagaataagatggctttcattcaagtttctctcttgactttcttttgtctgacaagttgaatgaaaaacatagctattattattctattcataaaactggaaatactctttgattttactctcaaattttgtgctctttggtgttgaaaaattatccacacatttcaaagcaatactcagcttagtaaggaagactatgtagtccaattttcatttgaaggagatttcaggttcagatcttgatcatattatgcaactgaaaggatcaagggttaaagatctgaacgacatgagtcatattattccgccgccatcaatataaagttttctataacttttatgtgtttaattcattattttgggaaattcataattaggatgctagattatagaattataatccaacatacatgttggtaaatatagatcatggtaaaatatttccaacagatacacagatttgttacccaaaataataaggaaattatcaggaaactaatactaattcccatcaatttcacagctatataaaatcaatcccacaaatataggatttctaaaattactataattatggtgatatttaagggaaatatcttaggaaatctcttaatgacgtatccttatgtgcggatagtgatgctttactggatacaagcgtttttctcgaaacagtgcgaggtataggacctactcggatactttctgctgaagaagtagactttgtcaatttaaccctaaattgttctggacaaaatttttagagagtatatcctatctaggtcttaaaatgaactcagcgtgtcaccctctacggaaaatattataacaatatcaatcaaattatatacagtatctttactaaatgtctatttacatgtttacatatttgacatgaatcaaaatcacatgtcaatctaataatctcatgaataccgaccaatccaatataacttcttctagcaaaaagtaagactaaattgatcattatatcaagaaaagttgaaagaaaaatcaactccatcttttgttttttttaaaaaaaaaaaaatcaacttgatccatcttgataataagtgaaagagaattaaaaaaaaaacaacttttagtgaaaatttttgtaatcacaactataattttttttattaaatgtaaattttagtcacaaaaaaaaattacttgtgactaaaacataatatttaaatacaaattgtcactaatttagtattgttactaaaaaaatacatttagtcataataaattataatttttttactaataactttagtcacagactttttagtcacatcaatcattattttttttcaagaatttgaactataagttatctggtagttttattttagaaagggtaaatattattttggatcttgtgatttgtaaaagttttagattagactcgatgttttgttaaaatacaaaatagatcctgtattttctaaaatgataaaaataaaatcatgaacttaattttcaacaactttttttttaatataaccaacttgaagataatttctaacacgaacagatacagaaaatgtaaacagttttatcataacacatttagatcggattattattaaattttattatgacaaaaaatttcaaggtcctatttgtacgatttaagaaaatatagaatctattttgtcatttaacttaacaaatgatccaattaataacttttacaaaataatatttacccttttaaaaattgaaaaaactgctgcctctaggggttaacctctaaagtgcgtgtaactttttaactttttgttctcatcttcgtaaattcacgactttgtatgatcccgtgaaagtttttcttctagtagtgaggtgagacgtggctccacaattaatgtaacttgcaataaatttaattgcatgaagtatatataacttgcaagttacaacgattaagttaaaaaaaaataataataataataataataataataataataataataataataataataataatagatgttttgattgggagtgcccacttatccatatgatgatgtatagtgatagccaaaatcgacttttagcccacgtcgtttctatattagccggacaggaggggtacattaataagggtatggggaccaatatttgaaggcaaaaaaattaggaagaaaagcctcattaataaagcgaatttgagaaggggaccatatatcgtatatatgtaatgtacaatgaatatatatcactatactaaattatttttcaactcataagttatatcaacccagctagctaggggtcatgacaagccatgtggtgccagggcaacgatgcctctttaacaagatcaaatatatatatgcatttccatgacaataaacaacatgaaatcccaccatgttacatgttttttaattaatttctcacaagggccacaaaagcaaaatttgcaaggccagccagctagtttg

SEQ ID NO: 227899 - DNA, 3109 bp, Cannabis indica
tgtccatggcctttttccaactctccaatgcgacccagaagatcaactatcattccataatgctcagaatttggtttcagttggtattgcagcattgtattaatatttctaacccctttccaactagacctgaatggctacaagctgataaaacagagagaaatgtgacgctgttaggtctaacacctgaattcttaaccatttgatcaaatatatttatagcttcttctccacacccatggattgcataagctgcaatcatggcactccaaataaaacatctttattcacaactccttcaaatatttggaaagaattatctaggctaccacactttgagtacaaatctatcagtgaagctccaacaaaaatgttcttgtcaaatccccttttctgcacatagcaatgaaggcagagagcttgctgaagaatcccggactgtgcacaagctgccagaatcttcaccatagcaacagcatcaggtttaatctcatgtaataacatgtagcaaaatatccccattgatttatgaggcattccattatgagcataaccacctaacaatgcagcacaagaaaccacatctttcttgggcattctttcaaagatatttactgctttgtcaggggtgaggcacttcatgtacatatcaattagagatgtagataccaagacatccagctcaaaacctttcctaacagcaagttcatgaatcttaataccttcttctaagttacaggcaatcgaacatgcctgtaatgcattaacaactgttactgaattgggttcaattttccgattaaccatttcagagaaaaaatctaatgctttcacagcagccccgttaagagcataacaggcaataattgagctccacgatatcacatcttgttctggcattctattaaacaagctagtggcagattttacagaacctgtctttgcatatagattcaaaagtgaattgaccaaagataaatcagtattaacgcccctcctaatgacaaagccatgtacactactaccaagcttaaaattggataactgagcacaagcagaaacaacactgacaagtgtcactctgtcaggatttaaaccttccaacataaccatttgggagaaaaaaattagtgcttcttcaggatatccattttgctcatacccagtaaccattgaagtccacaaaacaacatcaggcatagaaaattccttaaacacttgtaaagcatcatccataagcccacattttgagtagaattccactaaagcagaacccacatacatgtcttcacaaaactttccatgtttctttatgaacccatgtaatgttttgccatatcccaccgcccttaaccctgcacacgccttaagagcaatgggtactgtaaaattatcaggcttttcatcatcagctcttccagtagataccatgttgtaaaagagactcaaggtctcttcccactgtttatctctacaatagctcctaagtgcagcattccacaaataaacagtcctatgaagcgtttcatcgaacagtttgcgggcatgcccaattgatgcatattttgcatacaagacattgagttttgtggcaaaaaagctatcttgatgagtaaggccggctttgaaggtttgacaatgaagctgtgccactgatttcaaactattacatgattcaaacagattaacaagcagttccctccttttcattaggaaaaactaagtgcctaataagaaaggatggtgtaaagctggattaaaaatgaaggctttatagtgtttaacttagttgatttgcagtagtgttacagtcttttcacattcgggttatataaacttaattatgtatatatatgtgcatatatccatggttggtggaaatcccatataatataatagagaagatagcaaagattagatacctgatagaagtagcaacagcgagtgagagggagagaatggttgtgagaaataatgtggcgctgcttaaaccgtgaaactttactcagtgacgaccaactgcattgatatttgctactctaaattgtgttttgtgttgcattgtatttgatagtattttgttgggttacattgtatagtatttaatacaatgttttgctgaaaaataataattttttatataaacaattaagtttaatttctaattgtaaataaatactaaatttaaatttttgtgatactaatatttaagttataattttagaacttttgtaaatagttgacttttaaatgttaagtaaattgtaagaaaataacatgtagataatgtaaatatattaaaaaaatattgaaaaaaagtgttaagggattcaaacccgtgacattgtataatatgtcttacacctcaaccaactaagttatgaatacttattgtatacaatacatttaattttacttaaataaaagcctaataaaatttttttattttttattttgggcccccgaaaagtgtgggccctaagcacgggcttagtccgcctatacctaaaggcgatcctggataagtgatgatatgacacaaaagttggtcatccccaaatcttcctcaaagattagttaatgaacatatcttaaagaaatacaaaaattgtccaaaatttatgaaatttttaagagcatgcttcattccaattttgatcactcaaaatgtgtgtaacatgtcttttatcaaatcattgcatgcaatttaaattaatctaaatattaaataagcacaaaatttataaataaacaaagtctcataagtttattttttatctttctttctactaatataaacaaacacataattaagactttttaagtttgtaatgtaaaacttggatgaaggtaatatttttttttaaggtgggtgaaagtaagattaaagattcaatttttggctcaaattacctcaatcacgttaagcattctaggactcatagagctcacaatcattttctcacacaaaaatcataatcacttcccttgccacacacttattattaaactttttttcattttttttgagatactacatcccgaacttagaatttgcaataaaatacttgagtgtagcacttatttttcaatcaatctttttttttta

SEQ ID NO: 227900 - DNA, 1716 bp, Cannabis indica
agatatttacgaaaatgccactgcatacaaactaagcatcagcatgcaacctgcatgcatcacaacatgcgccaccactttgaccaccacttggccaacttgtggccatcacttagcttgtaacgtgccatcatagactgcacgtaacactaggcactcctcccaggtcgacttgctatgactcgagactactcaactccgagatgtcatctttcttgtcacatgccaaatattgatgttcatgtcatcaagactacttttggtgtaaactagttacttttttgtttacttaagtcataccctaattgttaacttttaatttattttatcttttttttaatgtaaaaatgttttctttaaattttatattgtaatttatctactatataaatacctcttgttgctaatctgaatttgaaatttgagtttaccttccatgtagttacaagtaaaatttgaatctcctttaaaaggtctcattagaactagttatgaatatatattttcttgatcatgtggtagttgtgcagttttttcttttggtacttgtgtagtctgaatacaagaaaatggaatcaaagtgtaatgcccaatttgacacatatcatttatgtgctgctaaatttcacgacaagcttctgtatgatttgattaaaagtttattaaagtgtgagcaaaattcttcatttactagcttctactaactaaaacagtatcattcattagtagtctttttctcatttgcagttcattcaaccataaatatgttttcagattagtcacaagtaggacatgttccaataaaacttcaactaatttgttcattttgatgatagattaggataaacttgaatggggctttaacacatttaaaggctaaggctatgcatatgacatattggtaattagtcaacttcaatcaccttactggattccttttcatgttttctgtaaagacctttaagaatatatatgaggagccaatcaaaaacaggtataaaaaaaaacacaaaagtaacttaaattaattttcattagcttaaaactaaattaaatttggggtcatcctcgacacttgtcttgaccactctaaccaaagtctagccagaaaaagattgtacacatacttgataaggacatctgctctcattactactatcagatcccacaagtcagtatttggtgacgaataataagtaacaaaaatttttcattaatgaaggaaaagaatactatgcaaataagttaataatgtcaataatagcagtgaacttctgtttgagggtcaaaagaagatttttataaaagattctaagacaaaacagcagtgtctttacctaattttgttttataactgcagtgcaatctcttaacttgtgtgaaaaagattaagaaaagaaaagtgtgcatattctacattgaacatcttttcatgcttgcaacagggcttgaactaacaccttcagttaggtggtaggtgttgttgtagcatcactgcttaaatgaccaagcaaaaagaggccctcaaaattctgttttctttttcccccaacttctgctggcatggattgcagcatctacctggccaggcttcatatttttcctcccaacgaccgcgaaaacagacagtgcagtgagaatgttgtttaaagttttttattattattattctctttcaccatagaagttgttatgaaatgtagctcaacaagaaca

SEQ ID NO: 227901 - DNA, 1842 bp, Cannabis indica
gctactttagaaatactcttctctgaagtcttcaactggtaataaccagatcgaagactgatctcagagaagacggtccttccctaaaattgatcatcataacttctattcttgacatagaatacttattcttcaccgtaaatttatttaacttccaatggttaatacacactcataaagttttatcattcttcttcacaaataatactgtcgtataccactatcagatacttggtctagcaatttgaagcccaacattccctgtaacttaaccttcaaccctttttaactctgcaattatcatccaatacagaactttacatataggttttcctcctagcatcaattcaattcaaaatcaatcttccacttcggtagtaaccctagtagcttatgtagaacagtatccagaaactcttggatcataagattgtgtctcggtcgcactgatgttcctttcgtaatatccaccacactaactaagaagtcgttacatttattcaataacaaacttcttacattaattgttaaaattaatgggattcaggacccttgattctttcccataagcacaaatgggtctttaccttctgattcaaaagttaccatttttccttcacaaccgatagttgcactataccttgcaaaccaggtcaaccctagtataatatcaaaattctctaaattcagctcaactgaagcaaccaactattcccttgcccacacaactcgggaagggatttaactacatgctggagaataaccagttctctagtaggctaaaagatatcagaagtactcagtaacacaccattaaattacacaaactttcaatcatccttccattcccgttactgtaaacgtgagaagtttctttttaaatgttctactaccccacactagaagtaggctctcgtgtagcattcactttgccagcatctcttgcatctcgatcctgtagatagatttataaatcttcattctcaccacatcagaagtttggttaccttaaattctattactagaacacgtaactgataggttgttagtcattttccttgagttcattagggcctgcacccttatcagatctagcattggatgtttactttcatgaatctttcctcatcctatttctctctttaatctggtccttacgccctcagctgtaagggttagttcaattacctgagcatagaactggacatttcctagttgtttaaccactatatccacatttcgagcaatatactctttccaccttcgattggatttggccttcctagcggccttagcagcaacttcattaaacaaaactttgacaatcgatctagcttagtgtcattctccatcactgcgcttcccgggatcaaccacgcaaaatctactaccttaccactcaggtaatctcttactgtattacacgcatatgctcccactcttatggtagtggaagattcatacccacactaccaaccccgatcttggtaagctcgcaatcattcttactagatcaccctaggtacaccttttagtacactcgcgaccattcctttttcatggtcaaaatctttccaacaagaattaatgctaataagcattaccacacatgcaaagatatactaaacaatttgatatcaaacttatcatgcttctctaatagcttacaaaattcaaataagtaagcaattcaaacaatcaacaaataagctattattaaactaacaattagcacttactacgccatgagtcaaacaagtcttcgcagccaatctacaaatcaagccagtcttcaggattttaaaccttggtcgctctaatacttgttggatatattttacc

SEQ ID NO: 227902 - DNA, 2565 bp, Cannabis indica
tgaaaatcgaaaacgagggctccgtacgaagcattgaccagaaattttgaaacccaaatttcgtttccttttctgagcttcgaatttcgttcgaaatctgatcaatgagttcgtgtcgcgacaatagtctctccaaattcccctcggactgagctcgacgaatgtaggaactttgaccggaaacgttcgattcccgatcggagggtccgaacccagatgaggaattgtggattggagatgaattacatgaaaaagatttcaacttgtggggatgaccgccatggatgaaggttataaagtttgcatttttaataatgggtttgttcttcttattaatattaatattattattgttattattattattataattattatgaatggaatccaagtctctattatttgggctctctgatgagcaagacaagaagagaagagtttctattggggttgatgagcttctcacaagaatcattttttttaatataaaaattatttttggtaaaaaaaatttaaataatattactaattatgtcaactaaaaaatagggttgaacttgaagaaagcaaaattttgcattgagattaagaaattcaaaatcagaaaaaacaagtctttatggttttcatggtgttgggagaaggaatcacaagtaaagtttggcccaaaaaaatttggtttaatgtgctcacatggttttaggttaatttattgtttttatttatgcaatgcattaaattagtgtttgtgtgtttaagggatgaagctattattaggattttaaatggaccaaaccaacaataagagcaagatgcatgtgattttgagtagtcttttcctattaaggtgggaaatcaaacactatttttggatcacaagaaaagtggagaggagaggttttgtattttgtaagcaaaaaattcagaacactaatctaataaatccaatttctatttattttatcacttggattataatagagtaaaaccttcctttagtgttattcattattagaataattcatttagtaaattctttgtttagttttgttctatattagaatagttcatatagtaaaatctttgtttagtgtggttctatatattagaataattcatatagtaaaacctttgtttagtgttgtatccatatagtaaaatctttgtttagtggaattctatattagaattattcatatagtaaaatctttgtttagtgtaattataatagaataatagttcatatagtaaaacctttgtttagtgtttctatattagaattaaacatatatagtcaaaacaattttagaatctcatatattgaagacatttataaacaaaaataagttcttcattataataagtgaatattctttttctctcaaaaaagtaaaataaactaataagttacaattttttaaattttattttatgaaaattgcatccacctacatattttactctaccttaaaatttgtaagataaattaatggttaatgttgttatgaaactttttaatttgtgaaaatatatgtatcaactcactcaccaaatatggtaattggataaatattacatttagtatgatttaaaaaataaaaaaaaaaacctcaccaaatgtagatttccttttttttttgctaagttgatgttcataacaaaaaattactcccaaccttattagtatggattgacttaaaagtttggtttaattttctatatagggtcgaaagagtaaatgtcaatcaaatactataattggcatgcatgttgttttttctttctcaagtaaagacacccttgccataagtgagttgagggagaggcctaggtataaggaaaagatcttaaaaaggcaattactttcacataatatataacgtatatgctaattagaatcgtgaatttttataaataccctttttaatgtttatctacaattttatagtctaaaattaatatttacaaaaatacactgtaaaattttaaaattacaaaaatatatttcgttcagcaaaaagtaaaaaaacaacaggaaatcaactgtaacgtctctgctttaagcatccattgggccttcccccatagactcatgactcttatacactggcggcttcttggactgatgactagccctacaaaccaacacagcgttttcagtgtgctttgtcctcactcgcatgcttcatgaaaactttccaagaggtcactcatcttgaaattaccccaggtcaagcactctaaactatggaaatctttatgatgggataccaaaaaataagatgcaccttgttgatataaatagtaccaattaatccatttaggccatcttcaactgtgtagtctcatacctacacagtctctgaatcatcacacttgaccttccccaggcggggtgggattgcacaacttatctggtatttccccttatggatcacagggctactgattgtcacatcaacctcacgacaactataaataaactataaaataaccccaaaaaaaacaattttatgacattataatacaactataaataaagtatatgtgttatcaccggtttgt

SEQ ID NO: 227903 - DNA, 2033 bp, Cannabis indica
tgttgtttactgattaatattggcgaatcgacctgttgaaaggggaaaaacaatgttgaacaaattcatgaaacggggtcaccggaaatccaagtccgaatccaacgacaatgccgggttcgggcttggacccgggaacgttacagtgaaccacgcttctcggacgaccttcaattcagccgttgccaattccgaatcacagaacgttacttcatctcaggcgcctcctctcaaccctggtggcgtcatcgaaatcctaccttttttacgagacgtttcggtttcggagcgctcggcattgttcctccgcaagctcaaggtatgttgggtacaatgcgatttttcagatactctcaaaggggttcgtgaaaaagagatcaagcgccaaactctattggagcttgtggatttcatacaagcgggttcgtgtaaattgaacgagacaatgcaggaggagcttatccgaatggtttccgttaatgtttttcggtgtctgcctccggcggctcacgagaacaccggctctgaagccgccggtgaccccgaagatgatgagccttatttggagccatcttggccgcatttgcaaattgtgtacgaaattctattgaggtatcttgtttcttccgagaccgatactaagatagccaagcgttacattgatcatgtctttgtgctgaaattgcttgaattgttcgactccgaggacccacgtgagcgagaatatttgaaaactattcttcatcgtatttatggcaagttcatggtgcatcgaccctttgttagaaaagccattaataacatcttctacaggtttatatttgagactgaaaggcattgtggtattgccgagttgttggagattcttgggagtattattaatggatttgcattgcccatgaaagaggagcataagttgtttctttcaagagcgcttataccactccataaacccaaatgtatagcagtatatcaccagccattgtcctattgcatcacgcagtttgtggagaaggattacaagttggcggattcagttattcgcgggttgttgaagtattggcctgtcacaaattgccagaaggaggttctctttcttggagagctagaagaggttttagaagctactcagtctgctgagttccaaagatgcatgattcctctttttagacagataggccgctgtcttaacagtccacatttccaggttcataaacaagtttatagctttgtcacttaatccatttctcttaaggtcgtggatatacttaacatgtttcatatttctgttagaagtcaaaattattttttttatttcaatggaagattattatattcagagtcaatgcgtaaaacaatttaagactgtaatcaggtagttgcttggtcgaacttttttccttgcataacattattctacagagtgattaattgttgcttaacttctgtagttgatgaaattttttgtagatcctgcttctaatgtctttaattttgttgcttcctgtttgtagcaactctttaattcaccattaagtacattaacaattacctttaaaacattttatcatcttaagaaacataagctgctttggccaatggctgagcagttctaggcatttgacagcactgaaatctgcatattattgatatgaatctttaaagaaggtgagacacttatgttgctgaagttgagttgataatgagttatttttccaaacacatgttgatgcatgctctcttgttactcttgcgaattattagcacttgttctaatacatctttttctggctcttttgatgattgaattttaccgagtattttcgctgactgctcactttcctggactttgtgaagtagttagtggaatcatctattagtatatattccctctttgttgctatgtgcttattttagctttagttatgatctgcaatacagaatccaggctagtatctttgcttcattatagaattcagatgtatcagatctgttgtaacatggtcagtgtgattaatggggtgcttgaacct

SEQ ID NO: 227904 - DNA, 3412 bp, Cannabis indica
cgtatatagtctgtcagacatgtaaatacaacctattacgctcttcttcttgcagcctcaaaccataaacgagtaccggtttgcatttcaaatttattggcttctgagttaaccttggaagtgttccgagatgcagattgggctacataaaaacttggatgagaaagattcaatcagccaatggtatttgtattctgtatgtttcttggtggaaatctgattagttggagttcaagaatgcaagaaggcagttaccaaataaacacacttataactaattctgttattaagctgtgtgtaaaagggtgtcaggtctcttaattttcttactgttacttactggtcactaacaaagttttgagtgattactgttactttgtagaagaggtttagaccatgactacctcagtttctccttaattaaatcttggtgtccattttcactacttgttacttttgaagattttgtctctacaaatacaaatacaattgctttgattagttttgctttcttggttatatccattattggaaaaacttaggtggtgtttagttagaggtaatgaaatggaaaagaaataattttattccattcctgtgttaggttgcattttaaagtgttgaaatgtcattctaatggaatgacttttccatcattttagtagaatggctattccattttgaaatggacagagaatgaccattttaatgcaatattggaaaaatttataaattttttaacaattttttttaagcattttaaatttgttttttataaatgaattctccttctgtcccactttaataaatttaaaatgaatcatgcctaactgattcaattggcaaccacttccaaatccaatgaaattaacttaggagcatttctatttggctgaccaactcattatgtcatattaagtagtatttaatacataattattgctccatcattcagattatatatcatttgtataaggtggtaggtttaccttataatttattatgaccttggcttcataggaggacttcttcaaagaaaatgaggtcattctttataatggttgttcaatgtattccatgctcacacatttcatagtggaagaaaaacaaggcccttcactcagtacacactttgctaccttaacattttgattcatccatctttccattaatcttttgatcattatggctgctgaattggttgttggagcacttgtgtctggttttctagatccagtggttgagaagttaacttccgtggtggttgacttgttcagaggaaaagataaagccattcttaagcttgtggaggagttgaaagccaaggtgtccaccgctgatctactgctcattgaggctgaggagaagctgatcacagaccacaaggtgaggcagtggcttgatgatctcaaggacaacatttataacgcagacgacttggtttacatgatcgagactgaagcagtgcgaaaagaactaagaaataaggtactcagatacatcccagctccttattctacttttaataattcaataaaacttgagttagaagagacacttgggaaattgaatctctgtttagaaggaaaagaacatggtttagaacgtttgaagaggatgaagcttcctgaaagagaatgggcgcctttgttggaagatgatgatgtttatggaagggatgttaacaaagaagagattcttgagttgctactacaggatgacatggctagtagtagtagtggtggtgatactttttctgttattcccattgtggggatgggtggtgttggaaagactactcttgctcaatttgtctacaaagatgagagagtcaaacaaagatttggtactcgaaagtggattacagtgggagatggtccacttgacttgtggaatgtgatgaggtcaattgtggagaaagactcttctaaaaaatgcaaaattaaggaatcgcatgaccttcaaggccgagtaaagaggactctaagtggaaagaaatttgtaattgttcttgatgatgtttgggatgaagattgtactaaatggaatgtcttgagaagttgtttcaaatctggattgcaaggaagcaagattattctcacaacacgtagcacaaaagttgcatcaattgtgaaaaccgagtcaatttataagctaaagccactttctgacgaggatagctgggctttatttgtaaatcatgcctcaattgatgtcgacaccaatgattgcttggatctcaaagaagttggagaaaaaattgttgctaagtgtaagggacttcctttggccataaagtcaattggcgatctcttacgaggaacgcgctgcaaggaggaatgggagagcatcctaaacaatgatatatgggagttgtatgaaagaaaacaagttaatattcttccatctttgtggttgagttatctttatctaccttctaaattgaagcaatgctttgctcactgctctctatttccaaaagattttgcatttagtaaaaaagatatggtcttgttatggatggcagaaggtttcttacattctgaaaatggaaagagggttgaagaagttggagaagagtatttccaagatctaatctcgaagtcatttttccaaccttcatcatccaacggtgaagaaactttccttatgcatgatcttatacatgatttagcaatgttcatctcaggagagttttgtctaatgatgaatgacagtaataaatgttctcccaaggttcgccatttacgttgtgaagaagctagtatggttaagagctttgaggaaatatctaaagtgaagtgcttgttgcgcaccttattattgtcaggaggatcagaaattggtgaagaattgttgtctaagttgcataaatcattcccacgcttaagagtactatccatagattccatacacgctgagcagatccaaacttatcctgattcaataggaaatttgaagtatttaagatatttaaagttaagttgtcgcattaaagagataccgaatacaatatgtcagttgtataatttggagacactattgttggagggatgtgcaaatcttactagactaccaaatgatataggaaatttaatcaagttgctacatcttagtgtttctcgttcattaaaagggatgccactgcaattggggaagctacaaaatctgcaaacactaaatgcatttgttgtgggaagaaaaagagattgtggtggtattgaattgttgaaagagtttcaagatttacacgggagtctttctattacaggactagaaaatgtgaatgttggtaggcttgaggaagtttcagatgctgcagcaccattattaaagagtaagaagtctcttagtcacctatctttgctatgggatcataatcgtgaacttgaagttgatgagttgcacaaac

SEQ ID NO: 227905 - DNA, 2233 bp, Cannabis indica
gtccttaaatccaaccatctaaacagctcagggagcattttcaacgattttaaaagttcagagagcataatttagtacatgtcaaagttcagagggcaaaaattataattagccaaaaatatatatatcactatattttttatatgatatttttttgttaatattcatggaatgtttttatgtatattttatgcacacgtatcattaaatttcgttgtttttaagttataaatggttacacaatggcatgcaaattatatatatgtatactatgtatttgcccattttctttctttcacactagcatatataaactcataagttatatatataattgtaaataaaggccaacttataaatatacatatatatatatatatttgagcacatgtatagtataacatataattactatataaaacataaatgagtatattataaatatgttataccttggaacttggtgggcggggtctcacttgcatggtgcttgatgctctagctgcagcttatatggcgtatcttatatatatgtacgtatttaactaagcatatataaagaaaaaacaaattataaagtggccaacaaatatgcgttgctttctatgataagagaaactatcaactactgtaatggaattattttgtagggacttttctgcaacaatatgcttaaaagcttatacatgtagttattttaaattttacaaaaaataaataaattaaaaaagcttagaaagtactgttatgtagtattcagagatagaaagtcatgagataaaggagtacttgagttggtggttcctgtgatgaattaagatgcattgaagaacgagaagactaattatatatataatgcggtgcgcaatgagttggaacttggaaaagacatgttttcatgtctgctccaacacaatatatgtaactgaatatatatttatatacatatatcaagtgtgtagagaccaattcactttagtgtattatgctaaaagagtattactgattttttttcttaagaaaaaacaattcattgtgatcaaacaagggggaaaatagggaaggtgtgggagctagcttgctccaaaaacttgatgagataagttgtataagattacaagtgtcattgatcaattattatacagtagttatgacttttactcccatgaagtgaaaaagtagaagaaggggaaaaaaaatgaaccaagtggggtaaggttttagacctggcctgcaattaattactgagtcagaaaatgtatatacagtgatgtatatatgaacaagtaaaattatatatagtagaaataattgatgttaaatgatagcattattattaattaaggaggagctcccttcagtccaagcacagagaaagagggatgcaaaatctctcccgcttcattcacacaaccacagtagaaaaagttatacatatgaatctctctctctctctcactctctctctctctgtgtccctgttgatcaccatttctctactgagtgcttgaatgaatgagtcggcagttatttcaacaaccccattatgtcatatccatgagtgggctgaaggaagctcttcctcaccattatatataatatatacatacacatctcaaatattaattagtgagaccatagccataggcatatataatttagtaggtaccggtaataaaactcttttagtttctaaataaaagtattgaaaaaatatatatatactaaaaaatctaagctgtatatatagtaaattctaaaaatgaactcatgatcaagatcacaatcaaagatcatatatataccagtacgtcgatcaccaatataaatatatatgatcatatatatctaatcaagcatatattattattgtatgatatgatcggtcaatctcggtggccccagatatatgttccagaaaaataataccagtactacgcctcatgaatagactaatcatcatattgtataaacacatatattccttgctttgattcaaattaatattaatttttctcttaaattaagtaacttagagaaaaagagatgttatatatatttaatgattatgatcagagaaaattcttacacttaattaattaataacaggttaatgtaagctatatataagactatagtttaagaaataagaaatatatttatagaaaatagcttattaatttataacagcaacatcaaaatctgctttaattctttttcagaaaaactgatc

SEQ ID NO: 227906 - DNA, 3718 bp, Cannabis indica
cacatggagatcaaatgggctctggcatggtgtctctcagctgagtccttccctactcttctatttccgtgcatcatcctaagcgagcggcctttttctgacaaaggatgagtcaatggagtttagatcaaagctacatgccctttaaaactttcagataccattcgtcttctttttcttttttgttcttgagagatctatgctccacgtcctctaatctcgttctacttttttttcttttttaattttattgaaacgccgatcaactctctctccttctctctttcctcagttgcgaaggttcgtagtcgacgggttcgtggtttttcatggtggacaaaacttcgtggtcactatttgtggtcgttgatgatgactcacgattgtcgaaggtggtttgccgctattcgtggttgtcgaaggtggttcgtggcttttgttgtactggttatttgtgatttaaatctgtactgattgtatattttacataaaatattggtaaggaaaaaatttgtctctgtagtggttcgttgcttgtcaattttagtatgatttttttatttatctttaatcccgattattatagcaaaagcaggataaaaatggtctttaaaagaaaactgggattaaaatggtcttttatccagtttttctataataatcgagattaaaagtgattttttatctcagtttttataagagtctttatcccactgacatatatctcagttttcattttagcaaaaaccggtataaaatacccctaaaaatcaagataaaaagcctatattagtagtgccatgtgtatattcggctctaagagttagatttcagcccaagtctttattttaagcctatctcatctaaacataaccctaagtgaatgtctatatgaagaaagagaagagaattgaaaaacctaatgtctcatctttctcttctctttaattttcgaaattcattatgctttattctcaacctctaaattgttccaaatgtgatttgagtatctgcactgcccacactatttaagttgataattaggtctttgtggaagactgacacaatcgaaggaggagaagattcatgttcaattcttaatcatacattacaacagaatggatcgaggattagaaggaaggagacaatttattttgttgccattattgtgagattttaaaactttatatgcatttattttatcgttttagaaatatgcatatttagtttgttatattatagatttataatcaacatatattgtaaatattaaatcttggtagaataattttcaacaaaagcagctagatctagccacgaaacactcttcaacaaatttaacatgaatatcgacacataatttaaatcaaaaccgtaaccgaccggtcggttataaaattgtaaacaccgaccataactgactgatttttactcctataattaatggtagtacctagtgtatattataaatggacgctattgagtgtccaataacatctatttttgatagacacactatcttaatagcgtcggctctaaaaaatgatcaatgttttgaccgatgagaatgccttttattatagtagaaaatgtcctaaaaaattactcaggttgttcaagtgtagtattttaaatttctttaatttttggaattttcaattagtgattttaataaatccaaccaataatgtgcaaacagtgcaattaatatttgataaatttatacttctgttagagagcatgcgattaatgatgctagttggtaagagtaagggggtataggagggagccgccattgatagatatagcgcgcacgaaggggattggggtggttctggtaggtacccccatgcatgccttttcacctgaccctaccttggatcggctttaacttgtatttttgtgtattttttccattattgaatatatttatatattatatatatatattatctgcatcgaccattattttatgttgatgaactatactttgtagtttgtatattctaatttgctacacagcacttattatgaccttactactttttccctatatatatgtttaatattattatatatatattcttcttcaacttgtataattatttctctgcataaagcgatatatatatatatatatatatttatataaatattactctaggagtgtgtgtattgtattaaaatcttttatatctgcttgtggacagtactcacacatgaattttttctgatgtaatcatgattaattttatatacaaagttatatatatagctatacagtatactcatgatctatgttaatctacaaaactctcccaaggtcatatataggcaaagtcacagtagtgtatcttataatatataaatatttatccataaaagtttgttgttttcgaatttaatacatctcaaaacgggggtattgaatatatttttagtctctatatatatagtactttctttcttcttcttttctacttgatttattgaccaaaactgtagaatataattgaaatattgcattaaagtaaaatatatactacttaacatgacattcagacttttttgcatttggattttagtttgaaatttaattattaagaggataattacgttaattaatatttttcgtgggaaacaaaaagaaagaaacaactacaaatggttaagattaattaggggatattcttttggatgaggatactataacatgtatggtacttatctcaatatgttgactattaatttctattttattaaagatcaaatgaataaattaaagggtctttaacttattttgttatatatatataaaaacataatgaggtgtttccactcatataaagatcagagtttttttccacgcccaaagtttgtgcctttgcgagctgtgtgtggttatgataactcaacctgctcttcacttttgagggacatgctgctccccatcaattgagaccaccatcattctgattttcaagagcctgcccagcaagaatattttggctttttcattgtcataagtactcatgtttcttctgacattattattaaaacaaaataataatgataaaaacacttttgtttaatatttataatgatatacaggagagaattctatagtccctctattaattttgaggcatcatatctctcattgctttatatatgaacaccatagaattgtgagaaaatatagtataattgatttaatcactattaaaaaaactactattccgaaccgttgttaataaaattaaatgagtgttttaaaattattgaaaaaaattggatattcttgactattaataacacttgtgaggttatccttgacggtttttaagtgtgtaacgcgggttttttaaattaaaaatatcccgacatattaaaattgtcggtctctctatcacaaccacccgccatacgtctcggtctctctcacacgatataatatagggaaatttacatccaagcacattaatattaatttatttacataaatattgtgatccaaattaatataaaaataacgtttttcaataccgttcacacattaattattttgctttaagtatatatatgacattaactgatgagatatatttcatactattatcgttttgcttttttaaaatttgttcagttatttgaagtgagagaaaaacattattttcatttatttatttatttatgttataaatattaataattatgt

SEQ ID NO: 227907 - DNA, 1920 bp, Cannabis indica
taatatatacatattttattatttcttaaaatcaatagttttaaactattgttggtacaagatatgtatatatatacatttactacttaattcagttcaagaaattaatatataatttcctttccccactcagccaatcgctcagcacaaagttgaagcttcctatcaatggtagcattgtttaatgattcccagctgtctttaatcagctcataacacagtggctctttgagccaggcatttttgaaatggaacttacgaaaatatgagttgagagattcaattgcaggttctaaaagaattggagaatgatcagagggagaggtctcaagattacttaacttagcttgaggaaacaacctaaaccaatccatgaagataagtgcacggtccaggcgaatctccacccaatttgatgtgcctcttcctctctcctaggtgaacgagtagccaagcagctccatatctgctaattcgcaatcagacaggacctattggaagccatggagtaaagcacgtgggtaaggttacctccccgtttgtcctgctgtgatacaacattgttgagatcgtcgatgatgcaccacagtaagtttgcactttgcttcaaagtatgcataagagcccaagtagtgtgtcgttgattcctctgaggttcaccatagacacctgttaatctccacttaggtttcccttcaattgtgacgataaaatcgatatgctgttgagagtatcccaccactttaccttcctcactcaccttccataagaaggccaaccccccccccccccacttctaccttgggccccaaccataaaaacaccttcatagcccaaatatttatcaacccaatctactctttctttggcacacttagtttcacacaatttgattcttttgaattaattctattgacttggggttccctcttatttgattctttccttttccatccaaggaagcagttattggaggtgtaaagccagttgattgaataacgtcattggtaatcaacaattgatgaccttgattcataggattaccaatctgaacaccatgattgcctctatgcacatctggatcctattgacactctgtttctagttccttctcctccttagatggtcgtcaaacatactcgaagctaccacttgttctgctccttgatgaatcgccagtaggctttgatgctggaccagatcttaaccgatgagaacctatggttccgtctacggggtgcagctttcatctccatactataaggtctaaccaacatgtgcgatggagtatcaaaaagtttctcacagattttttctgagtggccaatgatgccacatataaaacaaaacgttggtaatccttcatgtttaaaaatagcctagcagaccggccttcccaccttctcaagcttcattttttgttttaaaggttggtcaacacgaactgataccctaactccccatgaaattattaggatcagcctcaacaaaatacacctacataattaccaatatcccttactactcgctgggacatgaactccgtagacatgccatgcaattgtacccagaaatcaagcttgttcagcaccactgatcgaggattttccccccttcgcaacctttggaaaaccaacttaattctgtcaaacgtccaagggcttccctctataacccttccaatatatatttcatgatagaattaaaatagatagaggttcgattccaactctttgacatataaaccacaatttggtcgcgataaggaggccattttatgttgcatagctaggaaatcaatttccctatccgtgataaatcttcccacaagacaccgcctatcatcaatttctgaaagtccctgatcaccttccctatattgcaagccaccagtttcttcttcatccagtgtcatcgatg

SEQ ID NO: 227908 - DNA, 5195 bp, Cannabis indica
ctccttcaaagagtccttagacaacaaattcaaactcaaggacattgattccttacaattcttccttggcttagaaaatactcgttctaaagaaagcataaatatatcacaacaatcattcacacttcaactactcaccgatataggttatactggtgtaaaactagcctacacacctatggagccaaatttaaaactcaccgaagatcaaggcgagctcttatccgatcctacttcatatcgaagcctcattggcaaacttatctacttaaccattactcgacccgacattacttatgttgtcaataagttgagtcaatttctaacttctccccaagtaccccatttacatgctacatcaaagggttctacaatatcttaaagctactccggatcaaggcatttttttctcatccgaaacaactacaaaactctctgcttatgcagaaaccatcctttcccctcagaatgttctcgtgtctttcttctcagacacaaactagggtggctgccaggatatatacaaggcgttccattttttgttattgtatttttttaggctcttctcttgtctcttggaagtcaaaaaaatagcctattgtttctccatagtatgcaagtaacacgtgtcacacacattctggaatgatcaatatggtggggtctaatgtcccataatacaaacatgaaaaactcacggggcaacacaaaatcttccttcacgagaagaaagaaactttaaagctttccaaatccaatcatacatattattaacattattttatatacgaatcacatgtactcatgcaaaatcctccaaatcctacgtccccatcaaaacctcctctcctcatttaccaaccaatcaaaatcatccaacacatcacactacatattattcttatatagaaaaaagaaaaaaaaaaccatcctaataattaataaaacattttctgatattatttgtggttgtggttggtggtgatcaacataaaataattttacatctattataatataaggaataaaatccaaaaatttaatttacacatatatatatataattggtaaaattcaaataacagattcttcaaaaaagaaaaaaaagtaatataaaagagctaatgagattgagaaaatgagtgtcacaattcacaaatctcaaaatggccaaaccccatttgttcttcattctcttcacatctctactactcatcatcaccaacaacagcatagcccaacaaactcaaataaccaacaaaaatcaacaatacccaacaaaaacaccagtaatgcctaacaacgagaccatatacaaagtttcgaagcagttatgttggggctgcgtaagggagtcactagagtttttattcgagcacaacttggcacgtgccaagaaatgggagctgcccttagcctgggacgggcagctccagaagtacgctcagtggtgggcctcacaaagaaaatctgattgtaaattacaacactcgtttcccgagggggattttaagttaggtgagaatatattttggggaagcgggtcggattggacgccgagcaacgcagtggacgcgtggaccgacgaggagaagtattacaattacgaggcgaatagttgcgccgaggggcagatgtgtgggcattacacgcaggttgtgtggcggagcactaggaggattgggtgtgctagagttgtttgtgacgatggtgatgttttcattacttgtaattatgatcctgtggggaattatgttggtgaaagaccttattaaattaattaggtagattattaattataattaataaggtatatatatatatatactataagtactattatatattggattatatattctatatatatatttgtatgtactcgtataaaagattgatgaaacaatatacatttgtgtttgattgtgattataataaaataaaataaaaattaatggttatttgattaaactctcttgttgtgacaccaagaagcttaattgttttaatactatatttaagaaagctcccacatttttttaaaaaaatactatatcttaaattttttactaatatttattaaaaagtacaattaatttttttttttaaatctctcctcattttttattttttacaaccgagagttaaacttaaatatttatgctttaagtaaacaggactcgacatattttggcttttgagtatattctcaaactacttagccaaatgtagatgtttctgttctttctcaatattcaatgaacattatagaaaaagtatgttttcacctagtactattactattgatctatcaccaaagtggcaatttcttattatggacaaatatgtgtcagatcaagtatttaattaaggcccaactttaattgtaagtgatttcttagatgtagaagttttactgtggatggactacttacatatttgacatttttgtgtaacataatataaaatattattatagtcccttagttactacaccaaacaatcttcaaagaatgcaaaactctcacattttccaatgaaaattttactaaaatgaccaaatggaagacaaaaattaatgaacaacaataacaacaattgacatgcattgacttttacataacataaattagtatatagcatgtaaatttaaactatacatcaattatgtgatattaattcctcaaccaaatcacccaaacatgagtaagaagatccattttcttccatggctaccctacatttatctctcatatcttttactcttaccctcaaaatgttatcactctccatcaacttctttactcctatctcaacctcctcggccgaaaccaaatcgacaccgtcttcataatccaacctaatctcactcgataatcccaactctttcgccattagaaaagcattcatatgttgctcagcgaaaactggccacgtggcaagtggcacaccgcaccataagctttcgagaattgagttccaaccacaatgagatacgaaccctccgatggcttggtgtgtgaggatagtcatttgcgggacccatccacacaccaagccaatcttagccgttcgttccaagaatccattgggcaataccccttcaacatttgaaaaatcagttgaaggttttaattcagacttggactgcttaggcaaggcccataagaatcgaagcccagatcgttcaagcccaattgcaatctcattcacttgaggcccacttaaaattaccccaacttccaaaacacaagaataccactgaagatttgggttggttatcgagccagctaatcactctctctttcggggctccatttaaattccattgacccgacccgtttagattcaaaacaggcccaataggaaaaatcttcggggctccattggacatgagcgagtccaaagcgaaaggttccaactcttgcactgtatttacaataatacccttcatttgggtaaatttacaagcatggtccacatggacagaaaacccaccatttttacaccgctccatctccgaccggagaagaactcgtcgaggaaccgagttagcaaacccacgaagagtcaactcagtgagtgactcgtcagaagtgagattcgagtttgaaatcggtaactcgagttcgtagctgagaaaagccgcgggagaagggtaaaataggtaagaaggaacatttaagtcgtttgccacgtcagcagcgaaagtacagaacaaatcaacgatcagcccgacgactcgtcgtatttttgactcggaaacaatcgcgtctcttatgttgactttttgctggtcaacaagcgcagttatattggccacgtaagaggggaattgatcgggtgagggtggctccacaaaagggaggaggaggaagttaagtgatggtgatgacgtggcgtggagtgattggatgtaggaatggatggtgggccattgtgggaccgggattaggagtactgtggcggttagacggttgggataacggttaattaggcggcgagcgaattcgacggttggggttagaaggccgattcctggagtggcgattaagaatacgtgattttgcatgttttttattaactaatagattttgttttcaaaattaaaaaaaaaaaaaattatcgtataaataatagtttcatatatgttgtagatgaagtgatgtacgtaggagagtttttggctcattttatagcattcattatcagctgattgttgagtttgaagagataataagtagtaaattgtatataatatatatatatatatatattgttatgtgtgcagatccacgtataacgctaagttatatgcaagttgtgtttttttgctaactacttttattttataatatttatttgtaagggaaatatttgtttatgttttgagtgtcctcgaaaattggatcggttcatatataaggtacaaaacaatttatgatgtatgctaaaacccatattgtatggacacaatatagtcttatccgtttggttttagttagttagggcgacgcattgggtagggccggtaaaacgggtccgacacgataatatgacttgaaatctgcaggagagttagcgggtttgggtttgccctaaatgagttcgggtcgtgttcggtttgactcgtctaacccgtttaataaacgagtcgtgtttgggttgatacggctaacacgatattgacttgttaatgacctatttaaagttattttagtactttaacgtgtcataaataggttataaacatgttgaatacttcataaaggtgttattggttgacatgtttaaacaaaatatgcttataaatgggttacgcgggtcgtgtcgtgtcaacccgtttataaacaggtcgtgtccggattttattttttgacacgattattaaacaggtcgtgttcgggtcaagcatgtacttgttatatatgggtctcgacacgatacgaacatggagaataataaaatttgtactgaaatagttattcattttggtactgaacgtgtaattaaaattttgttataatatattatcccattaacatatacaattaaaatttttctaatagattttattacaacaaatataaaatttatccaattactaaaattagggatacacatttggggcccgcccgacctggacctagtaaactcagtactcgaaaaaaaataggaaatttacatggtatact

SEQ ID NO: 227909 - DNA, 1615 bp, Cannabis indica
agcaatggctcttattcgttacatcattatttttatgatactccctaccgtcttaggccaaatcaatcaaaaagtacctaaatccaaagataactatggtcaaaatagtgaaatttcgctcatgatgcttttaatcggggtatttttcttaattttgataattaaatgcatccacactgcatattttgctaacgttcacggcgacgaagaaaatccatctatccaattaactgtaaatgcacctgaaaataatgtaccgaatgtgaatttacctgcacgaaatgcactcgaagaaattgtacctgtgcttactatagacgcatttcctgaagacaagtatccgtgtggagataatacagtatctgaaggagaagaatgcccaatatgcttagaagaatacgaacagggagtgaccgtaagaaaatttccttgcggtcatgtatttcacccgagtgtatgcaaaatatattaaatagtagacttaaaaagtgtcctaattgtaggtttatgtttgcttagtacttaccttatataagttttaataaatgtaattaggttcaaattaataacataatagtgcatttatttttcaaatataattagagcatataatttatctcttattgagagttccatttttttagttatttattttgagcaaaatttttaactcagccaatacgcactcactatatggtgcaaacaaaacacagcagcataacctttattattattattatattattattattattattattattattattattattattcctaaacacaaatttataatgtgactcattatgtggcaaagacttataacaaaggatagaatagtgagatttgaactgagcttggatcttcattgtatggtgtgtggggaagatatatagtgaagacatcaaatacttattttttgctttgttcttacagcaaaaaatgtttggaaggaatcaaagtttggttaaattggaaagtcaaattcctaggcagagtctctaaagccaaactgagtaagtcaaggaaaatcatattactagccatctaattagcagctactgtttataaggcagaacttaattgtaaattcagacaaccttaaaggtagaactggacttggagctcaaaatgaaagttttagatctcgttcttagctttccagaacatcttgaatcatctagttccgagtaatatcgagaaagttatggtcaaaatactatcagtcgtcgcagtagaaaatttctaaaaagaaaaatataacgaaaataaagatagcttttagttacgatttttttattatcttttcttttagtgatatatttcttaatactataaatagaatcctaattctaataggattcatctatcttgaagcactataaatagaatcccaattctaagatgattcatctattttcaagcactataaatatgacctcttaggctaccaatggaataagtcaaaaaactataaaattagagagagaaactcaaagagagcaagaaagagacggagatcggcttcgaggtgttcttcattctagttcttttcttctccttctactcttactaaatattatgatttttcattataatgtctagttctgag

SEQ ID NO: 227910 - DNA, 1295 bp, Cannabis indica
tttactataattttttattattttttttaaaaaaaaaagcagtaaaaaggcccaaatttgatttcaagcgagctattgggcttgagcctcaacttgatttgtttggaagaaagtagatggcatagcccattttaagttgaaattagatgtttcccagtacagaagaaggctgggctcgctcgtcttataagttgggcttcttggccttttgtacgttgcttagcgcgggaataatcgaaagaaagacactgaatctacaccgtccctctcacagaatgaaagataatcaacggtgaatgatgataacaagtcatcgatccgaaattcccaaagaagaataacgcgcgggttattacgttcggtatttcggtaagcgcggtaacccaaaatctgataaatttcaattttcccacttctcttccaaacgaaaattaaaatcaattttcaatttatcttcttatttatacaatctcacttgtcacagtctccttagttcttcaacactgctcatctctttcggactctgtttttcttacaacaaagacagggaaaaagatggagtggtaaaacaaaggcaaggaagcgagtcgaagcttcgacggagtctactactactgctgctgctccctctcttgttcgaggcaaagatggcagtgctttcgctcgatggtacttttccttgattctcttgtgcatgcatgttcttccattctcttgttgtagtggttgtttaatgtgtctttgagtggttttattataattgtttttaggggttttcatcatttgtttttctgtgttgattaaagtgttatttgttttctttctttgaagtgacgagtgtaagaaagatgttcccgtggcgctgatcagtttccatagttgcagtctcgatgctaaaattaaaatgaatctgggtatgcatgtccccttctgatttattaatttttttctttgttcattttcatttgatgaattttattcttaaccttttttgttcgtttcagatgccaaagttgtggaggcacctccggaggtcaagaagacaactgagaggtatttgattttactttggtccttttgctttttttttttttcatggccaatttcttcattaataatgcgtatttattaattcttgggctttataggaagaaaccctcatcaacagaaccaaaggcaaagaaagcaagagttgggaagaagtctaaggacaataatcctaacaagcgcaagcgccctcccactgcattctttctcttcatgtaatcatttttctactgctttggattactcat

SEQ ID NO: 227911 - DNA, 1692 bp, Cannabis indica
tatcgatataccccttttaagggggtgcattatagaatttccctattatttatattaattatgactctctaatctctatatatatgtcgtttggaataaaattataaacaaaacaactcagcattaccaagctagctttaggccgtactatgtcgtccacaacaaaacaaattattattattttaactataattatatactaatcaccgaagatatataattaggcataaaaatatttttatataaaaaggagggacgtgattcatcaactcatggtattaacttgtgtcactcctttaattttcatctaataataataaatcatatatgattaattgatgatgtattacatctggatttcattatcaaataattaaaataagattagactttgattggagtggacctaaaataatcctaattataaagttggacatgcttatgtagaagcacgcaagaagtacttgttaacttttttttttccttacattattaatattttatatatgacttctcccctagtggcatttatttatatttgtgtataatatcaagttattaattcttgtcaacaactagagtttcaaaattggtatattccaaattctataatatgtactactattccttaataattcacaactttttgttcctttttttctatggttcctttctataaattctccactaagagcactcatatatagatgtggtaaaattaatataaatctactttttcaaattcaaattatattaaatgttaaaaaaaaaatgaacttcattagatgaggtaaaatgaatatacttttgaaatttttaaaaaatatgtgaagaaagctagcactccattactactatttgactttcaaatgatttttaataaatatttttctcctaatatctagctaactcatttctaattctctttatatctattatgtatatttgatataaatagaaaaaaattatagtgaaatgtataaggtatatatagctaaaagtttgatgcatgcgaaataattaataatattaatataagttggggtttttttggaggaaaaaattaaacaatagtattaatttataaatcatatctaactacaagaaaataaagcatataaatttaaaaacatacaaaataggaaaaatgctaaaaagtactcaataatgtgtcatatcgctaataaagcttaaacataccctataaggccaaattaatattttaaaattaaaaattattgttagctgagggaggaggcgagtaatactctaccgctaatgaattctaaatttaaatgggcaagaattttaacagttttttctcgattattattagcggcgggcattagcacagtgggtcccgccgctaataacgaaaaatattattttttaaaattttgaactttattagcagtggacttcgtttcctgtcgttaatgaccccattattagtggcggatgctaataccctttattgttgtagtgagagcttagagttaaagaaatagttgagaagacaaataaacacacaatttttacgtagttagaattttaacgagccttagtagtccactagacaatattatagaacttatagtaatagagttttacagatttttaaaatattctctgttttctagtgtgcgaaccttttgcatgcactactacaaaaatggattttcctgacgtttt

SEQ ID NO: 227912 - DNA, 2291 bp, Cannabis indica
agggtcgggcattacaagaggtgctggaatgctatgctagactatccggccaatgcataaatctcgataaatctaacttgagtgtgggctgtaagattaaggagactaaggcagaggaattggcaagtcaacttgggattacattggtcaaacaacacactaaatacttgggtatgccaacctttgttggaaagaataaaagacaggtctttggaaaaattagagaccgggttgaagctaaacttcaaggttggaaaatgggtctcttttctcaagcgggaatttttaataaaggcggtcattcaagctcttccttgttatgtaatgagttgcttcagatttaccaaaggaataattcatgagatagagagtatgattgctcggttctggtggggctcttcttccaaaaaacacaagatacattgggggaattgggggaagttgtgtaagctgaaagaacaaggtggaatcggttttcgagatttggaagacttcaatcaagctcttttggccaaacaaggatggaaattaatcacaatgcctgattgtcttctagcccgtgtgatgaaagctctctactatcctaatgggaatttttttgaggccaaattgggtcactatggatcgacaatttggaaaagcatcctatgggggagagagctcttgatcaaaggttctagatggtgtattggagatggtcgatctatccgaatcaatgaagatccttggattccaagaggatatccttttactttgcgaactaaagttaggattctggaaggagttactattaactcattgctgaatgaagatggcagctggaaaattgatgaagttatcagttggtttcactctgatgatgtcccttggatccttggaacaattccaagtgtgcaaaactcggattcaataacctggactcttaattctaatggacaatatactgtatctagtggctataaactaagattcagtaatcctgaaattgttggctgttcagacacttcacaaattaaagcttggtggacgttcatttggggatcccctcttactccaaaaatgaagaaatttatttggcgagtctacaatcactggattcctgtcaaagtggagctgtgtaagcgcggaatgaacattaatactagctgtgacaggtgtaaaacacaagatgaaactttgtgtcacgctctttggctctgccctgcagttcaaaatatctggcaacaggttggcttttctaactatatacctccctacctagtcaaagctgttgatatccttcttgagttaactcaccatctttcaaaagataatatgatccaattcattggtctttcatggttgatctggaagaggagaaaccaattggtttttcaacacaagaggcctaatgattgttattggatcccttgggcgttggagattctggataaccaacttaagaaggagctgcagcaaccgaaattgcagaaatcccagacaaaaaattcttggcagccacctcctactgataaattcctcatcaactcggatgcctctatcaacgcctgaccatccggggtgtggtttaagcgctattataaggaattataagggtgaattactggttgctgaaaccagattttgttctggtttttcttcaatcttgttggctgaaacaacagccattaaaatgggtgtggaattggctctgcgttggtcctgtagggatgttttaataagtgctgattgttaatcggtagttaacgctatcaagactagagcagttgttcatacagattggggtaatataattcagcaaattttttgtttgggagttttgggaggtcccgagtttgatggtggcctttgttgcactgtcttgtggccggagaaggcacaatcgtatttgtctgagagatcgtgagtggagaaatgcaaaagatgatcttcacgaggaggagcaaagttcaagagattttcatggtggagaaggagagaggcagtgggtggagagaagaccaaatttagatttttgtggtggagcagagatcaaatgagtttcaaatctggtttgattttttttttttgcgttactggtgattattgcaatggtggtgggtgatgggtgccagcggtggtgggtagtggtggatggtggtgtggtgataaacgaagaagaagagaaaaaaatatggggaaaaaaaagagagaagaaagaaaggaatgaagaagaagaaagcaaaggaaaaaagagatgctgagatgaaccgacgagaaaggaaaaagaaaagaaagaaaaagaatttttt

SEQ ID NO: 227913 - DNA, 3611 bp, Cannabis indica
ttttgataatattgctaccgacagttttgaatagacccataccacgtttgggaaaatgctctccgtacgtttgggaatttcaattttgatttgagagggaattggcatttccgtacaggaatttcagtgtaacttttgtcgttacatgcgaaattccttttggtccattgtgtgatctagggttttcttgctatccttcagtatcagtgggtatacgctctgggaattgctgcaaaaggaaggttttttctcgatttctttgctttctcgctcctctctttgttgtctaaggggtgtttttgcttttctctggttatctgtttcctgtctgtgtttcctttgttttttttttggtgagcctttctctaacgatggagaacaacttcgaggagagacaggtggaacaagtggagctctgtggattggaggatttcaagatctctttagaagcagatcctgagcttggggtggaggctattgagaaatcagtcgttgcaaaacagtatacaaacaagactgtctttatcggtctgctacgttcgattctgggaaggaaatggaaacttgccaaggggtggaagcttcaagaagtggagccaaaaaccttcattataaggttaacaaagaagcaggaggcgctgcaaatttctagaaatggtccgtggcctatatgtgatggttttctagtggttaaacccatgcctgatgatggtaaatggtcgtcagctgatttaaactcttctccggtctgggtgcgggtgtatgaaatgccacccagatattggacgattaaaaatgctaacgcgcttgcgcagaaaattgggtcggttatctctatagacagactatggaggaacggttttcctacaaatgaatatgtcagattccaggtgaatatccaactgaacaaaccgattatggtaggtgtgtttctccctatggaagaaggggtgtgtttatggtgctatttcaagtatgaaaatttgccatgtgtctgctacaaatgtggggtttgttggtcataaggaatctagatgcagacgtaaaagaagaatgattgctgacgatttcaatagaacggtcccaatgtatggcccttggatccgactgggttcctgaaaaaaagattgcttctcggactatgaactgtatgaacaggaaaggctagaacgggagttgagggatgtccgcttccaagccgaggctagagacaatcttattccagggggagaaaatttcgagccagcgctgataggcactgatttgcacatggaagcggtgatagaggtggctagaaggcaaaaagaggcggaatcggagattggtggtagctcaaaatctccggtggagggttctgtggtggaaggtagtccgtcgtcattggaaatttgatcgatggaggaagggcaaaatggtccagtggttgttaccaacgtgcatgggaaagatttcagtacaggaggggaggtggtggcgctcaagcatacggatggggtcagtggtcccagcatttcccactcttcgaatggaaaaggaaaagaattagctgaggtggaaaaacaacatgtggatcatctggctatggttttcaaagcttctttgggccctaattcaaagccggcccacaaactttccaggccctcaagatccaggaaaaatttggacttatctgctaagagtggttcaaggaaggaattaaggcctctacaggttggaaaaaagaggagaattgtttcttgtgatgaagacttttctcttttgggctccattcttcctggggtggactcttctaataaaaaaatttgtccagaaggtagtcttacgtcattgaagtctcaagagtttcttactgggagtcaaggaatttttgaagacggagagggtattgggacggcaactcattctgtagaagtttgcattgggactgaggaaaatccagctgcgcttaatgctccgctggccaatatacaaacaccaatgtcaccgacggaagggaagaagaaggaggattttatcttggccgaggaggcgggcctttacatgccccccaaatccccatgttagttgttgcttggaactgccgtgggcttggcaaacctgcggcagttaacgctctccgaagtcttattcggagtgccaaccccgatgttatttttcttatggaaactaagaaaaattcattggagatggagggtatttggcaaagtttgggattcaataatggagtggctgtttcctctgaaggggcctctggtgggctagctctgttttggagacatgggtggaatattcaaataatgacaatggatcttagtaaaattgttgctagatttagtggagatagagtctccttggactggatcggatgtttcacgtatgcccccccaagacgagaagatcgacttgagttctagaatgaattgggtaatttttttgatgctcaggtggatccgtggctagtgatgggggatttaaactcggtgctttctgctaatgaaaaagtgggggaagaccggtaacccaggcggaaggagagggcctaaggaatttcttgtttaagtatggtgcaattgatttggttggagtgggggctctctttacttggactaatggtcaggatgaggaacatataattaaggagaggttggaccgagttatcgtctctccggagtggttaacccaattcaagaaagctggggttcgaaatctttccattcgtcattctgatcacgcccctgttattcttgatactcgtatggaaagagaattcttctccactccttttcgttatttggatgcttggagtagagatagctcttgtagaaaagtgattgaagattcttggaagcatggtgtggagggatttcagagctttattctctgtcagaaattaaagattactgctaaagctctttgtgagtggaatcggctggtgtttggcttctaccaatcgaagatcaaggcgcttgaaaagcttttgattgaggtgcaaaatcgccctccttcgaaggataatttagagcttgaagggtcgattatgcttgaattagatgaagttgaggatagtttagagtcgatttggagacaaaaattgagagaaaactggcttcatgagggggataagaactctcgtttttttcatgcttcaattgtggtgagacgtaaacgaaatcacatctgggcggtcagacaggcggatggttcattgattgaggatagagctagtattgctcactactttcggtctaatttccaagctttgttcagttctagtggtgataatgtggaaaatgatttctctgacttaattacggcttctatcactcgggaggagaaccttcgattgtgtagctgcccttcggaggatgaaatcaaaaagatagtgtgggctctgcctcctctgaagtcgcctggccctgacggtttcccggtaaagttcttcaagcaatattgggacatcgttgggaaccaggtggtggactttgttaaagaatttttcaacaatggaaaattctgttctgaggttaataaaacgttcatcgtgctcattcccaagaagtctcatgcggagtgttttgatgattatagacctatcagcctatgcaactcaa

SEQ ID NO: 227914 - DNA, 2089 bp, Cannabis indica
aaaaataaaaaaaagaatcaatttataattttttcttatggtgtagagtttcggaacgtggtataacttcattgaacaagcatttaatccctttttaccataaatccgccttgttcaactatagaataatatattctagtctttaaagaacagaacacatactaaacaaatttttatgtgtatttaaaaaatgaaattaaaatgggacagaagaaggttctgcgcatattttagtccaagtaatatttatatgtatatatatataaatgcccttttcaattttttatctttttagtcttgactcttgaccttaggtacaatcttttggttaagattccaaatagtttgaccaaatttcaaccacttggttaagttgatgaggttcccctccaatcgacccaagttattgcacgttgaaatcaaattaataagtggcgagatgtgaatttaaaattgcttgcactcgtggctgactcaaatgtgagcaaattaaatgttaagacattttcttattactattagataagactttttaatcctctcaaagaaattttggatttataggatcggacacatgtctaaaaagatcaaaaagcgtatcttcatttagaagaaatatcaaattttcatatctctacggattcgtcgtatactatttgtacattatatatttatatatataatattatatatatacgtatattatcgtatctatataatattatatatatacataaaaattagatagagagccactattggatacgtcaattccgcgtgcgaaagggatttggaagaaagaatggagctaatgtttggcttgagaaaggtaataaaagataacaaaagaggcttgtttaatataaattatttgttgcacgcgatagatatatgccatatatatgcttatataaaacgtgaaagttatatatacatattatatatatatatataatataaatataccttcttcttttcttaatgattctcttgcagaatataagtcatatgcgaatatgtttacaaaatcgtatagatagataattagtaaagggattcgttaatattaattaatagtaaaaagaatagtagcatagttttcatacaaaataaataatagagatgatgaaattaattggcaccgaaattcttccacttgataaggaaatttttatgtgggattcttggtgtggcacaaaatctatataagttgatagaattgtgaatggctcttggcccttcacttcacaatctatcttaaagaataaatattgttgatgttgtagtgttgagtagtagtagtagtagtacttttggaagcttaggactatgtgtcatgtgggctgaggagtagggggtatattgtatgttctgttttcattcacatggggacaaagactacatattcccctaataacatgcattattattaccatagaaagacttgcattaatattacacacacaaccacaaccatgccttattaatattaattcttctaaaataaactatacatttgaacatatttcattagtaccacatgagataaccccacttctttctcaaaaagcattaatatataagttctagtagtaatcagatatcaattcatcatatgtattatgtatggtacatgatcatatatatatataaatatataggctttcagttatttgaattgtgtgattggtaaattaacatttatcaagaactaaataaaataaaaactgaactggaatgtaaaattcaaataatgatatataaaccaaaaattaaatttggaatgacctaaatgaaatagagatagtaaagtttaatgaggttcatcattttttcttttttttgtggtgactaatcctcggaagaaattgctttttggccaagttttattcaatcttcaaaaatggaggaatataaaggagaatacagagtttaatctcacaaacaaaggtgtcttgcaccttacgaataaactcacttgagaaagatgtgatcaaacacacacatcatctttaacaatatttctcactcattacaaacttaattgtaatctaaatcatctctagattgtcacctaaagaagtagaac

SEQ ID NO: 227915 - DNA, 2152 bp, Cannabis indica
ccactacctcacaataatatggtacttggattttactgaagcttcttattaacttaaaaaaaaaacatagatgaagagaaggtatttacagaaaattgattggccatgactggagaaccttcgcataaaccaggaacaatttgaaattgcctgaattcacctctaaaacctctagagatgctgccacttctgtatgagaccaaaaaacaaaaaacacatcagaatgataaaataaaaaacaataaagttgaaaattttgtagcaacaagcttggtacagcaacagaccccatgcctccaagtggaacaccctgagatgcagaaggcttgcaactttcacgagtgaaaggatcaattggagctttctgcaaagatacacgattaggcaattaactttcatactcctacggataagagaattatttaaaaacactagtaatgcccaacaccatatgagattgtcatacgacaattagtgcaattcaatatcagatcccacatatttaattactaacatggaaaaccgctcactactcacaccttacatagtgttggacactttaaggtgcctaatagcaatgctctatgtgtaaagattatttcatccaagtgttaacagtcacaacaccttatacataatcattactaggaaaaataaaataaataaagagctgaaaatttacccttccatgagaggcttcttctctcacatatgaccatagccgtatacctagacgaacctaaaaatcaatgtccatacacaagtaagaagttgagcaagacaataatcagcaagcgaacaagataacgaagaaaatctatggagacaagctatcattcaaaacaatgaacactttgaagattacttaccatttttattgcttctgtaaacgtgacactaaattctttgagaatatttgcatgactgtttaacctcctcctccaggcttgttctggtggggctgcactatcaaaatcaaactgcatagagtataatgcataaaagaatattagaaacatgtatcagtttagtagaggtaagcaccatgcttttcacaacacaaatagctataagaatattagattatacaaatgcagttgggaaaaatgattatcttcaatccacaaaatacaagtagcagaataatcaagaaccaaatttaatatccttcattcaaatccccaaaaactttagacgacaagacatgtaagatcctaaccatataaaacttaaaagaaccaaaatacaatttattactagcgtcaaagaatgtacaaataataatgaggttttagtcaatttagaaaaccaaatatctccactttgctagaatgatccaagtagtgaaacatggtcaaaaagcccgaaataacaacgatacggttttataattcttacttatctgcagtaatggattttttatgtaaatgtaaatgtatatacattcatcaaaattaagcactccattgaaccaaaataactgcacatttgttctgaaaactcaaacaagtaaaaattcagccataaaccaagtaaaaattgagttcaggcagtcaagcaaattcgtttgacttaatttgactttcctcacaaacaatcaagcaagacgaaaagttaatttccttcgattattataagcatggaagttactccatgtgcagggattaatgcattgactctgtttaagcgagtcaataatcgtatccattaactttcaccaaaccaaagttcacaattcttctattttcacttcacagactttctcggcaaccaaacacggcacaattcaataaacaaacaccaaatataaatatatttatatatatatagagagagagaatagagagagagagagagagagaactgaccaactgcaaggctgtcctgctaagatactcctcgggcggccatgaattctttctacagtgaaacaaattaccactaaccatatctctactacttctgattctcccaatacagacaaaaaccgaatacacccacccgctccaattaagcaaaatcaaatcaaaacctcgagatcaaccaaaatcctcaaatctcaatccacaaaaaactaaataaatataataacctcttcaatcaataaaaaaaaaccgtataacacatgaaacggttgcctccactcaacgca

SEQ ID NO: 227916 - DNA, 930 bp, Cannabis indica
gagagagagagagcaggtttcaaatggggggggggtaatgtgggaattagataaatgttatcctattttaccaatacccctattttaagtttagggaaaaaattatcccctaatgcatgtatagaaattcaaatttcccctttttttaatggagaaattattatatatacttaaaacttaataaaacattacataatttaagttgaaatttttctaattaagaaaaacgaagtacttcaacctcatatttcttagaactggtaatttaagaaaatctcaaaactcattcctccttttatcgcaaatttctttttctctcaaaatttagaaataaattttactctcacatcattttcaataaataaaataaacaaaaataaaaaatataattaaaataataattaatattttattcaatgttagaaaacaaaatgacgacacttatttaatactaagtacttattttaaaataaatgtcaagtactaatatacaatattatccacatatttttattatagactacactacctcctttatcaccgagccgtatttaggtgccttaactggtgatccgagttatttccctctcgacgatgaagcttatcatccaccatttcactggccgaccttgacccctatattttgaggtcaaatctagtattcagagtttgcgtcaatttggtaccgctctcgcggccttcaccaaaatagtgcattacccctagatgtccagtcaactactgcacctcaatgcatttcgggtagaatcagctagctctgggttcgagtggcatttcacccctaactacaactcatccgttgattcttcaacatcagttggttcggacctccacttagtttcacccaagcttcatcctagtcatggatagatcacccaggttcgagtccataagcagtgaaaatttccc

SEQ ID NO: 227917 - DNA, 4077 bp, Cannabis indica
ttgttagtaagtaactctaaaaatattgatattagatattataatagaaacacaatacttgaaaatatggaaaatacaaattcttaatttgcggaaggatccgattatgataaagaaagacaagttcatcatattatcaactttgaggatgaagctatcaacaagcgaattcaattatgcctagtagggaagttactgtaaaataaaaaatagatagagaggatatgaaaggagatatgataagagtgtggaatttggagggtcgccttgaaataaaagatctcccagatgatcttttcctttttacttttcatggagaggtggatctagaaaaggtggagactaatggtccgtggaatttcaaaagaaccctccttcttctacaaaggactcatggtttgtcttatattgacccttcatcttttactacttctcctttctgggtaagagtatttcgagtctctttcaaaggtaagaatgaatcaactgcacattttattgggaatttactgggaaaatttataaaggttgataataattctctagccaataattgggtcatttcatgcgtgttcgagtcctattagatattcatcaacctattcttaagggaatgaccctttccttttctcctaaaggacctacttttgatgttgatttttaatatgaaaaacttacagatttctgtttctactgtagatgcgtaggacataccaaaaagttttgtgcttcccataatatactattggaaaatggaattcaaccaaaatgtacatatgatggccaaaaactcagagctccaaatgattggtataaatcttataaacgtgttagtcaactataaataaaggtacaagatttttaagtgagaaaagtcaagtgaccctgccaattcaaaagactcaaattatctatggtgctcctactggacctgctactacagatttcttaattagtcctactctggaaggatcacatattgcccatttatctaagactatacctatcccttcagtatccaaaagtgatggaaaaaggccaatggaaggtccatcagcaaactcaataaaaactatgaaggttacaccatctaatgaagatgatattatgcaaaacatggaggctaagaatgtgattaataaccctaccattatggatcttaagaagaagggtactaaataggctgagctaacaaagtaacaatgaatttagaattttacaatatttactttaattttatttggttgtatgttaattagctgtcattatagtataggtttcattatggtgtatttgttttgcttccttttaatgtaagaaaaggccatgtggcaagattaagttctctctgattttatgttaatagactatataatgttttctttatattgtaaaaatcttatattatgtggcttattttattatatatatatatattattttttttgcttttgttaattttagctttttttggttctcagataagtcatatatggattccattaattcaaagatagttacgaaaagaaaatataatgaatgttaattttttaaagaataaaagaaatttcaattttgaatattataaaagtatataaaataactctcaaatacatggtttaatacattatcaacaagtgtctaagtaatttaaaatttaaaagacaaaaccagtgctataactgctcatttattcctaactacagacattctcatccttttcaaaattattaaatactcattgttcagtaaagtaagataaaatgttaataacaccattcattcattcatgctagttttgattattagatctagaatttggattgatacattatgagtatcctttcttggaatgcacgtggactgggtaacgaaggaaaaagaagacatcttaaaaacttactacgacaacaccccgctaatgtgctttttatttcagattgtcgtcttgaaccagttcggatggaatattttaagaaatcactgggtatctctaaaggttttgaggtgccaagagtcggaacaggggggtctcttacttctttggaagcaaccttttattataacaattttatcgtctaatgtctgtcacattgattactttgtaaggtctaaatcaaaatcttggaatctgactggtttttatggggcaccacaagcgattaataaacaacattcatggaggatattagaaattttgagtgctctgccacgacgcgcctggattttatgggtgattttaataaaaaatttcagatcctgacaaagttgggggaccgaataggcagggatcatcaattacagcttttcataattgtatgaatttttgtaatttacaacagatggaccttactggtccaagactcacatggactaataaataccaaaatggaggactggttttagaaagattggactatgtttttcaaaatgatgagtgggatagattatttccctctgctactttgaagcatttggaattttttggttcagatcacatggtattagctatctgtttgaatcctatggttacacaggatacaacaaaaaaaagaaagaggttcatgtatgaagctttgtggaataatgatgatgaggcaacacgtatcattgtattaaactggaagggcaatgactgtcaaaatgatttagacaacgtaatagataatatccaacaatgctcagagtctttatctcaatggcatcaaagcaagtatggtgattttcataaacaaattagaataacagaaaagactctttcaaaagctcaggaataagccacaagagtgtctaaagaatacattgataatctagaacgtaaagtggaagctttacttgcaaaagaagaaatttgttggaagcagaaaagtcgagtctagtggctacaggaaagggataacaatacaaattttagcatctgctaggaaaaaggagaaccggatattgggactttttgataaacaaaatgtatggcatactgaacaagaccaaatctctttcattgtttcagagtactatcaagagttattcacatccaaatatccaaccatgcagcatatacagagaattaccgattatgttccaaaacttgtctttgaagagatgaatatgactttgttggcccattcacatcgaatgaagtttttcaagctttaaatgctattgctggtgagaagagtcctggagaagatggtatgtctaggatgttctacaaacaacactggaatattattggaacttctgtcacacaagttgtattaacaatgcttaataatccttcacacatcaacaaggttaattcaactttaattacattgatcccaaagcgttcttcaccaacacttccttcatatttttaacctattagcctatgtaatgttatttataaaatggtatcaaaagtgattgtgcaacgaatgaaaagattattcccaagtctcatctcaccccaataaagtacttttgttgctaataggctaatcagtgataatattttggtggcttttgaattaattcatgctttgagaaacaagaaaacagggaaaaaaggttatgcgataatgaaattagatatggcaaaagcttatgatcgtgtggaatagtcttttttggaagcaatattggaaaggttaggatttcatcataaatgggttgctcttatgatgcaacgtgtcatgaaagtaaactacaagtttttcattaatggaccactccaaggtcaagttattccctagtgtcgcttacgacatggtgatcctttatttccttttttatttcttatcataacagaaggattatcaagattactgcaatatgctgaaaattgtaatttgttaagggattttaatatcaacagacatgctccttctatatcacacctactctttgctgatgactctttactattatgtgaagcttcaaactaatgttgtgatactttgcaaagtatttactgtgttatgaatcaacttctggatgaaagttaattttgataaatctttgcttacttttcttccaactactatagaggtattcaagaatattttgtcacaaacgacttcatatggtatattggtg

SEQ ID NO: 227918 - DNA, 2739 bp, Cannabis indica
tcataaaaatgtgaagaatgtctagatgattttctcgaaaagagtgaaattataactataagcagcactagtactcccaaagctatcccagctatggttaatccacgagcaatagaattggtactgtcacctttttctgttcttttaccagaagagtgtactccaggaggaggaggtggagctttcccggatgaccaagaatttcctcccgtcctatagataattgttttttttaaaaaaaaaaaattgtcatgtcagacgcaatcttttaaacattttacttaaaatatatttacttgaagaatattatcactttaaattttgtatgcccttcaactcattaggaatccagccggagaagtggttgttctcaacattcctgccatcatttcaaggagaaaaataaccattttgttatgcgtcagttagaaaattgagaaattatattcacaatgttctcatatccattagaggtataatttcgcattagtatgagcttcttgaactaagtacatcttatagaacttattttaatcagaatatcactgccatatatgcaaattattcccaaaaaaatattataaaaacttgagacaaaatcgaggttcccacactaacataaacatgcataaagccatttgtactcaagtgacatgaggggtaagctttgtgcaacaatactggacaagaatatagttaagcttacacaattttaaagtatgcacaacactgcttagaaaacaaaactgttcatcttagtaaggtcaaaagggaattatccaacaatcaatctcttttcctttttcaattttttatcttacactttaatctgaaataagctaaatgctgtttatcttttatctcaaccaacattgcacaacattctggcacctttcataagacaatatgcaattatttaatagtaatttctttttttaaaaaaaaaaagatacaaatatatgtttgtatatgcaagtgccaaaaatcaaacaatgaaagagtgtagagttgctcaatatatcctaacaatttgaaattaacatattgtgccaacaatctacttacagatcatcaaggggaagattggcaaggacatttattggaccggtaaatttattattctgcaaatacctgtattggttggcaacatagaacaattagtaacacagaatctatatattcaaaaagtatctcttaatgtatttgcttcttacaaattgttgaggcctgacaatttttcaaaactctgaggcaaatttcctgtcaatgcattgaaagaaagatccctgtatgacattatgttaccagtcaatatacaaatttgctgaattacaggaacatctcacataaagtggagaagcaagggcacaaaagatgtagctatgttaccagaacatgtatataatatgaaatgtaagtacacaaagcaactaaaaagactgtagactagtgcgatccttaacaccaaaatctatgcagaatactcgctacataaggaagaagatgaacaaaatacggcaaccagaatactataatattagtaacaatagggaaatgagattaaaggacaaaaataaaataaaagtatagagcaagtaagctccatggttaacatatcagatccaattcagtctaatgcttaaatttttttgcataaaatcatcttcctgaacgaaacttaagtacttaaccaagcctattgtattttcttttaaaatgatatcattttacacaaacatagtactatgacaatatttcacaggggaaaaataacaattttagttatcgcgacaaaattttcacaccacttattgtttcagtccatttaaaactcaatgaagttcctacacacaaaacttatagttgtgattcatcacttggagtttattgatctacatagagaatatttaaaacaaagaatatatcaacagtagtatagctgtttataaggaattcacgctaaagacaaatagaagcagatagaaataagctccgatctaatttaaatgagctatgagtaaaagcagaagccaacttcactggaagttgatgcaggggcaaaaatagttaaaagggcaaaaaaacacagtaatacacacatgtctttgagtttaggcagtttcccaaacatgtcagtcaattgtccattcagcttgttatgggcaagattcctgcatccaccagcaaaaacagaatgagagctactacctacaagtttatacaaacacaagggaaattctgcttacaggtattgaaggtcagtcatctgagaaaatgaatatggaacattatttgtgaagctattctcggaaagatctctgaaaatgaagatcatcaaattcatatcaacattcaacaaaataaacagctaataaatatttagttataaacacagttattgcaaaaaagaaacgtgccttattgtatgagaaaaaatatctaataaaattcaatgcaatgattttatagtaacaggaatataatccactaagataagcacaaatccatcacaaacacaacaaatgtcaatctatggaggccagttctaattagacaatttcactgcagattgctttgtgggggtcctgagtttgggttgtatttttggccgaagaaatctgtatttcggaaggtaaatccaacctaaagaattactttagaagaagtgtattgtttcgttgggtttcttccactaaagagcctatgaattttctcttataaatgtctttttactataac

SEQ ID NO: 227919 - DNA, 3182 bp, Cannabis indica
agtacaacatcatattttaaaccattaatttttctttcacaaaaacaaatatcaaaactgagcaacaacactatgcccagctaccaaataggaactgattgtaatgtgttggtggaccacatacaaaatccccagctaccaaatgctttcattgaagactttgttaataatattaatcattctctatctctttttcctcatgtttcacttagttttgttcctagaaagggaaacactagtgcccataactaattaaacaaaatttgccttaggcttagatagagaggaggtcttgattggagatgacccttattccctatcctctattttgtatcctaagtgcttaatctttaccaatccaatgaagtggatacatttcttcacaaaaaagaaaaaaaaactactgcaccaacaattaccatattaaaatgacatagaaaaatgaaatacttaccgagaaacattataactaatagtaacttctacaatcaaaacagctagatcaaattaaagaatagaaaattttgagaaataagctttatcaaaattcaactcatcaactagatttatagttttgttttacggttagaacttataattttatggctcataacgtggttaaataaatttttatccacaattaatatggttgttttaatgttgctattatttatatgaacatttgctgtaacgaccgtgagatctagtattttataaatgagcttatctttaaaaaaaaaaaaaaattcatagtttggatcaaatcaaactcaaaacaacaatataagttcattttaaaatagaattatattttaaaaattattattctagcaaatctatggacgagatttcttgtattgttttatgtatataaataataataataattattattatgtccaatttcattatcttctgaaacttctatttatgtagtgcttaaaaagtcaagaaaataaaaaaaggctagaaaagaaaccagaacaattataggagtagtcataatgaggccttttcattcatttattacaaaagataatgtgttggtgaacatggattttgtctagccttaatattttagagtaataggtaggtatctctacttgttaaagtccccaaaatttattgtcatctgtcaaatctgttgttatttttcagtttaagaaaaaaaaactttttaattttttaatttgacccttttctgtaacataagtcagactattttattttttcaggctttgaagagtattggaaaacgacatcagtcaggggatccctttaggaccatcaatttcgtcgtttgtgattgtcatcttcctaaatgaaattaaaattattaatggggtccttcaatttatttattacagataataatgagtatttctttcttttattgttttttatattcattttattagcttgttctggagcttctgttacatttttttgggttttcgtaaaaaaaaaaaaaatcttttttgggttgaaactgtttgttacattattagtttcttggtttatattttcagtaaaagaaatgctaaaaagtatcattgtgttaattactttcttacgtgtgattatagttattagtataatttagtattgagtctcatataatttaatataataacttttagaaagtatcgttagtcaatcataagacacgacacgtcttaagagtgttaggcaccactggtgcccaataacaatactctttcaataatgaagatggataagtacttcattatagtgtttaaaatatatggtgtgttttacttttagggatgggagtaaaatatgggatttattactttgtactctttcaatttttcttttttaacaaagtaggattttgaaaaaattcaaataaaactttatttaagggtatttttagattcctaaaatgagattactgaatgggaaatgtttaaaacttacggtaatgttacctcaatataaatattgtgtatttttattagtcaagtaaacaatttattttaatttttattcggattcatcaatctaaaaggtgaatttaattctcaattaattagactcttagaccatctccaataggaattgtgtggtcttgtaatttaatttttaagattaattttgtaaaatgttactcaatatagataatgaccacacaatttttttttttattatttttacactgaaaaaatcattaatttttagagttgtgtggagaattttttttatttaaatactaggtaacatatccgcgctttgcgcggttttgtaagttttgtattagagttaatataattttggaccatatatcttgtaaaataaaacataatgatattttgagtctgattttagacaaacgctttcaatcttaattctaaaatttatctttaacaattttagtctaatttctaatataattctaacactaaaatagttcgataaatatcaagctcatgatatcattctgttttattttgtaaaacataaggtgttaataataattactttttacaataaggaaacattacatttttagtcatgttttagttttttttcctttttttttttttttgaataacatgtttagtttttttttttaatttatattaaaaataattaatttcaaatataatagattgtgtttattaatattatttgtaaacatgtataagaatttacaaatttgtaaaaatttacaaatatgtataagttatttttttatgatgtcaaattacttaaaaatgtgtttgtagatataataaaacttctataaaattaatctcaattttgctataaataattttggtccaaacttaggacgattataaataaaaatgatatttaaattgtaattagttatcaaaagtttaaatacgtgttaagaaaatatatgtttttttagtaataattagaataattatatgtgcacacaaaacatgtaccaacctactatatcttcatgctattaagtgtaatgtcgattcggtgttaaactaatttatgtaaaaaatttatttttattgaatttgttcatgtgttactgaacatgattatttttaaatgtaaaatatatgacaaattaaatttatataaaaatatataatgcaaaaattaaacaaacatatacactaattaaaatatatattaaaagttgctttaaaaaaaatatatattgaaagtaatta

SEQ ID NO: 227920 - DNA, 4183 bp, Cannabis indica
aaatattttgtgccaggtatgatttccatgtatattaaatgcaccaaattatagaaaaattactttggcttcacagaaggaaggaagcatgtataattaaatgaaagtcgggatgagaataagcaacaaaaaagtatttaaatggaaaaagcttaataaatattgcgtataattaaagcccaaccattgcagcttataataattaggtaagagatagttttcaaattgtatatgtagcttattagctagatagctttatctcttaaattcttaattgttcacaaactttttttccaacgcctttatagatgataatctttttcttcgtgccttcttcttctgctcaaatttgaccaatatatatttcttgaaagtatagcaataattaaatattgattgccctgcatggacatgcatatttatattatacatatacattatatatgtacacattttccttactatataattttatggtatactacaaaatctcacttttagttacaactcacgttttctcccaattcgcaatacatatattataggtcttatattccctcttcatattaataacagcaaatgataacgtacgtaatatataacatataatatataatatataaaatatatatatgtcacattaagcgaaaaaccatttttctttttttatagagaagatagaaaacattaatcgtacacgtcgtagtagtcgtattcggatcgatttatagcagagatacaataaatctctttaaatggtattggaaaaaacggatatagctacaccaagagcctttctttaccactaatgctgggcatgagtcattaattatgagtagctccaattgaaactaccttataaatatttatatatatacatcaatagataaagagtgaccatcttatttctccccccagtacttgtttaattaataaattatagatacacgacctaacaaaaaaaaaaatattatagatacacgaaaaatatttcatattaatcaatccttaatgggctctacttaattaagatctctattaattatgcaccatgtttagtcaaacttgtacaaacagtttgacatagtgcttaatttatttcctgattttttttcattaatctgttatttacataataaacacactagctatccttcaatggtaatttttagtcataatatagatttttaaagattaaatatttatatcatttgtaatcactacaacaaaagaaattattgttgacaaaattaatatgttgtgactgaaatgcatgtttagttttatatagtaattcatatagcttttgcactaattaatactaagaatttcggagtaagtgatgacatgatcatattgaatcctaaagtattctcacttttataatttgtgaaaatggtacttctttttgtgatgatgatcataaatagagattaattgtaggtattctgtatgtgatatagctaatatataaaacccaataaatattagaaactatcatgtaattaataaatgaaaactaatcatctttatactatatataattattagtattgtcaatggtattagtcttattcattcaccattactatcgaatgtttctaatacaacggtctgatgatttaatttaatttaattatacgtttccatgttatattgattacatgacagtttcttttccttattattataacatgaatattgtaataatgttacaattctctatgtttccaatcaaattaataataaatataccggcaattcggtactacaaaaaatcttacttttagtcataataaaatttgtgatcaaagttaaaaaaagttctggctaattataaattatcattattatgttgtgactaaaaaggtccgtggctaaaaaatattagttacaaaaattacaatttgttacgactaaatgtgtttagtcacaactaaattagtgacaacttgtaactaaatactatgtttcagtcacaagtaattttttgttgtgactaaaagtcacatttagtcgtaaaaaatttatgttgtgactaaaaatttgtcactaaaagtaacagttttttgtagtgggggcctctcattaattatttgaatgtttatgagcatttttattagacattagttgtgtatagcaatttctagatatatcatcttacaattagttagcggtactttttaaaaattattacataaaattatataagatatgatacttaattatgcaaataataatatcgacatataagaggatgctaaacaacccctgtggattataattagatattttactttcatcaattatatttaaacaattgttgaaaaaatatatattctaataaggacataatgcggtataagttcacttattgaagctaaaatcatcacccgtcatatctaaatgttataatttgctctactattatctactaataaataaaatttataagaaaaataaaataataattaacaaaaattaatgaaaaaaaaaagaataataacaatgcaaaaactattaatattatgcttgtatataatattctacaatattatatatttacttataaacaaatatcaataaccattaaaaaaatattgaaataaaaaatacaggagaaaaaaatgctagaaaaaaatgtagaaagaacttaaaaaatatattttaaaaaagaaaatagtgatatatttttttgaaaaaaaaagggaaaaatagtgaggtttaaaaaaaaataaaaacaattctttatcaaaaaataaataaataaaatataataataattggtacaaacaaaagaaaataaaataacaaactccaaaacatgacaaaaaaaagccacaaattactaaatatcttatttagtttgagaaaatacaaaatcacctaagcggtgcggaacaagtaaaaaaatagttaaacttctaattaaagtgaataaggatatgacatattaacaacatctccaatggagagctaaaattgtagtgtagatgcatattttagtacatcttcataaaaataaattctaatgatggtgtataaagtagtcaaaatttagcacatgcatgctaaaaattgtgtcaagtttagcacaaaatatagcatagactaaattttagacacaaatattacattttcatttactattctcccacttattaatgtaattaatcattttttacattttatttatatgtttaataatatatatttatatatatacttttaataaaaaaaatttaatggttttgttgatattttttcacgcatttctatcaaaaaagaaataatttcaccctaaatatatagcactattataaaatttaggtcaaatataatattgagtaaatttttttagtttaacttatacaccatctatgagacactacaaaaaatcttatttttagtcacaataaaagttgtgactaaaagtaaaaaaaaaaatgtgacttattataaattatcattcctatgttgtgactaaaaagtccgtggctaaaggtattagtcacaaaaattacaatttgttgtgactaaaatggatttttagtcacaatacttgttttgactaaaactaaatcagtgacaacttataaataaagactatattttagtcacaagtaatattttattgtaactaaaagttacattttgtcgcaaaaaaattatgttgtgactagaaagttgtgactaaaaatagcagtcttttgtagtgggagatggtaaaaaactgctaagggaagtggcaaacacgataaatagtgacatttcgttattgatgtatttcaatattgagtctcaaaatttttaatttagtgaataatatgagaacctgctaattctttaataagtgtcatatatttgcataatgttagacatcctaagatgtcaaataataatgttctcttaataataataaaaataaatgaccacaaaaaaatatgtacaaaaaattatacatgaaaaacccaaaaaagttgtaaaaaaatttataaaaaaaattgtaaattcataacaaaaaaaaattacgtcaaattttacaattatacattaaagcataatgctaaaaattaatgcaaatatatcacaagttattttttgtcaaatataacaaaaattttcacatcccattaaaaattaatattctaaaagaagttaattataaatatatgtacatatt

SEQ ID NO: 227921 - DNA, 2019 bp, Cannabis indica
ctatgtgaatatttttgaaaaatcctattgtacacttccttaattaaaatggatttttcggaattcagaaaaacgttttattttttttaattaaatatgttgtagttatttagaattagatctaaatttttaaaacattctaattaatttacaatgccaaaagtaaaatttaaaaaattatttaatcaagcatacaataagttgtttgaattatatttttacattgtaaattattcaaaataatttaaaaatttacaaataatcttaataactagaatatacacaattgtaacaaaaaaaaaattagaataaaaaacttttctaaattgccaaaatacataaagagtgtactgaaacattttttcaaggatgtactatgacctaaccaatatcttgtgtgtgcacatttagtgatccttgtatatgttcttttagaccattgtgaattgtgaatgtatcttactgtcgttttagaaagaaaagaaaaacactacttatttttcttctattcattgaaaatcagtacatggatgtgggatggatatatgtatttttatgtatatgtaattaatgtaataagaagagcaaagcaaagcacttaattgcttcatttataacctctgaaattggttggtggcaaagcaaatctttgtattttaaattttagaggaaggtaaagactacatttatattatggtgatttggtgagttggtaaggactacttaaatgctgttccaaaataaaaacaaagctcaattgtcgtttttcataatcaaccgtttgttccaattttttgttacgtttttccttatagattgcagacactacaagctggagatatatagaaaaacctaagagtttatgctcaacaaaatgtatcttaaaacattaaaaagcaaacatgcataatttctttttggataagcaaaacactacaagcctaattaatcacaaacccaacaagtgaccaaacacaaagactactaaaacagtccaaaacacataaattaaaaagaaaaacaaacaaaacaaaacccaagataacaaaatacatgacccggctgtcactctaattaaccccagctggtgaaccttatttcatggattttggtcttgatgagtaggtgttcctggaaatgtgggcattccatttcctgagccagggaatgagtagaatccatttggtccgaaaccgaagcctgtggcgaaagcaggagtacctgggaaaccactaccagcaattactcctccaaagttttgggggtggtcaacctcttcattgctcttcaacactcttccaccttcaacagctaccacttccaatgatagagccattaaaagggttgtcatgaggatcaacattgcttttgtcattctctccatctcagctgatactgtatatcaaaataaaagggatctcttctcactaagatttggttatgtttttggtgtttggtatgggagaaatacttggcttgtgacaccccttcttatagcacaaaatgtaagtagagaagtttttgtgtaatgggcatttaagtaaaaatgtattgggtgtggagagacaggtgtcacagacctactctttcaagtttcatttgattattagcaatattaagcaccacaaactaatcatgatgttccttacttagagtttttatataatataaattaaatacaaaggatctatggaaggagaacagttgagaagggcaatcaatgagaggatttagtctgttgaatggtagtaattggggttgcttgcttacacagagccatttacttgattaataccattacatcatttttattacttaggatttttgtaccttgaactttaaaatgtactaaatcatgattcctgaacttttaaagtcattaaaaatgccccctgaaatattgagattgttagattttaaagatttttatccaattttggtaaaaaaatctaacatgaatacaaatttaggggcatgatttagtacatgttaaagttcgagggacatgatttggtagat

SEQ ID NO: 227922 - DNA, 2527 bp, Cannabis indica
taaataaaaaaactatgaccttataatttttaccaataagttaccaaaataaaggaaaggtaaatagaaacagaaaaagatggttataatgatttaaagttcaaagcaaaatccatttcgatttattcgtaaaagactggataaaaataaaatagcaaatgaaacataaaaacaaagtactaaaagagaccaccacatctggtgtgaccccctaagttccatagtcaaacacaactaaaaaaaaaaacactactaaactaagcaaacaaggatactagatatgttattgctagtaatggaaactaaagtgatagacatttttttcagagttttgctaatagtggcttcacaactccggcatctttgacgtctggttctttggtatccaaatcggacgcattgggcgggacatcaacagccggagagcagttgaagaaaccgtgaggctgcatacacagacagaaaggaacaacatcaggtaaacagcatagttttggagattaaaatattgttcatagaaaaatgtagagacaaacaaggaggctgggatatctcaaggaaattaaagaagaaatcatttttttaacttagtagcataaagtacaatttcggtggctcagaaaaatatacattatatgtccttttttgctagtgtcaggcaattttcatctatatttctatcccagccccatgtgataagattgaaattatatgcacatgcaagcaaaaaagatggatattcatggacagtgctcatgatagatggaataaggttgacgatggcttaccataagcataaagccaatatgctccaccggcatgacaggccagtcttcaagccgaggaacatgtgtgattccaaacacatacctgcaatttaatagttctttgtaagtcagtatgaaaataaaattccaaaaaaattagaaataatttactgtaaaagactaaatttggttaaaggtgtagatcttctataaatgcaaggttgcaccctagacagagaaagcaaggggatggtagacaaactaaccaaagaacaatatttgtttcctccagcgatcgatttttcttaacccaagtggccagtccttctccagcacggggattttgattaggaaactctcccccgggatacatctcatcacgtgcatatgaagtaacccaaagattatgcttcaaaaaagcagctcttctcaaaaacttggcctcaggaccagccaatggcaagcagttcgaaccaggcactagcttatagcctgtgaaatgtccagtcctattaacagttcttgtgttccttacctggaatattagatggtatatattgtcaatcaacgaatttaaaactattcagataataaagaagtagcaaaaacaaagtaagatgagcagagccaaaataaggatgtcttacaatccaatgacgagctgccaaagggttacagtcacgcattgcctctgattcagatttaagaagtctttcctcagcatagaatgcattgttgtgaacattgttctctccaggttcttcaactttaacatccacctcaacaacctacacattatttagagaagggaaataatggtaagaaagtattctatctgaattcgcatttttcacttataaaggctcctaagagacaacattctaccacaaactatagacagttctggagtttttaatttcatagtaacagaagtttacctgattgttagtttcaccaggtttgcagtcaacagccatatccatccgagcaacaaaaaagtgttgatgaactggcgcatacaatcccggtgcaatcattgtaccatactttcgaaattctccaggttgcaatgctcctaaactaagtatgccagtaagtttaacttctgcttcaattttaccatcctgcaatatcaacttacagacggtttagaaactttccacaaagcttaagcaaaacaagcagacaagtgtgagtattagttaatggaaaagtagaatgaaaagtaataaaaggtaatatcctggaactgcacattagaacatttcaatgtatagtcttaagtctatgatcaatcctatgtcaagcagaacctttggtgatcattgtattctagaagtatcttcaacttcaaaagtgatcaaactcaagtacccacaatgttaaaatatctgggatgtttaacttgcctgatagaaatgccagaagaatccatactcataattagccacagtacatacgaaagacactgtcaaacgcctagaccttcgaacttcagctaaaccagttctccaatcttgatgtttccacaaaattccatgatcttcctcatgcaaacatacacagttctctaaagtttcaacacctccagtgaaatttgtgaagtgagcatcaaagtacttgatatagcccaaacaatcacatccctgcatgatggtaatttagaccaatatgtattaagcgaaagaaaaactcaaatgcaaagcaaacataacattctataatagtcctcataccttcttaagagaatgtgcattttt

SEQ ID NO: 227923 - DNA, 1977 bp, Cannabis indica
agtacaaataaagtaaaagtattagtagttttgccacaattaacatttttttaagataattatacgttatgttttaaagggtagaagatatattttgtttattttttttaatctttttcttagattcactttctccttcttttctcccccttctcctctccttccatagttctctcctttctaccaaacatatagtaaattttgctctcattttactttcttccctaaaatttattttaattgttacctctaccaacataggagtagggctacaacctacaatcatccttacatatttttgtgtctatggggtagttaaagaaagttaaaaataattgtaccatcttttcaaaatattacaacttatatttaatttgcacctctcctattaacaaaaaaactcattaaataataacaaaaaaaattattttacttgaaaaaaaaagaaaaagaaaatatttaaaaaacaaataaaaaataaaaaaataaaaagaattatttccttcctctctctcgttcgtacacaaaattgattcgtttgttcccatcttggggagtgatgaaggcactttaccagaccgtttcatttcgaaatttccatttataccctccattcaaaaccaacattcattccaaaaaagagtctggtcaatgagggtaatctagtaatttcgctaatctggttcactctcccctagtgaccagtgctgcgattactcaaaggctgctcatgcaaaataaaccatttccctctctttctcttctctctctctctctctctagaaatatacagagaaaaaacggcacctgaaactacgaacagcgcggtcattttcgtctcacggtacgccaaattcatctaaaagctgttagaaaaaggatttttgtttcgtttagcttagctcgctcaaactcctattttcgttcttcattttttggggttttattagggtttaagaatcatgtgtttggacggctcggggagtggaaattttcgtctgtaatgctttttgtgtttttgcattttctttcttggtgatttgttgtcgaggaaatgaaactgaaacaacattgatagcgaaaccagtggtaaaatggctttttgtttttgtttttgtttatttggatggagtcttttagtttaattttgcgattctgaggttaaggatttttgcactgatcttgcatttttcagtttcattttctctttaactaaacagagatgttgtttctttcttttcacgctaaatgtctttttgtttgcagggatttgaagttggggtagtgcatttgctcctagttaacttttgaggtaaatgtcgaataagaactctgatgattttgctccttttttttcacctttccctctttgcatgtttatttttaggctttgtttagaattctgattgatttttttttttttgtgagagaaaatatacaggaaagttgttttgccaaaattatatgataagactttatttttattttttatatttttaagaaaatatctgttctcttttttcatatatttatagttgctcctattgaaaaagaagaaaaagaaaaagaaatatatgtttataattgttataaattttataaaattatatttgatttctctgtattttttttttttacctaagcgctttctcagttgagaaagatgaaaggtaaatttagttttttctcttcttctttattgttttatttagtttttatattttggggctatataacacattttattagaaaatacgattatatattatggagttatgaaccaaatacattgtactatcttgccttgcagtaaatgtttttcttttgttaatattgctttctttgaattgattttactttgtgttaattagatatggaggaagccgccgagttctacagatatttctgattggagtagattattggtatcaaatttagtttggcaagtcacaaggaaattgtgagtgaagagcagtt

SEQ ID NO: 227924 - DNA, 2770 bp, Cannabis indica
ttattacttgtgggtattatagtgtcattgaggatattctaactattttgactgaccaacaaaatttttttagtaggtttagtactatttggctgacacacagtataaaagacaaattaaactgggatagtataaatgttaaattttttgtgttccagtaatttggtaaagtttgacccattttatataagtttcacaaaacaaaaccccaacacaagagagaaagttgttatatcttccccctcttagttataaaaaagatgtttttaacctcacataaaacaataatattcataaattaaaatgaacagattactatattcttcttaaactcattattttaattatcccactttcaaaattacaataattaatattaaaattaacatattttaatttaataattattataaaatattagtaactattcgaggcactacccaatgctctttgaggtagcttaagagttaagaactaacacctcatgtcaagcaaactagcaaagttcacaaggcgatgagtaattgctcttacataacaaaatgtactacaaagatataaagttgtttcctttacctcacttagttttagtcgatcatcatttaaaaaataaattaaataaatgaacagagttagaaacacagctaaaatttattgatgtcactgatattgaaaaaaaaaaacaaaaaattgttagttcacttcagacctacttaaagcttgccaaccatcatggcagtctctgttggagttgttctagtttcaatggagaatcatgataaagtccaattaagacacatttaacaaaataatatttaattaaaggaaatttaagagggtataaaaaaagattaaaattaacagatagagaggttcacccaggtcaaactaactagagcaaagtattggaccaaacgaaaaggaacactagtgttccactaatctattctagagtaactaaaccaagcactttaaactctacatcaataatacatctatcacctaccaaaaaaccattttctggatcattcaatatcgtcaatgacatgtaatcttcaaaacccctggccaaacttttaacgagaacgttttgctatctggaaaaatatatacataaaaataagatccataatgttatattatttagcatgcatataagatgaaaacaataatacatatatatatttatagatagataaatagagggctcaccagtttttcgaaaatggttggcatacttttggtccctcatacgacacattaaatgcacaaacagactagtgtctggagggagagttgaatccaatgctagacccaccacacaacaattattgttgctcttctcatttgatcgaccattaggataaaacacaatcgacctgagaaccaagagttaaaatactaaatcaacatatatattattaaaaactacttttctacaacttctcatcttaattagtactaatagtagcacatgtaccatttgtagtctccaccaacaaaggaagaagattgataacgttcaaggttttctctagaaatattatgaaacgtccaagaaaacttgcaagtcaaaggattgtttatcattgataatcgctctacttttgatgccgttttgacgataaaaatctctgctccaaatttacatgtgtcattgacaaggtaaccattagaaggattgttaaatgtttggagatccatgaatctagcaaagccccattttggcttcatagtatgaaatcgcctcactcttgcatctgcacatttgttaagaattaaaacattctttattttcaaaaataaatacaaacaatcaacattatgatcatttgttgtttgaatcaagtaggttttgaaaaatggaattgggtaccaaggcgttttcccttagccccgagaggggcataaaataaaacttcgtaaatatttatcataaaattcataggaaagtacacataattccataacaaaatcatgaaattcttaaaaattatagttaagtcttaaaatcataaactaaattcataaagggttcaagtttattaaaaacctttgtgacttagaggctgaagggatgtaatgtgcctagatggtttaaggtttctatggtttcattatctttcctaatctatttattaaaaatctgttaaaagaactcagacaaaagcttaatcaagtcattttgaaagcttaaaaacaggggagccctgtgagtccacaaaacaacaaccctaatacacaaaataatgctcaagactgaggcatgcgtctcatatgcctcagtacatctcgccttagaggtgtgtgcctcaatagaaacgtgaggcgtagcctcgtgtacgcttttgcactgcctcaccttgagacgcctcgattagttttagaaagtatgttgaaatacaattgcctataacatttaacaggttgatggaacaaaatcttcaaatctattttgtcaaacaaaaaagaaaaacaattaagtaggttttcaagaagcacaacaatatgaaattcccattactatactagcgtgcaaacaaatagaaaacgtgccacgtccacctcaaacaaactaatgacattacttagaaaacatcaaccaaatatagaaacccactaaaacaatataattttttaagtactagtggagaagagtaaattttcagttgggtgattcatgaagaggcaccaaaacatgatataaagttataaacaagcaacccataaaagttaaggaaatctctgcagctactcttaagtagtgaaa

SEQ ID NO: 227925 - DNA, 2040 bp, Cannabis indica
atcgaccaccaaaacccaccacctaccactacgtacccatatctctctttttccactgcatactccatccatatctctcgacttccaagaacattaagaaagaaaaataaaaagcttcatcctttccaagatatatctcgatctcaatcttgatcctgatcctgatcatatctatttttttttttttttgcttaattaatttcctgggatagtgggatgggatgagaaagaatgtggagatgaagggatagtattggtcagcagtaagcgtacaccactgggaagagtgggtaacaaatcatagaagttagtaaaatcttctattttttttatatatacagttttttattctttaataaaagaaattgaaaaaaaaaagccattaaagtttttaataatttttgagtaaataccattttagattctgtgttttgcaaaagttaccaattgaaccctctgttttgttaaatgacataatggaccatgtatttttcaaaatagtaaaaatagggccctgagcttaatttttaacaacttttttaatataaccaacttgaagacaattcctaatacgaacagatatagaaaacgtaaacagttttgtcataccacctttaattcggattattattaagttttattttaataaaaaatcaattcaagacacttattggaaagtatcgaccccaaaaaatggaagcaaaagctctactcttaggattaatttgggcttctcaacataatatattcatgtgaatttcattgaaaccattctttaattttggcaaactctattaatagtccatcatcaactctttctccctatcaagacttggtgtttgacattaaaaatcatttatcttatctctcttctatttgtgtgtctcatattaagcaagatgctaatgaagctgctcacggcttggctaagcaaactttagtgttaaataatgatctctatcattttctttatggttgtaaacaaccctctttaatttataataagagtaatttttaaaatggagtgtttttacgaagtgtaaataaatttttattattattaatttatttatgattcctaaaaaaaaaaaaataatatatatatatatatatttatatatattcatgagtaataatacgtgctaacacaaagttgacacacattgattacgtggcaaaacattttaaccattcatttttcacttaagagatgggaccctttattaaaaaggaatagtgcatctcccaaaaacgatcacatcccccggccatgaaaacgcagtcatcatcttcttcgatcatcgaaaccattataatgcgccaagaatttcactcatcaagtcctcaaactcaaaccctccccattcaccatactcttctcctctcttctccccatgatatatgatcttggatcgtatacaacaaaacaaaggattctattgtttcttccttcattaattctttaacaaaaagaaaataataataataataacaatgatggattcgggagtggacatggatattgctgattgtgattttttgagcgacaaaggtgatagtgatgttgataatgatatccctgatgatgaatactcatctgatcctgagattaataaatattatgttcattgtatcacttgtcgaaatcgcttatttaatcgtcaaaggcctcttcatttggtcatcggtggtggcttaggtacacattttacattcttatttaattttaattaagattaacacaaaacccataatttttcattttcaaaattatatgtatatatgtatgcatgtagccgctgacgtcatactttggaggaacaaagaaacatcagcatgtgtacttgctggtgcaacagttgtatggcttctaacagaatggattggttaccaattctttacattgttttgcaatactctcttaatcacattcaccttacttttcctttggtccaatctagccacttataccaattttgtgtgagttttttctttttcctctccaaatttgattttgtttataaatgttaattatatata

SEQ ID NO: 227926 - DNA, 2396 bp, Cannabis indica
ttcaaaaactatcaggagctgaatgcccaatgcgagctgtgtttgttcaagagaggagagactaaagaaagctatataagattaaatatggcaatacggtcatggaaggaaggacttacttctatatcaagtgcagggtacttctttctcagtgtgcgcacctacataaagaaatgaggggtaaacaaacagtaagctcaactgtgaaaagaaaagcttggtgtagaaattagagtgcaatgctatgcagcaaatgaaagaaaatagaacaaatggatggcaccttatccatcatttctggcatgaatttctgcccaccaaatccaggttcaacagtcataacaaggaccatttcgacaggattctccgcctcaatctgtggagtaatacaatacaagtatctgattaattgcaagttgaaacatttctggtgtaacattatgtgtactaaatcatgaattattagtaatgaaccaagatttacattatatcagtaaattcggataaatttagttacaaaagtcggaaatagtgagacaaagtaaaaaacaaacaagaaaagatgcctaccagaggataaacttcttcaattggcgttccaggctttaaagccacaccaggcttcatgccctttgattttattatttgaatgagttcttgccagttttctagtcaaataaaaatgtaacatgcgaaacaaaataagccaatctttgacaagaagaaaaatgcaagccaaagatttatattataaaaaacatatgtcaaacattaatgtcccacctttggaaacctcaacatgaaaagtaaaaccagaagcaccagctttccccataggttcaacataatcaagaggatttgtgaccataaggtgacaatccaaatatgctctgtaagtgggaagaatgcaatttcatgattattccaattaaagaaacacatactctatcaacatcattaagtcttttagtaaagaaataagaagatcttactttgagtgttttcgcaaactctcaatgactggagctccaattgttagatttggtacaaaatgcctaattagaacaaaggaatatagaagttgcacaaagttatgaacaaaccaatcataagtagtaaaactagcttaatacaaaatgccaaaattaaatctccataagcaatataagcaactctaatgagctaatctacaacccacaaattcataattcttatccgtgaatcatgttaaacgtaccaaaaaaaaaactgattattgaaatttgaataccatgtgtcagatagttcaaacaacatcaatcataatcatactagactagcatggtaataccaaactcaatttcattaaaacaaagcaaatagaatcaaacccaatttttgatggagcaaaagcattattgcataagcaaatgactgaacctacccatcctgcataaaagttacataaattaatcaactttatttgttacataaataaatcatggaaattgcaataaattcttgaaattaaaaagaaagaaaaaaacatatttaggatcatccgaggaggacgagagtattgtaccatgatgtccatgtggagccaatcggcgccacaattgagcatacgttcggcttccgaggccaaattggcaaagtccgaggaaagcatcgacggtgcgatcttcgccgtcacacccattgttgccgagaaaggtaatcaattcaggtcagagatggattaggttgagaaatgggtttcggcctttgtccttctcgttaggtgggttggtggagttgttgaaaacggcagcgttttcgcacgagtctcattctcactctttgactttgactacttgactttggttttggtcaacctttttaaatgggctttaagccaagaagaccttgggcctagaatgccaatgtgcttaagtccgtgtaaccataaaagcatgtataatccacaaaattgtacacatcaatcccaaaaaagaatttataaacgataattacatttttacatttattttatatatatatatatatattttgatggtgttacaccactaaaataataaaaaaaaatcacatagtaataaaaaaaaaataattaaaaaatcaataataaattaataagagtacaatataaaattactatcaaaaaattgtatttcctataaataaaatcataaaatcgtaaaaatattttaaattttataaaattttatttttataattttttattatttttatgtatttacgaaataatcacggtataataataaaagaacatgcaacatgaaaaggacaaaaaatgacctttttttttaatgatacagaaaatgacctattaaaactgttgtattcagaaattctaataattagggttatatagacaacactataattaaatg

SEQ ID NO: 227927 - DNA, 2527 bp, Cannabis indica
agagagagagagactagggtaaaaaggtaaaaattcataagatcccacctagctaaatttcatatttagcattagcaatacattttgtttgttggaacatataaaatctccatataataataattcaaaacaaaacaaaataaaataaaaaacagaaaaagtatatataatgggttttggattcctttgtgattggagtcacttttccctctcaccgacgcatcgttcactttgttaagacaaaatataaatacagaaagaaagggcctttgatgagagaccttccaaaagaattccattgaattaattgaagaaatgtatacattcaaagacaaagtaacagagaagctttctcgttttcttcctcattccacaagctcacccatctcttcccctcctcctcaatctcaagatcgccaggtatcaatttttgagctttaatggattagcttaacaatgttcattccacactgtatttttgagatctgactcttttagtaatctctcaatctctcttttgtttttttaaaattgggttttgcttttttctttaattacaataataaagatgtgatttttattgttaatttgttgcattttattttaatgagaactcaatttgattctaaaagctattaaaactcatgggtttttcaaaattgagagttattgatctgttcttaagcttaaattcagagctgtatgagtccatggttttattcaatagggttgttgtggtctcttagaggagaatattttaacttgtgtatagtaacatgttcaagttttagtgcaattatgatttgggtatgaataatatgtctctattaacccctgcactatttgaaaagcagctgaattttgatctcaaaatgaatattcatgtctttcagcttaagtttcaagttttttgtatgtggggtactgtattgtactgtattgtattggaaatttgtaggccaaacagtctcctaaagtgggaaaatcattttcttcatacatatccaacattattccttcagtagcctttaatggatcaggatcagacaagcatcaacatgaattcaagctaattccatcattacctgttagatataataaccgaaactctaaacgccgcgatgagccattgggtagtgatgtatcatgtaatgcagcaaatgacagaaagggaattcaaaatgatcatgaaaaagacgaaatcattgacagcattggcaaggtctctgagggtagcagcacaagtagttccgaagtatttgaagaagcaatggatgagcacagtacccagaagccttcaccttatctcatggatgactctgtttttatttctgcagacttgtatgaattcttgttttcatcaatcccgaacattgttaaggggtgtcaatgggtgttgctttacaggtaaatctcctaagatattacatgactgctgctaaagtagctttattcttttgtattttgggcatttggctcttattcagtatttgatatatttaaaatgaagggcagtacgttgaaacatggcatatcacttcgtacacttatccgcaaaagtgctgaacttcctggtccttgtttgctggtatggttactcttgagttgagttgattcataagattatatcatcaagaaatttgagataatgtagggcagctatttgtgttctagattgtaggagataagcaaggggcaattttcggtggccttctagattgcccattaagacctactgcaaagagaaaatatcaagtaagttgatcctactattttatggatatgaactccatgtatatgtttttcaccagctcctcacaattctgaaaaaaatatgtatctctttctatgttttcagtttgagaataagttttctttctctattgttattagggaacgaaccaaacatttgtttttacaactatatatggtgaaccgagactgttcagaccaaccggtaagcacttctattttatgtatactctatttaacatgatttccctataaaattcacaagttagcattatttcttgctcatgaaaaaggttactgctggagtacgtatttgataacaagatctgaacagctcattttaaccagaactgaattcttgtgcatctgttgctcgaattttaaaatttaaatccaactatttgcttcattcttcgttgttgtctggggtggtttgttgtttgttaagatactaatctattcaggttcctttgcgaaattaaccttattaaatttatttgtagtaaaacccctcattttcaaactcttaatagtgtttgttaagatactaatctattcagtttagattactgaagatcagtatatataaatacttgtaagttttttaacagtctgatgtgttgaaataggagccaacagatattattacatatgcctagacaatttgcttgcacttggaggtggtggtaactttgcactgtatttggatggagacctgtaagttgctttatgaaattactcattctgataaaattaaactacttaaaaaaagaac

SEQ ID NO: 227928 - DNA, 1923 bp, Cannabis indica
tttattattttaactgaaaagatatttttgtaaataaaaaaaattcaaagtgtgaaaattaaaaaatatgtatatattaacttatttttataattttttatctattatgcaaatttttcttatataatgtgtataatgttattataaatacatatgttaatggtatgagttaaagtttattattttatatatgtttttgaccactttgaccttttacttgtggctttttgttaaagttttattaatattgtttaaaaaaaacttttactaatattgtcacaaacaatttaaataattgccaatagtgatttcaatttctttctctactctatctattagttcttttttatttttagctaaatttatatggatattgagtagggtgagtatctgattaaatataatattttttatgctaatttgatctaatttaattagtaattaaattttaaaaatcattatccaaatccaattaagattcaaaatttaatctaatttgtaattgaattagttcagtttttaatagaacatgattttttaatattgactcaaacatattcatacaataacataaattaaaccttactactctttattttaatgaaaatattaccaatcatttaaatcaaatagtacatcaagttatggtctttatatttttattataactaaaaactaaaaattaaaatagttaatagcataaaaatatcaattaaaatgtaacgttcctgttttaagagatcacctattctaaaattactccaggtcaagcatgcttaactatgtagttcttttgtcgaaaaataagataaccttgttggtataggtagtaccaattaatccatttaagtcatttttaacggtgtagtctcatacctacacagtctcagaatcacacttgacattccccaagcgatgtgaaattgtatagcttactcgatatttccctttacagatcacggtactgctaactgtcacataaaatgtcttcaaatattcaacacaacaactaataataagatgtactttttcaaaatcttgtctaattaaatataaaatggtaagtaggaaaaattaatagacttctaataataatgaaacataaatattattttttatatagataaatatagattttttcaatactacacaatcatgaaaattagaacttaataatttaaattgtcaagctatcatgatgctaaccttttgtacaaatgtttaggcatcatcatatatattatcattttattaactataattgttctttatattaattgaatttctaagcaatattttatgttgaaaatgactagctagtattatttagtactataccatttgtgttgaatgaatcaatttgagtttgacacaaatcacaattagttaattaattaagttattgttaatagaaaataatagatagttttgcatcaattgtaggtaggaccattaataacggccgtacaaactaagcaaaaccttatgatatatattgcaatatgcaagcataaattcaaggatattctctttattattaggagaaaattataaattttatgaatttttatattttttacaataatataattttttttcaaaaaaatattttatgagaaaattaaaaaatatatattttttttaaaaaattaagtaaaagtaactaagtatttttatagtaaccggagtaaccagatattttatgttgtttttttatatatatattttaattttttctaaaaatttttaattaaaaaaattatatttttgcaagtgtaaatttatacttttaaaactataaaaatgagaatttccctattattatatatatgctcttctacgtaccaatctaatattaatattagggtaaataccatttcagatcctgtgttttgtaaaatttgaactgattttttatcaaaa

SEQ ID NO: 227929 - DNA, 1028 bp, Cannabis indica
aattttgacatgtttaaaaacaagaagtgaaaaaaaaaggtccttaagcagctccagtactgctaggaatgatgttgaatgaagcagctcttccacctctccagtccttggcagatggtccatcaacagttttttgagtggctgcataaaggaacatttgcacacaacaaattgattacacaaattggttttaacaaaaatcaacaacacaatacaagcatataaattactaagaaacccaccagtgatggagtgcacggtggtcatcagaccctcgacaatgccaaatctatcattaatgacctgaaaattgaaacaatatagatgttagcaggcatttacttcccaagttcatcaaaaaaagagaatgaaatgaaatgaaccttggcaaggggtgcaaggcagttggtagtgcaactggcattggaaataatgtgaagatctgacttgtattcgtgctcattgacacccacaacaaacatgggagcatccttgctgggagctgaaatgatgaccttcttggcacctccctgaaagtaataaaatacaaaaattaatttaatgtaattatatacaagcgctcagtacgggaaaacacgtgagactgatttccaaacagaacaaatacacttttttcttcgacacatcgatgacaattgcctacatgtttcggacgtaagaaattccctcatctcatgctaagagtaaaaaaaaacgatctcactcaagagtaaggaaaaaaagaatgaaactatgggcagaaaatgcactaaaaaaatgtggaatataaacggaacatatttatattaaagcagaatgggaaattggttggagccctagttcacaaaacccactacatcaagttcaaaatcacaagggtataacgctgcatattcaattgaacggtagatatattaaagtgaaaaatggcgaaaccttcaactcacaacgagcataacgctgcgatattcaattgaacagtacatataaatatatatcaagtgaaaataggcaaaccgttcaaaact

SEQ ID NO: 227930 - DNA, 1862 bp, Cannabis indica
gacaaaagtccttaaatttaacaatctcaataatttagggggaatttttaacggcaaaaaaagttcaaggagcatgatttggtatatgttaaagttcgggtgggaaaattgctaattagcctattttatttggaaggctaggaataggtgtctttggtaccgttagaaattctctcaatagtataaagaacttgattgtaaataaattgtaaagtctagacattaagtcacaacaagaattagttgagaaaaatttgtgtagttggaagattgtttgtaatagttgatggtaaaagtttgttcaagaacaatatagatgacttatatttaccaaaaaaataaaataaaatattaataataataaattgtgagactatgcaagttccgatactaatacaaacactcataatttatgcatgtttttgtggttcggtgattattaacgtacatgtaatatatatgtataaatatacatgtatggcaaggcataaagaataatacactacaagcaatttaatcaaactacattgatatctcaatagtaattatgtttcatctactttctccaactttcttacttctaataattagcttaaccttttgtgttcgctctcaagtagttccttcgccaacgccatcgcctgctcgtaacgcacctccagttggtggaggtggtggggtggcggtggtggcggaaatagcactgctggagacagcagtggctatggttatggttctggagaagggtatggaagtggcggaggtagtggtggcggcggaggtggtggtgaaagtagtagtaggagtggcggaggtagtggtactggatctggctttgggtttggcggtggctatggaactggcgaaggaagcccgggttttggtgcaggtggtggtgggggcggtggaggtagtgttggacgtggaagtagtggctttggatatggaggcggttatggtaccggtgacggtggaagtagtggccgaaaaagtggtggtgtttgggaaaatagaaagagtttgtcagttcatcattaattaataattaagtttatatataatatattatagagagcattaaaatgcaacaatattgattattgtattaatcaataaattatatatattcatgcatgaatgaatatgtatggttctaattaattacgttgtataattgtgttgttctaaaatatgttataattaagcttttaaataaattgtagtgtataatgttgaatatttaattttgtgtggtgaaggtgaggaatcatgtattcataataagtttaataacctttttctaaaaaatataaatttaaacatggcacaatgttataagtgccaaattgagaaattcgatatataagtacatgttaaaaaacttagtaattaataataataataataataataataaatatttatttatttataaattaatgtaattgcaaatatttaaatttcaatcattataaattatagttttttttttcatataattgtatgtatttattataataatactttagctcattaatcaaaatttgaaaatgtgcggcataatttcaagtatgtttaactcaaatccggtcaaaatccattcgaacttggttcagcctgaacccggcccacccacactcaaaacttgaaaacccgataacacaaatgggcgggtttgggttaataattctggggaaacttacaaaaatactgaaatttaggttaacttttacaaaaatactgtcacacgaaaatcttttcaaaaatactgtgtttttatgaaacaccagtaaaacacaaagcagaacaattcaaaacaactaaaaacactagtagaacactagtgaaaacttaacacagta

SEQ ID NO: 227931 - DNA, 4349 bp, Cannabis indica
aaagagttttatttagggcataaaacccaacagtagcttaccagattcgctccctgagtagcattcaacttcggactaggctgatggtttcctaacggaacccaggaatcaaaccaaatggaaatggatctcccatcccttatccgacgacacattccctcactgagtagaggtctagccttcacaatggccttccaaagtctagagtctgatgacttgagttcaacatcccaaaagctactttcttttaagtacttctcattcatagtactacaccagagactcgatggatccataatcaatttccatccccactttaacaagaaggccttattgatatcttttgtttgcctaaaccccaagcccccatggaatttggacttgcagagagaactccaatcaatagtgtgaagagttctcggaatcttgatctccccaccaaaagcttcgcaagcatcgatcaatagaagtagctatggaggaggggatcacctcagttgcagccgcatacagtgagagtgaattaccaatcgactgaaccaagcaagctcttcctgccttcgagagtaatttcgctttccaaccttcaactcgagtttgaaccttcttgaccagaaatctgaaatcacaggttcttttcatggaccacagaagcggcaaacccaaatacacagtgtccgcaggcatccttttcatgcctagtttactagcaatgaggtttgcccgattgatggggactccttttgagaaagagattgtagacttttggaaattcatagcttatccagaccaatcacaataaatttccaggcattggaggaaggcatccgcctctttgaccgaggcttggccaaaaagcataacgtcgtctgcaaagataagatgcgtaacatgaggggccgatcctgatacttttattcccttgatcaagcccgtagcattgaaatccatgattaaacgcgataaaagatctgccgccagaatgaagagagcatgggacagggggtccccttgtctaaggccacacgacggggtgactgaaccttgtttgactccatttatcattagattcaatttcttgatacacatgcagcttttaatccacccaataagaggttctttgaatccatggaaaagcagcgcctcacatacgaagtcccaatccatcttatcatatgccttctccatatcgagtctaaccagcataaatcctctagaccctcttttctttgccatagagtgaactatttcctgagccattaccgtattttcagcaatggatctccctttaatgaacgcagtctgagcaggagaaattaagtttggcaggatggggcgaagtctgagcgccaagatcttggagatacacttatacacaacgttgcatagagatatcgggcggtagtcattcactaacattggattctcttttttggggatgagaactatgttcgtatcattaataaacgctggtagctttgccgtagtgaagaaatggtgaatcatacccattaagtcatctctaatggtatcccaatgtgatctaaagaatgcagcaggaattccatctggcccaggggccttgtccccacccatagacataagggcacaaaggacctcgtctatggaagggatgagataaagttcctcagactggggcaagcttaacatatcatgatgccaattgaagtccgttatacttccccggtagttcactttagaaaaaatgttgctgaatttgtcgataaaagccttagtgatatccttcatttcttcatagtggttcccttcctcatccttaatagcttgtatataattgtgccttcttctagtaacagtactagccataaagaatttcgtggcacggtcaccttccttcagcaacgcaactcttgatttttgtcgccaaaaaatctcttctctcgccaatgcctcattcagagccaatctagccttatcatgagaaacctgatccattgactgattgccttcgatgtcttcgagtcttgttcaagcttcagagatttgtgtggccagtttacggaaatgatttttattccatctccgcaaatgctctttagtggctttgattttacggtacatattaaccattgggtccctatggctttgagtcgtccacgccgttttcacaacccagaaaactctggggtccctttcccacattagttcatatttgaattgaggcttcgaacaatgccgtcccccacaagtatcaagaataattgggttgtgatctgatgatgcaaccgtgagatgactaacaattgcattgggccaagccaatctccaatctaccgacgcaagcaccctgtccagtctggctctcttgagactgggagttgatgaagagcttgatcccttcctgaaccaagtgaattttaccccattaaagccaagatcaattagacccgatctttgcacagctcttcgaaagtcaaaagagtaccgactgatattactcgcccttgagtaattcaaacaatcactgtctaatagtgtgccatttagatcccctattagcagaacaggcagagtgcagttgcagacaaactcactaatctctttccaaaagccttctttttctgcatataccggtggtccatacactcccatgagaatccaaggcttatcaggagggtccgaagagatacaagcctgaatttgaaacttgtccgcccgttgaatgttacaatccacacctagcttccaacacaaagcaagccccccagcagatcctactggaggaacatagcagataccatgaaaatgaatttttttcatcaaaccagagaacttatcttttgataaccttacttccgagagaactaatacttcgggattcgacttcctgattaaatccttcagttgtcgaactgtcgctgcattctcgagaccgcgacagttccaagctatggctttcatttggaattgggagtcttttttgggcaagactccacagccccaaactaaaaaacctggcttgaagaagtaacattctctggatgcgattccttcatctcctcaatgatgcacgaatgattaggctttgggatgcaatcaactaccacaaaatgattgtttagatcaatctttaaatcaaatgcattcttctcccagttcgcacggatagattcttgtctctttttaactgtattccttgcttgtcgttttagagagaaggtcttggggccatggctttgagcatcctttggtggccttcccctgcgtttgagtgcaggtttctgctcttgaggattagagctgcaacaggccttgccttgatctcgagtaaccggtctccctctcttccgccgtggggtagtatcacacgaaagaccaggagagaaatggcattcgtctcttgaagcaggggaggactcagtattgataatgtccacaaccgctcgagaaggttggcccgactcctcagaattaagagttggttcaggaaaagcctcattttttggttcaataactataccatccaaggcctttcttttctttggcccaaaatcatattccaaggatctacaatcttcaatccccattatagggttaaagatagatggctccctcatgaatttgtcaatagttcccaggcccgaaagagttttgaagcccatggaccacagatcattagaaggccaaggtatcacttgggcctggctacccagcaagggataataagacctttggccttataaggaatgaggtcggcccaacttatttgactcctttgaagagtccctatcaatctcagaatggttatgcacgctggacttggtagaatcattttcagagttctacctacgtgaaggactgcccagtacggcggtaggtactgtctctcccgattgagcatcattggtaaacgccagcaagctttaggtattgtcactatcaattttgtttgttaatacatccaaagggggcattacatcaggaccttttggaaccaccaggtttgcagtatcctcaaacgggcaaacatctccgacaccggggagcgtgaccattgggaaacgacaaactctcacttcctccgtctctggcatctcctccaccacctgttctaccattcgccttttaccaggaagctgtctccgtgattctctagcctcccaagaatcagctatgcgcagggaattagccatcttcatttgatctttgaactttgggtccaccggaagcctcttctgaatgatccaatcttggaaccactttggtgagtccggggaaaacggccatctggctgactcttcatgtttcatccaactcccaaacaagggaaataagtttccgttagggtctttggtgattgttggtgg

SEQ ID NO: 227932 - DNA, 1477 bp, Cannabis indica
atttatataataggtaagatattttgagataaacaaatctctatatttattattgtccataatctcaagtttttgctaacacaacacaagtttatctctgaaggagacatttatttatttattttattttttttattattattaaacaaaaaaacacaaatatttcaccatttttttttttttaagaaaataagttgaggacttcggataccatttcctttgtttattattattatttttgttcgggtaatgcccttttctttaatttatgtctttttcttggcgctaatactagtaggataggaagtagggagcgggagggatgactctggcttgtgggctgccccaacaaaaactcttcctaacaggaattgaccaatacaattttacacactttcaaaacttgaaaactatgttcttccgctaattacgctccatatttttacatattcaatgtccagaaaaaaaaaaaagaaatgttaaagggcatatatggggcttagtaatattaggtccatttattttaatttaatataaaattacgaactatctatagaatatattataataaagaaaaagtgaaaggctgtgtttggtcaaacaggaaaaagtgaaaaataaaatcatttttcttttgtacaagtgttgttccttcttaaatatatccatttcaaccccaccactttgtcaatcaatcctcataacacaactaaacccaacccaactctttgatgggagacttcatttgatgatcaccaaccttccaaccttgattgaatgcctaactaacgctatatgcccactcattccacaatccacatgtgtgcatccattaaacatatttaattttatttactccaatttcctttatgtgcccttttaatgttttattattaatattattatataagtgaagtctttaacatattgtataatctatataatatattactacgtggtgctgtctagcaccacaaatatccaataatcatgctctaaatgaatatgataatgatataaacatataaaaaacttataattgacaaaaatgacaagtcttcattatagttaattgttgttggactttaatcttggttctactaagcttgaaaagtcatgtcatcaattatctttcggcatcaagggggtcaattagatatctacttttaccatttagatttgggggtttaactatatatttagtttaacaaaatgtaaccaaacaaccaaacgtttggatttatacaactttctaatcaaagaataaagctgctaggatttctcgtttttagatccttaactcttggaggttgtcttttttctcgagataagcctaccgaccgtccttaggtttaggtgtgtagttttgctactgtaattaggcaagggaaatttgattttttatgcttacatttggttaaatttttttttctaaacaaataataactaatatttgtaaaatatgacaatttttatg

SEQ ID NO: 227933 - DNA, 2257 bp, Cannabis indica
ggaaagtaaaggaagttctaataaaaaaagagataaagtgtataaaaattaaaccataaatttcgtcgttaattactctaatattaataacaccatgaaaattttgatattagattgtgattttaccctcacctaaaaattctaaataattttgataagttttattattattattattattattattattattattattattatgttatggatttttatatcacaatataaagcaagggttgttgcgaaaaggatttttacaagaatatgggtatgattttacggaatcattcagttcaatcatcaaacccacatccatcagagttattttgacaatagatgtatcaaatagatagaaaatttaataatttgatatcaataatgcttttcttaatgggaaactcactgaagaattatacatgacacaacttcctagttttgtagataaagagaatctcgttatggtttttaaactgaataaagccttgtatggattacggcaagctcctagagcttggtttgacaaactcagaatccctttgtcatcatttagattttcagtagctcgagcagaccaatctctctttattaaaatctctccttctcactctacatttgtacttgtatatgttgatgacatattgatcacaggaagctctacagttgttgtgtctcaaattattacgtcttaatgaatcttttgccttaaaagatttaagagaacttgattattttctaggcattcaagttcagcatcttaactatagtcttcatctatgctagaaaaaatacatcatggaccttctgtgtagagctaagatggatcttgccactcccttcttactccattaatgaatggtggtgaaaagctatctgctttcggaagtgaccctgaggctgattctcaccaattcagaagtcttcttggtgccctacaatatgttgtaatgacaagactagaaattacatatgcagggaataaagtttctcaatttatgcataaccctctagaatcccattggaaaattgtgaagaagatatttagatacctcaaagagactctagactatggtttgcatattaaaccatactagatttgtatttgaagcatgcaattagaaagtaattatagataaattattaaagagaagagaatgaatgagcttgtaagatggatctcatactaataaaaactttttagttcttacgttattactacatccatgcacatgggacatatggactaattttaattaaatttatagtattaattgatcagaagattaaatattcaaactagagaagtcatcgatctctataaatagattggtaataagccaaagtttatatccacacaacaacaatcttattcttacaacaattatattatattgtaataatggctaaatctattggagtctttcttattgcggtgttcatgattgctaccacatcatcggtggccaacgctactggtaccatactcatagatggagtgaccaagttgataaccgaacttaacgttgttggatcccttgctggtacccaaggattgccaaccaacgcaatctctggagtctcagtggtcctcttgaacaccgtcaccaatcaagttctagccactgcagtgactaatgaagacggactatttaaaatcatttacattcccactgatattattacatttttgcctttaaactatgtcgtttctaccgttcaaggtacaaccttaccagttggtttccctctcgatggagtcttcaaggcacctcttggacaactcagcattctcacaaatctcgtgaaccttcttttgggtattgctcaatatcctactcaagcttttagtttcgtcaaactctaattaattcaattcagtccaataatttcgatcgagctagaaattatgtatgtatcaattcatgcataatataataatacataatgtaatgtagagctctgctttagcggcctactagtatcaacttataataattatattgaactactggagacttaatttcaaagcacttctttaatctctttggccttgttttcactaatattgctcatgaatttattccctattcaaccattttagtttcaactttaaaccaattcaatccaacttattaatagcataattatgaaatatgcactcagttgccataatattatataagattttttacaaatattgttatgaaaataaatattttaacatgtatttttagatacaaaaattaattaaataatt

SEQ ID NO: 227934 - DNA, 2568 bp, Cannabis indica
tatttttacagatttaattttttctattatgttgtttttaaagtaatattattttgacgttgcaactccatgaaagcaacttaaaacaatgttgttttctgaaaatacaattaaaaaatttgtaaaaaaccgattttagatactatgtaaaaattctctaatattttcccccaaattaattccaaataatgagtgcattgtaatgtatctcatgctcaccaagtgaggacttaagaactagacaaagataaggttgatggaggataggataaaaatgagtgaaattgttgggatcatattcatatggtcatttgttatggagtaagattatggtttggttggtgaatatcattaatttaaattgcatcattttatttgtttgtatattcaattaggtaatgctgctcatggacaagcaagtacacttaattataatataaaatgaaccactacgtgaacattattatcaatgaagttatgaaagtgtggtgtttactcaacatatagaaagaagaattgaatcagtcagacccaaaagttgggtcatgttgttgagagcctagaaacacactttagagcccaattagactgttgggctctctagaaatgctataaatgggccatttatcttccttgggctaggccttgtagtttccatgggttgaatgggctcctacgtagaaagatcttttgttaattacttttaaaattgaagtttctacactaaaaaaatgaatgtgtgtaaaaacatttcaattaggcaccatagtacctaatactatcttatacgtgatagagaatttacataaaaatattttaaaatcaacttgaaagaaaaatttacattaaaaactaaaaacttaaaaaaaattacaaaaatacaacaacatggagaaaatttatttttactctttgaacttaattatttagaaaatacctcttcagtaaaaataataaaacgttgttaatatttttttgataatttatttataattattaggaggttattttatagtttatttatagttatcgtgaggttaatttctcgttattttttagtcattttttttactgtttgctgagcaaagtgtatttttgtaagtttaaaaatttacaagtatatttttgtaattaaaaattttaggccgtaaaattataaataaaacataaaaaaaaatatattttaaaaattccccaaactaaaatatgtaaatctcaatattgcaccactattgcatttttgtaagaaaaaaaactattgtgtgtatctcaaaatgtagtttgtttccaaatgtcttgtaaagagaggggtgagagtgatacaaatagataataatattatattataggtatagaatattaggagtgactttcataatatatcaaaaaatacgaataataccattatcgaataaacaagtagggatcaaagtgacattagttctccaaaagcttctcccaagtcctactcgaccatgtgataatgttctagttattatatatataatcaaactaaagaatatttatattaatcataaattgttttctttacaaatattacaataacatttttcaaaaaaataaaaaataaaataaaaattgcagttttccttcttctttttaacacacaacataaagataatgataataaattcagcggtttatatttaatcttagaggtttataatatttgtttgcttcctctcatggtgctttatttgattaaaaaagaaaaaaaaaccaaacaagcaaaaacaaccttgaaataatccattaaatctttgtggagagaagaataaaggcttgaagagggtatttaattatttcatccaacataactaaaacgtttaattccattgtagaaaacaataataatatgtatgtgtagcaaaaaatggttatatcatatgtacctacttgtatggtggaaaggtctccaaccaaaatcatagaataaaacgaggtattgttcaaatgggataactttttcttagtgttatgtgttctttttcaaacctttcgaaatatcattaaagaacacgtattagaatatattacttattaatttaaagggaaataaataataatatagatataaagaagaaaccatcaacctcagcaagtcttgtgtagactctagagtctagactatgatatttaattaaaataaaatagtacctctcaaagtcactatttgaatgtaattttgagtaagtttataaatgtatttttttgatttaaaataatttagaatttttcttctttttttaagaaggaaaattctaaaactccttcctaaggagtaaaaactctcaaaaaggagaagaggaaagatatcatttaagatttatgacatcaaataaggtagtgatgaatataatttggaatatgacctgaccattaactagtacttagtagccacaaataaaccatacttagagcaagtccaaggatacggcaaaattttatatatgccgtgatttgtttcaaggagactgcaattttaccaccattttcaagttttatctacagtgcacggcatatatgccgtgcactgtagatcactgc

SEQ ID NO: 227935 - DNA, 1254 bp, Cannabis indica
gtaagcattatttaccgatcaattagatgtcgttagtaatgaaacgacagatatcacattgtcgttaaacggctaccgtcgttaaactactccgttcgtccccttccctaaaacccttctcttataccccacaaagagaaattttctcagagaaagttaagaagaaaagaagatcaaatcactacaaaaattgtaactttttcaaaagatccaatttttagttgatctctcttctctaatcgttcttgtcagcatcaatttttccaaagaccccatcttttcggagacatgctaggaagaaagttcatttctttgttcaagaattccgcaaaaccaaagctctctaggtacttaactaattttattccaaaccccatttttgtattttacttaattgaaatgttttctcgtgttgaatctgggattttcaaacatgaccattgacccattttctgtttgtgcagttctgtaaagtctgtgaatgaagagaagaccaattcatttggtcgtaaagctgtgtcttttattttgattactgttacaggtggtgttgctttgagtgctcttgatgatcttactatttatcgtagttgtagcaggtaaaatcccacaaaattttcattagtttgtcaataacaggaatgtaatcttatgcttcttatgttgttgtagttttaatcatttatgtttcataattcaattgaagtttttagaaattgttagctatttgtattcatggatgttctgtttttaaggtagtggtatttatagattgtattgctattaatgtaattaagtatgtgtatatcagaaataggtttggaaaagtatctaagaatattgaatttagatttttgtatccaagtgaggaaccatggtatattccattttgaaagggttgaaaggttctcttctttcttttaaattcatgtcttatagttcagttaaaagattccctgcatgggcaaggactctcggttagcagttaaagactttttggtcatttccggtaatctggtagatctactgaaccttttaggtgctaccttgtgatggtgttgaggtgctggtatttatagggtcaagaatttggattcttcaagttttatttttgtctttattgaagttttaataggctgtgattgaagaaattgaagtttctgaggtggtgatatggacaatacgagcttaaatattggtggtgatattaacattgtttcttcaatatcaatatatcaaaaagtaactcttgct

SEQ ID NO: 227936 - DNA, 996 bp, Cannabis indica
tcaattttagtttaaaaaactgttttaaatttttttaccaaacaaccccgattaatttttaaaaattattttcaattttaaaaaacaaaaaacaatttttaagttttgaaaccaaataatctctaaatttggacggtatgatttttttctggtattaagggatgacgtgtcacagtagatgttatatttgtttctttaacactatatatagtaatagtttaataattttgtacataattaaaataaaaaaagagttgtgactggcacaagagtcaacaaaacaagcccactaagccgagtggagtgtgtgagccggggttttgctcatttataccgcatggtataaactctcaacgcattttggaatatccatttatcttttctcaacaaaaaagggaattctacattaaattacattaaataaaatgtgcgttggccagctctgtcacactcactccagcgtctcatacaagccaatcaaaaacagaattacaaatcagaaaaaggaaaaaaagaaaaaaaaaaattagagtttcacaatgtcatagtgttaaattctgtaaaaataattaaccagtgttggctaaataaaaaatgttatagaagtgtcaaatactactgttggctaataataatattcaatatattaataacactactcctattttaaataaaatggaaactttttataaaaacagaatacctatttttagaaaataataaaattgtataatattggacataccgtattatagtaagtaaggtactaaaatggtatattctttattatataataactactaataaaagttttttaattgaaaaacaaaaatgaagttggaatacatgggctacctatacagattacaatatcataagcatattcggatcttttgttttgcacattctttgttgaacatgaccaaagctttattatcccacctaaactaaattgtctggctttatatttttaaacaacatgtgtttcagcaatga

SEQ ID NO: 227937 - DNA, 3777 bp, Cannabis indica
cattgcccttcttctattccctctttctcaaaggaaaatatgttttcacatgaccgtgctttttgcattcatagcaaataatttgatcatcttttcttgagctctcccttgagttactccctttgtcaaatttatttgcattcttcttaaactttaaaaactcggaacttagctcaagctcttgaagaaaagcaaattgatgaggtggtgacactcggcgcacccgccaggatccatgagcattattagttagaatgatcgtggattggggagtaaatgagcattccattctctcttccttttagttaagcactttcacccaacctttttgtatattatggagactaaattcccggttggtgttttaaataaatatgcatcgaaacttaaattttctaatggtttagaagttctacacgtcgggctaagtggtggccttttgttgctctggaatcatgatgtggatgtaaccttactttcatatgatataagtcattttcactgctatattaaatttccgaattttactgcttttacctttatgagttttttatggcgctcccattccaataaataaaccacgctcttggaaatcgcttcatcgacttggatccaatcttcgcctctccccttggcttatcatgggtgatttcaacgactatcttactttgtctaataaaattggtggagacatgtctcgttgcccatcaactcagtttcaatttttcgtagatacctatgctctccaccctatttgtgtcttaggtagccccttcacttagaaaaatagacaaaagcaacaaacccatacccaagagcgacttcattggggcattttcaatattgaatgggactcatctttcccaaccgctcgtctccttcatggtgatttttttggctctgaccatcgtcctctgattttaaccctccatcatcaatcttctcattccaaacccaacccccgattcaactttgataagctctggatgtcagaagcaggttttgaagtctgtctttgctctgcttgggcttcaagcaacccagttcatgagcaaaattaatcccttggacctcctcttgccaatcaaatcagggacatccaatctcaactcaaaagtgtgcaaaactctcttcagcatactaactctcaactgactcagggtaggtatcttgaaagtgagttaaatagacttttacacaaggaggaagagtacagcatcaacattcgtgtattacctgactaaagcttagagataaaaacacttgttatttccatcagatttcctcttcatgacgttatactaacaaaatctatttcctccagcaccctgatggcttcactgtcactgatattgcatctatattgatgatcattgcataatattttttgctcatctatttcagagtaaaaataccgacagtgacatcatcaacaacgtcttctctggcatcacagagcacattactgaggcaaaaactgggattttataaacctctttctcagcgagtgagataaagagagtaactttccaacttgcaagtgataaagcccccgaattagatggcttaatggatcctttttttttaaaaaaaaaaactggcacttgttgggtgaggatgtcatctgagcagctcaaagctttttggatggggacactgatatagcctcaataaataacaccgtcatagtccttatccctagaaaagcacatccccagcaactcagtgactaacgtcccattagcctttgttctacactttacaaaatcatctccagggtgttggtcaatcgcctcaagcccattcttagccgtatcatatcccccacttagagtgctttccttccaaactacttaatatatgataacatcatcattgggcaagagggcatccactccctttcccatcgcgaaacgggtcaactcggatggatggccttaaaacttgatatggctaagtcctttgactgagtagagtggacttttgttcgaaaagtaatggagaaatttactttcgcaacccatttcattaatcttgtcatggcctgtatctctacgaccaccttttccttttccattaaccaacaggccctaggaaaaggttcatccaatcagaggaatccgccaaggggatcctctcaccccatatcttttcctcttgtgctcagaaggtctctcctcactcatctaccagaaaactcaatagccctaaccctacaaacactcccaagacattaaaattgcccgtactaccctgacaatttctcaccttttccttgcagacgatagctttctctttagctcaacatctataaaggcagtgactaccatcaaggacatcttgcgtgattacaacctgacttccggccaaatggtaaattataccaagtcgtccttctttttttctacccaataccaacaacgacattgaaaaccacatcacatctcttattggtattcctattcgagactcgattgacaaatacctaggcctaccccaaacctttgggaacacaaaaagaggctttcaactaccttaaagatcgggtttggtctcatttgaacaaatggaattcacaacatttctcctaagggggaaaagaagttctcttgaaatctgtagttcaagccataccctcctatgccatggcatgtttcaagatcccggcctcctttcattctaagcttgaatctatgatggctcggttttggtggggaggaactgagcacaatcgtaaaacccattggaaaaaatgatcttcctttagctttcaaagtttcatgggggtctggtttcgttcaacgaaagctttcaatcaggcgatgttggccaaacaagcttggcggctacttcagtctcctcattccctagtcgcaaccttactaaaaatcttgccatttttctcatacctccttcctagaatcagacaaggttcgttggccttctcttgtttggacaagtatctcttgggggcaaagaactcctcatgtcaggtcttcggaaatcagtgggtgatggtaccacagttttaatcttcaatgatgcttggatcccaggatatggcaagctcgcttaccttagacaccttttagacagtagtataacagttgcaaacctcttaaccccttccaaagattgggatctacctcgtatcctaactatattcccaattgacatctgtcaagccatccttgccattcctcttaccacccttcccgttccgaaaacttattactggtgcctgacaccacatggagcctacacagtcaattcaagttatcacaaagcacacaatttactctaccaaagtgatccaacaccctcgaacaccatgactacttaatcatggtagaagcagatgtggactcaaccaattcctcccaaaattaaatattttctttggcaagcttgtcatgatattcttccaaccagtaactataagcaaaaaaatttaattacttcaccaagttgttgtcgatgacactatcacaatgagaccctagttcacgctcttttcaggtgttcaactgtccagtaggtatgggaattaactaacttttctgtttttattgataaacatgcatttctcaattgtacggacttccttcacctagctcctagcactttcacagcgagcaactttcattttttcgtttgtttgctttggaaattatggaattgcatgaatgaatttttgcaccacggttcgtttctagtgcccattaatgtactacaatgggttgaagattacttagaccaataccagcaccataacag

SEQ ID NO: 227938 - DNA, 2029 bp, Cannabis indica
acatattttctttactgtgtgcagcagactatctagatatatattcgagagaaagaaagagacctgttgtgtgagagaccgtcaatcacaaaaaccacacattcccattgaaccctgttgttgtttggagagattgaatgccatacctttttcccttcctcaactaatcgttttgccatgatgatttggttcctgaagtaaacattaaaagagaatgaattaccaaagtattctcaaaaaataaaggatgagatgttgcatgacggcagcaaacagacaaaaggcgaaggcaacagtcgtgaccacttgatttgtccgttgatagtactcattgtttaatggctttcattcttgaaagccagatatggggacataggaaacagaggccagataatatttctcaagctaaaatgtttctgaaaaggagaactatacatctaagtataagagatacagtgatccttgtagattacctgtgatgcgaacagcctgaatatagggagacctgatttgcaaaatctaaaagttctttattagaagcggagtttgcaatctccttgagtagaagggatctctcagctaagcctgccaggcagtacttaaagatagtcgcatctggtattggatttctggaacttgaagtactcttgggagctgaatttctagcttctatactttcagagtcagttgaggagttgtcttcatcaaagttgtcagggtctacagttgaacttgtcattaaagtatcttcaacctgaaaccatctgctcagaagacaacaacgaccaaaaacaaaattctaacatcagaaggaaatggtatataccttattatgagcggtcttggtatgagagttgcattcatcgtcatgtgcctccagtgttggatcaaccctaaaggttgtggaaattctgtcttgtcccaactttgaacgctttgatgacggattaggttttgtttcatgtgacgaattttgatcaacatccatcatatcttcatccactccaggtgactgagatatttgatgggggacagagattgaccttttcgacattgtagaggatactcgagtatttcggtttcgtgaaatactacgtattggaggtgaaaatgcctcaaagaaaggatagatttccatattaggcaagtgaaacctaatgctgaaaagcctattttgacacttggatgaaagctgaaacggggggaagtgggacaaactaatcaggcaactaatcaatttgcacagaactggaaatatatgtaacgtttataaggaaaaataatacaaagtacatctatgtttgctccatttaaagactgaaaaatgtcaaaccatacaaacgacaatcccatactataagaaataaaggtgtggatatactaactagggcatattatcgttatgtcaccaaataagaatacatagctaaacttacaacaaaagagaaaaagtaacaggaccagaaagtacaccagggccagacggaaaggaaaaaatatgttaagaaacttcaaatacacagtattcttcaggtttctaaatatcatttaaacaaaaatattatcacttttgatgtagacacccattagtcctaaaccaaatatgtcccttatggaatgtgaacatgaaaaaattagaacgggagaagaaccagaaaacactaatatatgaccataattaactaaatctagaggaggggggaaggcagaaacaaatctgaatagatagggtacaatacaatctatctccgagataaagccaattaacttgggctgcagcagctgcttcgagttacatcctaaagtctcggataacaaccatcccagatttttcgacaaacactaaatcttaaaccaaaaaaataattactatatggaaaaacttaaaatgattttgctaggcttcatatagttttcttgtcatcaaggtctagcgagttcactaattacaattttgttttagaagataagaaagggtaacaatgtgtagtacaagatattccagagaacaaaatatagaaaaacaaaa

SEQ ID NO: 227939 - DNA, 2379 bp, Cannabis indica
gattggatggatccagtctgatccaatacatactggatctaaaatactggatggatccaatccgatacaaaaaatactaggtttaaaatattggataaacccaaattaaataaataaatatatatgaaatacatccaatggatagaaccgatccaatccaacatccaatggatgttggatcgattggatgatgaaattaattggatcggatcggatggtaaaatctaacatccaatatatgattggatcggatctggataggcctaaaaatattggatgtgatccaatgaacacccctacttttaattaagtaattaatttagtataaaaacataaatttttgtcattggattaaatttgatgatttaattttaaaattaatatttataattatattttgattacccattgagaagtattttatatgaagaaaattataaattttatgaatttttatgtatatatattgaactaagggaaaattttagggattaagtttttttttttattttagtgaaagagaacctcagttcaaatttagattaaaggccaaatagaagtgggattcaccgggggaaaatccctccccaacagaggtctgcgctgaagaaaagttcaaacaggcagccttggaccaaaacatacaacatatagtaaaaaaaaaaaagtccctactaatgaaaataacataacaacaagagaaagaggacaacaaatgcataagagaggagaacagagcagtgagtttccaatgaggcgacttccttaagttgatagcctcaaccagaatttttgaatcagatagaatagtaaagttatcccaaccgatcgaagttgcccactgcaacccgaaaaggacagctttcagctcagcttccaagctcaaatcacaggtacccgacgattgcccataccaccagtgcgtcgacttttgttcgagagccaccattgcacaaccatacttgccttcaaggaaggaaccatccaccaaaaggcgtttgtccaaacgcaaggcaggaaatgagggattagacaaaccagaatgaattagagttgagtcccccggctcctgattcgacatttcagcgaatctacaattgatatccctcctaatgttatctagactcggaacaacactaggaggatgcatcagcgaattcctgaatttccaaatacaatccatcacgattccagtgcagcatagcagtcgatttctaccctcagagtccaagtgatcaatgagattaaagataacctcagacaaagaattgccagggatatcatccattctcaacggcagagggaaagagaaccataaagcaacagcaaaagagcatctgcagaataagtgcactggagtttcaggtgccaaatgacatatcggacatgtgttgttctccatcgccataattctgtctccagtgggcaaggagccagaaattgctctccaaatcatgagactcaagcgcggatgcaccttcgaataccaaatccacttccaaagtttactagacacaccgaatctagacttctgatcaagccaataagcccctttaacactgaaccgcccaacatccgaatctttccaaatgagaatgtcactatccccattcctatcaatttgaatggtactgattctatggcctaattccgagccaaatagaaaacacaagtaacccaaattccattttctcgttcttctaaacataagatccgctacacaacgcaaattgggcgctttcggtctaacactctccatcaaggctcggaattcctcatattccatccaaggaatccacggttgccaccacacatccaaggaaaccaaacaagtacaataccaggcttttatactttttatattttttgtgtaaaaatatagccttttttttcaaaacaattgtttgatggaaaaattgaagaaaaatgaataagttaagaataaccatgtacctttatgataataagagagataacgatatccataaaaagtaattaagttatgaaattccctaatatttccattgagtcaacttttcatataattaattagctaggatttatttctcccaaaccttaagatgtaattgcgcctactaaacttttctaacatcagttaaaaaaaaattaaaactattaaaacttttagagattcaaggattttaatacaattatatgtttagttttaccaacagagtttaagttaacgtagtaattatttatgtattaaattgtgtcatttaaacattagcatgtatcaaattgtgactcgtgaattttgacatgtatcgaattatgtcttttgaactttcgtttatgtttggaaactgttagtaaaattgaactaaaatccttgaatcaaataactttaatactttg

SEQ ID NO: 227940 - DNA, 3316 bp, Cannabis indica
cgtctttatatacatcacgggcaagagcggtcttccccactccacccattccccaaatagaaattgttgtattgtcaacattattttccagcttacttatcaaaatacgcttgtctgtttctcgaccaatcacatccgtagcttccgatgagtatggaatttccttcaaaagccaaatggattctttaactgagttcggatcgtacgcccatttatctgcatccaccataaattgatctgaattcacacctaggcctttcatggctaaaatgatttgtcgatgcagactgagacggtgaaatttaaggcagcagacgttgttgttggaagcggcttcactctccatctgtgacatgagcttggctgttctcaacttatccaccaaatcatacatgtcgtagtagaaacgtttcagctctggaaaccaattcttcaacacgtgctctgcagcttcattttctgaagaattcaccaagtatttaaaaatgtattggagctgaactttctctgcgtcaatcatcttctttcaacctccacaagactagcctccagattaatggttactgcactgaatctgcaagtgggcttaatcagattttggttaatctcttctatacagatcttcaaaactagttttaggcattgtttcaatacaattgagacaatttcttcgcagccacaacaagccatattatcactacaatgcttgtaattgtgttcctaatagagcaacaggggtattaagatcaacttacttaatgctagttaagacataatttcatgtgttgactaaattgatccaaataataatgacagaacgattatatttatttaattatcacctatcattcatgcccccacttaataacatgattcaaattgtgatcgatcttaattaatttctatctgtttctcatacaagttgagatgaagcttctcaaatgttattggacaattaagttgaccttattaattgccagtgaaattattattaataactatgaagcagcgggaatagctctggtggctggcttcgcaattatataatagtatatatatgattccattcccatgttgatggtgatgtttgttttgaccaaaaagagaacgactccgctaaggaatcagctcttatgctagtaattggtgttaatcatttgatttgtggttataatgagtttgttacattggttttagcattgaattttccgttagtgttggtctcctctttaccaacattacgatcccttgatagtttttttttattagagcttgtattcctctttgagaatataaataaaatatgttgtactcggcctccttaagctaagaaaatcattttatcaaaactgtgcaaagtttaacttggtatcagagtctagaaagcctgctcaatgtcgccccattctaaaactcctcaggccaccaccacaactgcaacagatgctacaagctcatcagtctctactcctcaatatacactcagccgtttaatacgctgaaccaatcatttcctccaaagcttgactgtaagaactatgttctctggagaacaatggtgtcaactgtgatacgaggacatcgtcttgatggctttgtaaatggaacttgaccctgtccaatagagttcatccttgccccaactactacagaaggagtacctaatttttgtgtcaccattaatctagagtttgagaattggattgtgagtgatcaactattaatgggttggttatatagctcaatgagtgaaggaattgccactgaagtaatgggttgtgaatctgcagcaccattatggaaagctcttgagaatctttatggagctcactcaaaatcaaggatggatgatactcatactctgattcagaccactcgcaagggctcaacctccatgaaagactacttgaaacagaagaagacctgggtagattctcttgctttggcaggggaaccatatcctgagaatcaactcatatctaatgtcacctccgatcgacttggatactgagtactttctgattattctgcaaatcgaagctctctcatcaaaagcatggcaagagttgtaggggatactactcacctttgacaataagatggaacgccttcaaaatctgagtctcaacaacaatactaaacctactcattcccctatttcacctaatgaaaactttgtaaatcgctcaaacacaaacaacagaggtcgaggaaacaactaccagaatcaaggaggaggtggtcgaggaaattatgctcgtggtggttgaagcaactctggaagaggtcgacatgggtgctcacagatatgatgaagcatacatgggatctgatcccaaaattggtggccaaaccaatcacaaagttaatcagggagctgcattctacactgctacacctaaagctgtcaacaatgaggcttggtttgtgaacagtgatgctagtaaccatgtgactgcagatgagaataacatgatgcagaagaatgagtatggtggtaaagaaaaactcatcataggtgatggtaatagccttaacatttatcatcctgattatggaaaattatagacgaacaatgtgtctaagtccctgctattaaataatagttccaaatattgcaaagaatttgctaagtgtatcaagtttaacatcataaaatggtgtatttgttgaatttcaccctaattattgttttgtgaaggacaaactcaaaacgaaggttctgctggaaggagtgcttagagatggtctctaccgattcaccaacaaatctattcttagccaaaatcaaccttagtatttctctggtgtctcaagtgtgtctaaatcaaatgttgcttaaacagctagttttaaattttccaagaaggatacgtggcataggtgtttaggccatccatccactagagttcttaaacttatttgtgattccaacaatgtaaaaattcccaaagatgaaatagaaaacttttgtggagcctgccaatttggaaaatcacatgctttcccttttaaaatgtcttattatagagcctctaaggtgcttgagttaattcatacagacttttggggacctggcccaatttcatctaacacaaacttcaaattctacgtacactttattcatgactttagcagatatacatgatatgatgcacttaattaatgctttcatagaatttaatttttttttgaaagccagtttgaaaccagaattaaaagtattaaatatgattggggtggagagtaccaagcatttgaaaacgtgaaaactaatggtattcacttccaacactcatgtcctcacacttcagct

SEQ ID NO: 227941 - DNA, 1842 bp, Cannabis indica
ttttcaaaattttgtaggatatcttaaatagctataacgtacatgaataatacaaaacatatttttcttttttttatatatataaaatttatatttatatttttaattagttatttaatttgtatctatttaattcgagtgatattattaaagagtcttatactataaaatacacaatagtataaaaattcagaagataaaaatactaattattctaataaaaataaaatatatatatgggtaaataatattttggatcttgtgttttgcaaaagttaccaattgaaccttctgttttgttaaatgataaattggatcttatattttccaaaatgataaaaataggaccatggctcaattttcaacaattttatttttttaatataattaactctaagataatttctaacacgaaatgatacagaatatgtaaacagttttgtcatatatatctttaaatcagattattattaagtttattttgacaaaaaaaattagtttaggaatctatttgtacaattttagaaaatataaaatctgtttttgttatttaacaaaacagataatctatttaataacttttacaaaatacatgatgaataataatatttaccatatatttatatgagctgactaactctactatataaatgggaaagtgatatgtatatgggaagttttaattatttggacataactaaataattaatatttaatatacaagatttttagtgatggttggagttatcaaataaatcaaatttagtatccaaaatttaattaagaatagtatttaatgtatgcaattaataaggaagaaggataattaagtttggaaagaaaaaaaaaggtaatttgatgttgtgataccattgaggaatgtggagaaagagaatccaaaggtggcgttaattttgagaatatatggaaaatggaatatactacaaattccattttttatttatatatttataaaatgagtaactaaatggtgaaattaaatcactttcttaaagtagttttgtaaaactatctcggcgagatggcaggcccctgctctggattctttttcagtcaatgttgatgcgggtgtatgagctacgacgagtacctcttcgactgagatagtgatacgaaacagtgagggacgggttatgtttgcttcaactactgtgaagaatcacagttgtgaaccgtttggtgctgaactttagagcatcatgaaggatttaaaagttggaattcgcctacaggcgattcatctagttaaagtgactcatagtttagccaattacgctttggtatgttgagaatcatgggtttccatctcaaaaccaattggcaatgagtggaataacccatgttcttatatatggttcaatactttcatatttaatccatgtgggacagtattctccaatatggtaaataaagttagtgttatgtggataggaattcttttctctcgtgtgagtcatgacattcggcttgagttgccaattcttgtgtaattgctcttcttgtattgaattctatttgaaaaaaaattataataccattgaggaatgtgaagaaagagaatccaaaggttgcgttttgagaatacacaaatacttatttttcatttatataactataaaaggagtaattaaatggtgaaattaaatcactttcttaaagtagttttgtaaaactatatcttttattttttatagaaaaatttttttttgacgcgttatagaaaaatatttcataaagtattataataaaaatttccaaacactcgatgatagtgcttatgtaacgtccttacttacgtaaaataagatgccataaataaac

SEQ ID NO: 227942 - DNA, 1734 bp, Cannabis indica
tgagaaagcattttaacagctacttgagtaccatcatcatttatgataccatgaaacacatatccaaatccacctttaccaagtactttttacaaagttgtttgtcatttttgtcacttcagaatatgtaaattgtcttttcttggactcatgatcaattaatgaatcagtttgaaaatttgacgaggctaaattctcagacaatacaagacctaattaaaaaaattccacagtaagactatataaatatatattaatcgatggagttatacataaataaaagaagacattgattattaaagaagttaccaattttattctttctgtttttaagtgtgagcacaatagttacgactattatcaataagattatcagtccaccaaatgatgttgctattggaattagtatattcttcttcttcttgtttacacaaggagtggacaaaccacataataaatcttgattttctccgaaactatatattatatatccacataaaaaaacttataaagttagtgattgatctgaaaaatttgcttccctaaaaaagataacatattcaaatagagaaaaaaatgcatactttactaatagcaaaccattcttcgatttttcaagaagtgaagctggaaccgagcctgtgagcatgtttcttttcaagttcctatcagaaaaacaagattaaagctcttttttgtcagaagaagattaaagttgaatcaatgtactatacatggtaattgatagtgaatgacttacaacactcttaaatttggtaaagaagataaaaaatcaggcacgaatccagttaagttattgtctgataagtctctgaaatagaaagtaatatggtatttaatgttaatgtaacaacatttttagatttttcttgagaagaactttacaaactaattatgtatttgacagtacttacaaagattctaacatagtcaatttcgatatatgttcacttatactgccacttaatccactcgaagataagtccctgattatatggtaattgattaattagtcacaatataatgtacaattaaaaaaataataattcaaaattttaaagtaaatgaatcaaaattaacttacaaggatctaattctaggaggtttaaggatatcattgctacaatttagacctgcccataagtattttaggggaacacaaggatctccatcccagtttttcttcacatcatatgttgattttatgcccatgattgcctccactagtaaaaaataaggattatacactattaatattaataaataacatagtagctgttaaaaacaaatataagacctaatttagtggttccatacttctcatcacaaaaagaaattcacaggaatctccttctccataagtcaaaaaaaaacaaaaaaaaacaaaaatacacatagtactatatacacaaaatacattattataaaaaaatataataattataaatgagcattgctattggcaccagtgtgcctaacacttttaaacacatcgtcttccaattagctaacaatactccctaaaagttattacatatattattattattattattatgtttttttttatatgtacttgtagcttttggttaatttagtttgctcatttttttctattacttattcactaaaaacattaacaactggttaccatgtactcaagaaagataaaacactggtaaatagttggtgccttttttttttttttttttt

SEQ ID NO: 227943 - DNA, 2179 bp, Cannabis indica
ctctcagacaaacaatcaaacagcttacgggcacaaccaatctctttacacttcccatacaaatcaatcaaacttgtactcacaaaagcatcacactcaaccccacacctcaatgccaacccatggaaggtccttccttctctaacctttccctcacttgcacatgccttgatgacagaagggtaagtgtatctatcaggaacagcctcctctctcttcattcgaataaaaaccgaaatggtttcagcagagcaagacttctggcagtaccctttaatgacaacattccatagaaaagtgttgggggagaaaacacagttgaaaacgctggcagagtaagatagagtggatagagtctgagagaggcaaatgaattgagatatgatagtgtggtcttgctctaaaccacttcggacaatttgggcatgcacttgttgaagatggcttggagttttacaggccttgatgagaccttgaattgagggcaaagagtgtggaatgtttgggtatggcatggataggcgattgagtctatatccttaagaaaaaaaacttattacaagttacacacacacatcaatggtggaattcaataatgtttaattgaaaaagaaccaaaaaactggcatcaagattacacacacatacaaacacatcaatggttgaatttaattctctctgattacagaaaatctatttcgattccaaacacatacaaacactgatatcaactggcaaccacaaaaaaactacaaatttattcttaaagaacatctatttagattttaaacatagttatagacatcaaatttggtagcagcaacaagttccacactcgcagtaatttattaaagaacctatttctattcaaacttgatatgtatacatactgtaccaattatctagaagaacaaaaagggcttaattaaattctaaataatgaattgggtttggagctaaaaagattaaaaaaaaaagtccttggcgagagccatttcaacgtttttggacatttctttgggccattcggagaatgtgactacaagactcttcatttccatttccccaaaaatctagggttattgtcagttcattattttggagagaagaaggaaatagatcatattttgagaaagatgaagggtcgtgaaattgcaaatgcaaacaataaaaatagaaacttttctccttttgtttatcttctttgttttcactttgattttctgtttctcatctcatctgggtcaattcgaaggtggtttcatcaatggtgatcactgagaattaatgatattctttcaaaataataataatatatatatatcaagtaacaaaatgaacaaaagaacaaaggaactgtttacaatgcacaacatactttaatttttaaagattatcatacttgtacttgtacattgctgaaatggatagtaactttaaagtaacattgttgtgaatggcttttctttatcagatcagatactataaagacccttttctttaaggctttcaacagtgtcccttaaactcacttccaatggtatggagtgtaaaattcctaaacttttctctatcaaatttgatacttggtaagtttgcatgagaggctcatcgatttcgcatctgccaaacaataagaactatcactttaatacatatttagtgattaataattagctcataataagcaaaaaatttagtgttgttacctttgaggaatggtgatagtagggtagagctgttgtaaaatctttaaaagctcagaaatgtgtgcaatatatccacttaggaaatatcttctaccaactgatccagcttcatatgcttgaatatgtgcacttgctacatctctaacatcatgatatgaataaactttattgggaaatgtctcagctcctgcttataaaaataagttagattaaatcttaaaacacagaaaatggcaaataaaaatagataccatttgtgagattcatgatgagattaacactatcattcatagtaggttgtaagagagggccaagtgttactcctggatgaatggtgattaaatcaattccattctcttttgcaaattcccaagcaactttctcagctctggtttttgaagctgcataccacatctttaaaaacaaataaaatatgaaagattagataaaagagaagaagagatgagcta

SEQ ID NO: 227944 - DNA, 2021 bp, Cannabis indica
ttaccagatcacgggactactgactgtcacagagacgttggatctccttgttttaaccttcttttcgattcaaagaaactatgtagagaactattacataagagagaactttggagtcctaatacagttcataaccatattaatgaacttgctaagaaaatgaaaagctagccaccaagaattcttccctaattatatttataaaacttgatcaaataaaaaataaaatatataaaacttatcagtccaaaaacaataaacccaaataatttatcatctattaacttaaacaaattaaaagataaaactataaagggttgtgtaaaaaattgagggctcattaacttaaataaaactataaatagagggctcattataaccttgtttgctctgctcacctcaccatttgtggttgtgtcaaaaattgggcaagggttttaacatcaattatgcaagtaaatttgtagttaaatggctattcacattcagagtcagaaccactttttatagtgcttgaatcacttaaaattaatggcgacactagtatagtaccctttgaagacaattcaattcactgaaaaccacctatattgttttgtttgtaagagattctcctaaaatttggctaacttttctatttgaagtatatggctattattagggatggacatgtgcaaaaattacaggtgttgagttttgaacttggtatatattgtactactactaccaccactctttattcttatgaattattttaacaaatcaaaatagtgttctttcaaatttccattcgcttgcttttccaactattgggttcttgtgtatacaggaccctactttttgtccattaataaatgtattttctttgctaaacatatatagctgttcttgactcaattttaaatgagtatagaataatattgaaaaatgttaaggcgcatcatcttaaggtgacaagtattataagagttgctaattttatcggattctacacaatttttttaataaataatataaaaaaatactactaatcactattgacgtatcacatcaatatagtattagatacgttaaagtatcgaacaacaatgctcttaaaaatttcagtacactagaaaaaaaaaattaatcatgtacagtatattttttttaattaaatgtcatttctagtcacaataaaatattgtttgtgggactgaaaaagatacttaaagaaacaaattatattttggtgagaaatatgtttttgagtaattttatatactctctctttatttgctatggtatctaagacagatttttagtcttttttttttcttatgattaagtacgttataattatttaaaatcacatataaacttttaaattattctgaataatttgcaatgttgaaaataattaaagttaaaatattttgtcacacgcgtgatttttttttcttcttatatttgtggtaagtaattattagaatattattatcggcactgtaaactatatattaagaaatttttagaaattaacaaatggtcctaaaaaattacgatgtacgtacatgattataaaaaaaataatggacttaaaaattttcttgcactacaaaaaattttacttttagtcacaataaaatttgactaattataaatatattttttatgttgtgactaaaattttttttgctaaaagcattagtgacaaaaattataatttgttgtaactaaatgtgtttttagtaacaatacttgttgtgactaaaactaaattggtaacaacttatacctaaaaatattttagtcacaaaaaattatttttgctataactaaaagtgacatttagtaaaaaaaaataatattatgattaaaagtagttttttttatatagtattacatgccagaattaataaggagtgttcgaatcagattttttagctagagaatgtattataaatttttccaatccttttaaccacaaattattgagaatgtaaaattaatagggaaatttgattttctatacttagaaa

SEQ ID NO: 227945 - DNA, 1074 bp, Cannabis indica
ttgtatcacactttataatagcatatacattatacatatgtgcccacaaaggatttttaatccaacaggaagatcatcaattcaaatgatatatatatatatatatatgtaaatataaatattatttgtgtgaaacttttgggtgtaatttcttctttaacggccatgcacatctactaattatgtgtagtaactagtgacgtaactaaattgcatgcacgcagaaattatataacatatatatttctcagcatatcttagtacaatatattaaatttgatttgacaactttttgtgtaatagactaattttactaccacaaaacaaatctttttagtggttttttttttattgattaataaattaactgacccttttgagtgtaattttattaaatttatcaccttatggtattaattattataaaataactgaattaataagattaatataattttaattagtcatttgtcttccttatttcgtcttctccctaaacaaaacaattagcagtcccttcacaaaactctcgcctaaccactgcctcccatctcctattactctattttcatatgtttttacctaaattttttaaatattgtatttttcatacccaaaaatatattcttgaaatttgatcatcttttgtttgaattttcaaggtaaactaaattcagagatggtagttgtggttgtagctccgaccggcgcttttggtggaaaaattgttaaatctcaacatccattaaagtctaaatctaacatctaatagtttcattaatgtaaattgctttttttttttttttttaatttgaattttttttttgatgaataaggtacttgtattgctcaaacaatatttacaattttgacaacttacaacttttgactacttacaatgatcaaaactcctcaatctatccccagactatctatgcaaacaattacaccgaatcaatcacactatctatcaatgaattagatattcacaatccattctctctctacatctttggttttcttgggcataatttctatgatcctgagcttactctccctttgaatgtgcttcac

SEQ ID NO: 227946 - DNA, 1852 bp, Cannabis indica
cgtttggtcgaacttgaattgctcatgaccagccacttagtccaatacaattttgttgttgttgttgtttttttttttgtttttttttttttttttttttataaaatcaatacaaattttttaacttagcttctttatactttatattacttatgaaaatatttgagatggtaaattattaattcgtagagattagagaagcgtaccgagtaggtaacattatcttttcaaaaagtattcaaatctcaaggattagttttgataatgatatttaattacctagaaatcgaagagaatttcaacactaattcatcgcagccacatgtctataattgagtaaaaatgtggacacctttcatattagaagagtaaacacacaacagtgacatgtgtccagatccaaccactgaatgttattgacactaatatagaatcatcaccactgaaaaagtttagatgacatttttgtcatcttatgtattttatatcatacttttatctaatgaatgacttcaacattatccttcagtaagaaaaacgggctgaagtgattgtgtcttgtcatttacgtttatgaaccaattagaaacaaattaagagaagaaaaaggaaaattgttaactactggtgaagctttttatttatattggccataggataaacaagtcagctgttctaacagaacataatcagacacaacaagtgtctaattagctaactcaactagctgcaaccaggcacaaaggaaagaacaacaaccccaacaaagacaacaacacataagaaaaaagatttggctcattcatgtatttgactaaaccatcttccaaaagcagcaccataggcttttatgaccttctctattattcaatgccaaacttgttcctcaatacgctaacgaattcacatacctttttcccatcaggcagagttttggagacactctccctctgcaggcacctcttggcccaagtaatgaacttgggacactcggcttcaatgctgaagttcccataactctcataggcagaaaaccagctgtagtatcctataagggcaacatctacaaacccaaagttgtctcctccaaagtatggcttctctccaagctctgcttccaacaccttcaaaatttctatgtattccttcttggctgcttcttgctcttctccttttgtgctccatatcttccttccacaatcatagacctgtattttacagtacaaatttgttaataaattttagaaaagttggctttctttagaacacttcctctagattataaacagtgttttaataggtacaacacacaagtgatgtatgtaagtaagctccaaccccatacataaacaattctctttttagcttttagatggttactgaaagtaaaaaaagaaaaaagatattacttaattgtacaacaaccaaaagtgaaagagataaagttgtactagtgctgagaaaagcattgataatgtctgagcttcagatctacacattgaatttgaatcagccgaataaaacataaataaagtgatttaataatcattttgtaataaaaaaagacttgtctcctgtgcttgactgaaaactaccaaataaagaaagtcatcctatgattggaattattattatcttttcaaaaaaaaaaaaaaaaaaacaacaacaaaaagctgttaaacagtattcctttatattagtccaaaaacaaattatgaaaaaaaaggcttatattaaaagctacaaacagagttaccttcttgtcgatgtagtcagcccaaaacctagcttgtgctctctggtaaggatcagaagaaagcaaaggggaatttccaggccaaacctcatcgat

SEQ ID NO: 227947 - DNA, 2765 bp, Cannabis indica
tttttttttttaggtaaggaaaacaaaagcaagttgcatgctcgtctttgttgaattccatgaccaaacttctccattattttcaggattagaatatggacttagcggttaagcagctgaagaaatattataaaatcacttcaaaataagaattattattaattaattaccacacactctctctcttacctaatactattacttagctaccacaacaattattttaaaaattagacaacaaataatacatattttccactcttagctacaaagtctaataaggtcttcctttggttacatgatgtgaaattacagaaattcataattattatatttttgctgacttgaaataaaaattcataataataagacactattcatttttttttttaattttaaagaatatatatatattttcggcaaaattgttgaaatgatgcaaatactgacaaaatttgactagataaatttattttagtaaggtgaactaattacgtaaggaatgggtatgtcattgtaggtagatatttatttataatggaacccaaccttgatattttaatatacttcgaatatgttaatgtttgatttttctcttctttcattttttttttattttgggttttaatgaagagtctattgggaggaattattcaaaaacgaatgggacttgacaaaaaatgatgtaaagttataaacgcgtaaggagagaggggttgttgtcaccattctgaaccgtctgatatgttgacttttcttaatattgactcttaatctatggctccagtaggttgggttagtgtccaaattttaagcacgtgtgccgtcttaacatctggaaggattttaaggctttggaaatttctgacagaaaatatatcactgtaatgtcatgtatcttaacttgtatcaactataggcttttaatgctttagcactgaaaaagaggcccatgcagtcatagattcatattaaattgataataaaaggaggagaaaattcaaacagaaaattaggaggattgagagttgtaagaaaaatttggggaaatagtgattctgaagacttgcttttttgattgcaaaatagtctaaaattaactgttggggaaatagtaattgaaatggacagaactaaacgtttatctcatgctttggctgattctcttccataactatagtgtcaataaatattaaaaaaaccaaacctttctctcataaataatgaacagcattctctcacaagacccacaaaaaagcattaaagggctattgttaattgatttgacacatacatataaagcaataattttgattcattatgattttagcataggccaagcgttaacaaccaaaatgtccacaaagttatctacaatcgtccaattattttattttgctttcatcaataagttttggctcgtggggcattaattttggatgacagataaggatgttgtttctgattggggtggttgaagaacaaatttatgatttcatgatatttgaattttgaaattagttttatgccttgtgttaacacaagtgcctgtggaagaagctactcctacttgccttgcctcttccaaacccaataatccatatgacccctgcaatgtccgaatgtccctaacatggaaatgaaaatgatacagttgtccattatgcaaaacaatttagaatatttagcaataaaatcatctagagcatgacaagaatgaagtcacacaaagtgatttaaaatgtattcccaagcccattaggcaagtgaagttattaaaaagaatctctctcaatccaaccaataatgaagcccaaaatgaagaaaataaggcccaatacaaaatgagccactaatttaaaaatgggaactagagtctaagaaactgtcaaattgtcaaagaaatgaaacaaatattacaaaaatgatgagatgaaacatatgtataaacgatcattttttcttttcctttttaaccctttgtcaactcagttgagaagggttctggataaatgctcccttgctgtagcccatgcctgagttattgtctgcagcagaaattagaaaaggaaatgttgggattaaaccaaagatcaaagatagaaagtttgagcttctcatagcatatgtatgctaacataatttctttccattttatgagatattataagtgtcatagtattacctgctcagctaagggtgcatcagcatccatgctatggcttgcaacttttccagcaatgacattgggatcggtttcaaggattatcctggaaatcgaaccaaatagattaatatcaagtggaattaaaggaaacatgtgatggtttatgtaatgaagtcattatgatataaagaaaatcggttgaaaactcaaaaacgagacttttaaaaatgtgaaaaagatcataccctccatcaacaatctcatcaagacataacagtataagatccaaattctcaagtgcttcccttttatcaacagtattcctatacaaagacaaagtagaacaaaaagcacaggatgagaaaataagcaacaagaaaaagcattcaaatgacaggccaaacaataaataaccaaagtagcacctcaagatgagagaaactgcatcaaagaaaccctgaagaactgtggataaataagctcattttcgtcttcccctcctgtcacatagaagtgaaggtcctggacaaacttataaataacaattttgtcgtcgaacatcgctatctccgctgcatatcataattagtttcaacat

SEQ ID NO: 227948 - DNA, 2296 bp, Cannabis indica
atttgtatactagactctttgattttgatacttgaacttgaaagtcctgtgttggtatcttagtaacatattagaggattgtttagtttttcccttttgcagtataagactaaactagttggaatgtacatgttatgttactgtcttattgtgtgagacagcgtattcttaaatgtcaaattatttagcaaagcattttgtttactttcctgtctctgactagtgttgcttccatgccaggtcaatcagtggggaaatgttatctatgatgagtttgttcggccaatagagcgggttgttgattttcggactcaaattagtgcatccgacccaggacctgagaaaggttaatttgtcaaatttctctccagcttgctattagaatcatactttatttgtgttcgctttcagctagcatattgactgcttgttaaagttgaatgctcaatgggacttcgggaaagttttgactatcatctgtagctaacagtttctctataataatacaatagaattggattaagttgaaaattaaaagcataacaaaaagaatcatagtaatgataagggctactactattatcatgtataagcccatttctcacttctttctctttaacttaactttcacctatagggttacaacttacaattctctcatattgaattgactattagttccttcccatctctttaagttattattatatttttttcttatcgtattcatcacttgttactgcatgtcttctttgtttgcatgtgagtgaaagttttatttgttataaattttgtcacaattccatgtttttttaaaaggttttgattgtcaaaatttggttttttagttggaatttgtagatttacaaaccaatttatctgtaaattatattcatatttaaggtgtgccttgttcatgctttgattttatctttcagcaaaagattttcgcacagttcagaataaggtggctgagctgactaaaggaaggattctcgtgggccatgccttgcgcaatgatcttaaggtatctaatactggattttactatgctttagagaaatatatatgtggattggaaccattaatatgagaatttttgttggataggcattgctactaagtcatcccaagaaggacgtacgagatacatcagagtatccaccatttctaaggtaaattacgcccctcctatttatacttttgcagttgaaagttgaaatttgtcgctcttcgcctttactatatcatcggctaatatacgtgtggggtttgttgagcagagaagggagcagcagggcacttcggcatcttgcagctgaatttcttaatgtggaaatccaaaacggggagcattgcccggttagtgttttgaacttaggcttacactacttttctgcctgatcattatattccactaattaaataggaacattattactaccttggttaacatagatcaatgccattccttgaatcaatgaaacttgtagaatgatacaaatctgttgtgtgattcttaataccgtttttagatacaagatgctcgtgccgcaatggtgctctatcagaaaaacaaaaaaatatgggaaaaattggccaaagatcagataagactcaaagaaaaacagaataacgaaggccaaaaaagaaaaggaaactggaagatgatctgaatgctggcactgctccaacttccctatagtcttgatagtttatcctgcttaactgaaaaatcaacctttatcttaaagaatcaaagcgcaatcaattgcaaaatttcatgacgggggaaggaagaacaagaacttgctgaaaccgaataccacattggcataaattgtaattttctccatattgttttttttttttgtagggatttattcttcaattttaatgttatgagccaaggctatttttgcactaatgaggtttatgtaccaaacaagacataattgtagaattattgttttgagcagttaaaatgtcaaatagtgagtagttgtgaacattgatatgatttggcagtgcaacctaaaaagtttcctatgctacaaagcttttgagctttttgtgaagtttggttttggaccactgcctctgctcccttaggcctcagtcactcaattatactttttttttttttttgtacttttctcatttgaaagcatacaattccaagaacagctctcgagctaccatgaattgtgtacttccccaatgcaaaatgctgttgaacgatgtcgcttttatttttctaggtcttacatttctatatatatatatactttttata

SEQ ID NO: 227949 - DNA, 1160 bp, Cannabis indica
ccatgtatacttcaggctccttccgcctcagtttttttttttttcatctggtttttatacaccatgctccatagacagttttgtatattagggtcatttcttttgcagttgtcagtttgtatggttttattttatccatgataattcttatcaagaatattgtttttgattgtattaggctcattcagacattgttatatctggatatcctcttagaatggttcatcattggtgttaatagtcttggttttataatgctgagctagttcctacctagttctattacaagtgattactttcttagtcttcttttaagtgatagatgttatagttatttttaattacacattcttaattttttgtataaatttaaaatattttttcttgactcttgattttatatttgtttggtggcagagcagattgatcatccaatcttgattactgaatgtgtttgcaatccagtttattctcggggaaaaatggcggaacttctgtttgaaacttatggtgttccatcaataggttacaacattgaccttcttaatattctgaaaactgttactagagagtgggctaaatttctgtgtggttcaattcatacatatacatgaaaaagggatgattttaactctgatgagcatctattcttctttgtgcatctgcaacacacacatgtgctaattaagactctcttgttctgttccctgaaaagatgttttctcacttgacttcagtcctatgtatctattagtggtcactactctatgaaatgctctattgaatcatttatattcttaccatcatcacagcatatggtgttgatgccgcattcagctacaagtataatcaacaacatggggtttgtgctaaagacggtcttgctatctgccctggatttacaactacgcatgtcatcccagtatgattctcacagattaaattattatattagtattacatctttctgtataaaactgaaatatatttgtctgatatagaattatcctccactaatgtacttctatcagtttcatgttctttaacgtgattggatgtagttcttgttcactatgatagacattgatattaaattgagtggttgatgtgcttttaggttgtattggatgttgtctccgcttctgtctctcttcttagga

SEQ ID NO: 227950 - DNA, 2341 bp, Cannabis indica
ggggaggtagtaactggattgaggtgcggcttgatagggtcttgatcagttccagctggtttcaaaaattttcgaatgccaaattgtacaacctgcatcactctacttcagatcacagtcccatctttttggaacctgaagctccggttcaaaggggaggcatccgtagtttcaaattcgagaatgcttggctcaaagaaccattgtgttatgaaatcattcaaggttgttgggaggagaacaatgacaaagatatctggtttaagcagaaactttgtaccgaaaagcttgaggaatggggaaaaactattacaggtaactttaaaacaagaattaatgcgtgcaagagagaccttgatttgttgaagaataagagggacaatgcttcggttcagagatacagagaagtgaagaaacagttgctgaatgttattgatcaaaaagagaccttttggaaacaaagggcgaagcaattttggctcaaggaaggagaccaaaacactaagttttttcatgcggctgccagtacgagacgaaggaccaacaccatacaccacttgaagaatgaatacggtgtagatgtcacttggaattcgggattggaaggtgttgtaactgactatttcaccaatttattcagctcttcctcaacatccccccaggccgtgattgattgtgtggaaaaaatggttactcttgtgatgaatggctcgtttcttcttgctgtttctgaagaggaggtgcgaagtgctgtatttggaatgcatcctgacaaaagcccctgtcccgatggtttgacaccagcgttttatcagaagaattgggttgttcttggatcggatgttgtaaggttagttcagcgttttttcacaagtggttaatttgaaaatgatgtcaataaggctaatgtggtgcttataccgaagacaagaaatcctgaacgcatgacggacttacgtcctattgctttgtgtaatgtttaatacaaaacaattacaaaagtaatggctaaccggttgaaaccgatcatggatagaattgtctcacactatcaaagtgccttcatacctgggaggctcataacggataacatcatggtgtcatttgaagttctccactacttgaaacgaaagaggaaaggaaaagaaggttgcatggccctaaaactagatatgagcaaagcttacgatagaatcgaatggagctatttagaagcaattcttgtgaaattgggatttgataatggttggatcgctttgttaatggaatgtgttcggtcagcctcttactctattgtacatgggggaaagatgatgggtcctatatctccttaacgagggataagacaaggcgacccgttatcaccttacattttcattctttgtgcggaaggcttctcggctttgataaggaaatatgaattgcgagggtggcttcatggttgcaaagtggcaaatggtgctcctcgtgtgtcacacatattgtttgcagacgacagttatctctattgcaaagctaccatggaagaagccactaaagtaagggaacttctcactctgtttgaacaagcttcgggccaacaagttaattttggtaaatcttctatcttttacagcaccaacacaataatggcaattcgtaatagtatttgcaccttcctccaaatggtgatggcagatgagaatagcatgtatctgggattgcctagcactatggggaggaacaagaacgcagttttaggttacttgaaggagcgggttaggaaaagagttcaaaactgggattctaaatttctttctaaagcagggaaagaagtcctaatcaaaacggtggctcaagccttacccagttatgctatgagcgtgtacctactacctttggatattagccatggtatggagcaacatatggcaaagttttggtggaaaacgtcaaacacgaaggaaaaagggattcattggatgtcttgggataagctttgtcaacataaaagtatgggaggtttaagctttcgaaatttgagagatcataaccttgcgctcttgggaaaacaagggtggaggttactcacaaacaatgactctcttgttgctagaatttacaaagctcgctactatccgaatggaacttatctcacagcatctcttggcaacaatccaagcttcatttggcgtagtattttcgaagctcaaagagtggttcaaatgggagcaagatggaaggttggttcggacagtaaagtggctgtcactggtgaaccgtggctgttgtttgaagataatccctgcataacttccatacaccctgcactatccactgctgttgtgggtaatctgatgga

SEQ ID NO: 227951 - DNA, 1956 bp, Cannabis indica
aaaaaatattttaaaaaaattatttcaacatatgattttgggtgtgaaaattaattaaaaagttgtaattaaaactcttctccaacaaaaaatataaaatggtaactgaaaggatgtatgttagaataacattcttctctctttaaggtactggtaaggtgggaaacaatcaaacaaactaaagaattcatattgttttgtatttgtttgttttttttttcatttttgaaagattgaactgttcgtttgagtggaaatttgatggtttatgcttttttaacacacgaaactttccttccaactccctacttttgtcttgtgctggatcaggattattatgtggagtaggtgggggacttcggttcaaatttctcttaggtcaggagcattctgattcatgtacaccctcaaattaggtcttctcttatccatctagtccttaaagtcagcttccttatacgcctgagtacctaattgtaatttgcttacagacctggttggagattactttcggactgataattgtccacgtaactaggggtttgcggttactaaggtaaaacgctttcttgtctgtgatattgacatctggcttgctgcacaattatccctcaatctatttgtatattggggtgaaatgtttcgttgtgagcgtcccttattctttggctcatggtttcgagtatctctttcgcttctctgactcccactttgcctcggagtctccattggtgaagggtgtctagttccagaaggaggatatctttccattcgtttgagacagagttagtatacaaaaaaaaaatgcaaccataattaaaagttggcttggcatgatatggtagttcctccatattggacagaaattttaatatttacaacttatttcattttttttatccattttgtctcaaaaatatatgtgggagtatttatcgttaaaatttttttcacggtggcatttattataattacgacaattttctataaacttttagaaaaatttcaattagtttttagggtgcatgtttgttaatactgtaattatttataacttttaaagtgcactcaaagtaattgtaactgtaaggaacaccaaaataaaaatagaggaaaaaaactcctaatgtgtttaggaacggttaagaaagaatgaaatatgaggtcttttatttatttaatttatttttgtaaggattgaaataccgggttgacaagctactaaggttactttagtagtgagagagggatgggaaaaagagaggacatggattcgatctcaaaactcctaagttattagttgattgtaatactattacgctacaccaaaaaagaaaggctaaatagtaattttttcccctgaactttttttgccgttgaaaattccccctgaactattgagattgttaaatttaagaacttttgtctaatttcattcaattttactgtttcaggtactaaatcatgctccccagactttgatatctaccaaattatgcccctcaaacttttatatgtatgaaatcatgcccactgaactttcatccatgttacaatttttttactaaaattagacaaaagtccttaaatttaacaatcttaatagttcagggagaatttttaacggctaaaaaagttcaaagggcatgatttattacatgttaaagttcgggggaaaaattactaattagtcaaaaaaaaattacaaggttgaccgcaacatacatttctttgaccaaatacacctattctcatttaaactctttccttttgatgttttgatttctctatctctgcgttagtctcactttttttttttctacataagaaaagaaaacacacacattcacatcacacctttacatcccttgacggctactaccttcagttctccaccttcatcgtcttttcgatctctagctccaatttcaaagttattattattatcattattat

SEQ ID NO: 227952 - DNA, 4377 bp, Cannabis indica
tttttttttttttttccattttccctgcccatagccattgttgttgtgtttgcctccactattctgattgttggagggctagcctgcattgctcgtgctggaagatgtactaggcggaattaaggggtatcttccaattaaggcatgcccgacacttgcctttctcccagtttgggcatgtcggacaacttcttcaagcttaataaagccttcaacccgatcaaggaagtcaaccatgtgtttgagttgagtgttggcggatatctttccatagctcacccaaaggcagtatgctgctcatgatggttgtgtaccatccttctcctgttatattcttgactttggtagcctcagtcatgaatctttacacgcagtcttttaaaggttcatcaagtctctgtttgacttaaactaagtcttccagcctgtatggtattttcctagaagatgagagctgggtgtaaaactctcttgtgaaagagttccacgaatcgaacctttcggcagctagtttgaaaaaccactgctgtgtagtttcagacaaggttgctagcaaaatcctgcaatgggtatcaatcttcacattttgcaaatacatctggatctcaaaatatttgatgtgagccaaggaatcttctttccacgtgtacatcttccaagtggacatcttgaacttggttagcaggggcaacacattgatgcgcacaggaaagggtgatcattaggtcctgtcaagctctaagtcagacaacttttggtcggacatgccttgtatcatgttcttgaattgatccagttgtgcctgcactataggatcaacatcagctggcctttattaagctaaatcttgtccttccaacccttcctcggccagcctggtcggtgggttgataggaggtatacctttggggttggtaggattagttctgtcctttcccattggttgagtattttagggcgggatgtgcccatcccgagcatttcttctcttgttcaatccagcccgaagatctactcttacatgagggccaattctgtcaaacacagaatccttaagtcttgggtcaaaacggtgtttgagtatttcggggtggagtgtcattgttgtgccgaatattttgagttctccggttagtgcgctcactacttaggtgactagtggcactatcttcattaggattgggataggactccccactgcgagacctgctccggtcttgccttggtgggacatcttcccttctttattcgttttcaggcaagccctggaatcggtcaatcctgcctagcaagttcaaagtcgtcccctaagttaacatgggttcgttcattaatgttagggctattaatctcaggtccagtctcaccaacataaacacaaggtctaacccccgtgtcaggaacatcagtagttgattggaaagtgggtccagtaggggttggtctcctagctggacctccgtggtagaggggccggccagctggctggaacgtggtggtcaggcaaccacgttcaggttggttacagcaggcgacacttgaacattgggatccgtggtcatagggtcttgtggttcactagaatttccacgtctcgtgacagccatggaagaatggatattaagaaataaaaatattaatttagtgattcaatgtaaagttaaaaaatttaaaacttaacttttttaacatgaaattaaaaatattttaaaatttttaatttttattatatataacaaattatatacacataaattttatctatataaattttctaattgaacctaaatctattattttttttctacaacttcagtttcaataatagcaaaatgggtcactatgggtcgacacgaacacaaaacggttttttaccgatcgggttagggttgagaaaattagacacgagtcaaacaacggatcgacacacccgacacgaaatataaaagcgagttatattttaaatatgacacgaacacgacacgttttgccacctctaaaaacaacacaagaaatctcttcagaagtggagtacgctaatctaataagtgagtactcgcataaattcaatatcgtcaaaattcctctcacaaccctgttagattatcagaaagctgtttagtgtcgtttaagtgtcccaaagcatacatttatcttatggcaagctatcaatgaacatattctcacaattagggacaagcctaaaagcaatttgcctattgacactctgatctttgcccagtttgttgggttattgagaagagccaccatcatctctttttgatatatattcttctctcagaggtggttcaagctgtccttggctggtatttggtccctttgattggcctctggatttcagttcttggaatgttgggtttgcccaacctcgatctggcttgatttagttccttactgtcgctattgttgcagctacaacttacttttagtcatgtaaatgagttgatccaaaatgttgttaagactaagaaaaagagagcttgaagtgattaatctctgaaaaacatgtaatctctttggtggttgagtttgaataaatttatttcctcagtttcaatatataatagaattactcaataaataattacatctatacatttcaatactgcactacaattaaacatataaatttgcaaaaagggagagctgtgataatttaattggtaaactaattcataaaaccaaaaacaaaaagtgatgatatatggtatcttcataatcaattactttcgaatattaattaagtttgagatagaacaaagaaaggtaaggtcaaacaaattcttcttagtttccatgacatgatcatcacagaaattaacaaagaaaacaaattaagaaagaagaaggaggagactggacttatcaatatatatatatatatatatggtgcatttatgttatatatatagtagtatagtaataattaattaggtgtgattaattaattagttaattaattattaattgtcaacgattctttcgatgaaagcagtagcgaaacagaacaaagagaagatctatgggccatagcatcagaatgtttgagactacaagaaacgatcataggaacccctttcaattcaaactgaccatttttgaaaccaaaaactccttcaaacaacaaatcaatcacagcaattttcatcagtcatcaaacctgcatcgaaagaataagcatcgtccttctctccattctcaactctcgttcgcagactcaattccttcctcgatttaggtttctcagtaaaagcaccgatcacagcttcccccaatttgctccccttccacagagccaccaccgtcaacgaactgaaactcactgtcgttttctcattattattagcgaatctcatcacgtacaccatatctgctgcgattgagggttttcgcctgggagaactcgggtgaatagctctcatattttcgaatttgatgctgtgaagcgagatctctggaatcaaggagttgagaaatgaggcggctatgattgtgaacaggaggagaacgagtacgaaggcgaaggtcaccatagctgaccaggctaagcaaccaagccaacaggagcggcattttctgctggtgcgttgtttgttgctgttgtggaataagatcggtaccgctcgaggttgatcggagaagagaacgtggcggcgcgatgatgatgatggcggtgagaagtgggtcccgcggcttcctggaggtttggagagtggtggcaatggcgaatctactgtgacgttgactgaaggcgccatggacggaggtggtgaggttggaagagattgttgagaaaatccttttccttttcggaatgggaattgggaaatggaagggttctccagttggatccattcatttcttggttgttaactctaattctggttaattttggttggcgggaaactgtttttcaaactaattaacaatattaaagatcaactcaacttatattattattattaaagatttgttagggaaagtatatgtatgtgttgattgatataatgtaatgtattgtattattagaaatgtttgacaataacaatacacgctattagccaaatcttaaagttgtacttgtagtattattagttatgatatagtttcaactcattacttatatttcttattatagtaatatcaaatacttttttataagtcattggttggatgctttattttgatgaataaaacttgcctccatgtatttttcaaaaggactaggtgggaaagaaatgatcataaataaataccttaagtaaatattatgttagaatttttttttaccggaaagataatagaatacaagagttatgagttattcttctcattacattttataattctaacatg

SEQ ID NO: 227953 - DNA, 1684 bp, Cannabis indica
tagagctctttatgatatattgtgacaatttgatttttgctcaatggaaatcttgaagtctgtattgagatcaattatcaatttgaattccttcaactttttagagtatgcttggcaatatattattcttattaatttactttgattttaatgtagtatttctggtgtttagacatatattcatgtatttagttgtaaaaggaacaaaaatgaacatatatgtcatctaagatgtatttcattagattcttatctggttatgatggtgtaaagaagtttgagtattgcaaattataataaggcaactttcttatctaggagatcaattgaagggtctttcctttacctttatgctcttatgcatagttttattgattgtttagagataaatattgatgctttggataacatatggatgcaggaaaaaaaatataatgctgacttttctattttctaatactacttcaagaattttgtatacatcaaggaaatattttcagtaatatttttcgcaattaattgacaatattatctcttaatttatcaggttgatatttagtttttatatctttccccacaacattcttgagatataaccttttaatacttttatatataatatacttttgagatgtgaaaagtgctgctagttttttttttctttacttttaaatattggctttgaaattcttagtatgcatttggcattgattagtcctttttagccatgccatctacacaatatttttttgtctttcatgccttggattttgtttatattactcatttttattttcctcaccatagttggacatttatcttctattactgttatttatatgcacattaaaagagtgaaatacaatctgtatcaaccattaataataaataataatgatttcctttattaattttcttatctctacactttagatagatagtgttttttaaaaaaataaaataaaataaaattaagtatacatgtattgcacgtaacattaacttagataggtgtattattttgtatgatctcgcactctaattttgtatgatctcatactctaattttgtataattgtgtatatctgattttttaagcaaccttttaaaaataataaaaaatcttttacatcattgcaagtgtttgggacaaaggagtttttaaaaaattattgttttgagtttcaatgaggggaaataagaatatatttttcttttgatttatgaaacttatttttggattttaatttaagattgttaaattttatttggacaatataagtttttcttgtgttttttaataactttttcttttctttctaaaacttttttattaagtttgagtttaacaaagattgagatgcataagaaatattgcttaaagcaatataaataggaaaatttttaaaaaataatatctaaaatcttaaataaaactaacaatacgtggctcggcacgtaacatccacctagtataagaataaacacatataatagcaaagaagaaaaactaaaaaggttcttgaaaattatctcggttagatgagtatatatataaatatatatttagtgtattatgattttaaaataattcatgaactttaacaaaataacatttaccgtgggcagagactcgtgttgatataatgttataaatttattataaataatataaaatagataa

SEQ ID NO: 227954 - DNA, 1418 bp, Cannabis indica
ttgtaatcactaaataataagctaggcaggggcgttgaccatctccatcgtgaaaagaccatgtcaacgtggcactaatccgatgaaccccagaatattcatcatgataagcactttggtacgtggagtatttgccacatcatacatagatatatttatttgtaaataataataataatattaattatttatggccgtcagcacacgatttgtttcacagggtttactcttctatatatatttattttttgtgtataaatatatgtgtaaattatgtaagtagtcattacatgccaaaatacaaaacaccatgagccgtccaatgcgtatgcctaattatattagtttttaggtcctaaatatataatttatttattagtgaaggttcaatatttctatatatatacaaaaattgaaattagtaacttgagatatctgacccttcatatattatcctcaatagtgtccccttgcatataattaatattaatctatgtatctctcatctattatgagcattactttatagttaaacatttgaatcggaagacaaatgagccaattagtatatactataagatgcagtgtagtgagaatatactaaaaaaaacaagctttgataatctaaatgtatatattggtattttatatgtatgtatagtttagccacttgtcatagcttgtctggtggagaatggctcttggtgcccatgaaagaatactcatgtaacttttgagatccctagccatattatgccatagttttttttttctttttttaatggtttgattattgaaacttattatttttctttttagtataaaaatataataataatatagaagaggcagatatcagtagctttctgtaaagaaacttttattatattaattataatactgtttgtagaaccagtctcaacttaacaaaaaagggttaaagagactgaaatatatatattaagaaagaaaaaaaagacaagaagaagaagaagaaatacatattattaattatatatttagtatacctcatcatcatcatcccctagtcaatataatactacattcattttgttgtattatattttaacaactaccaccagattgaattcacagtaaacgaaaaaatgaaagattcacttgttaaggaggggacctctatatctaaacaaaaaaggtctttttcacttatttattttatatatattttaatttaaaaaagctgatgcaataaacttatatagttttatatatattaagtacaactatgcttatatatgttgtacctaaatatattatatacatatataaaagtattgagtattcacatatgtttatatcaatatcattttcttttcatgattctaaaaagtagtggatgaaattaattcccaacgatcgagtagagtttttttttt

SEQ ID NO: 227955 - DNA, 1423 bp, Cannabis indica
atcaacacctaactaacctgatatttaattagaccaacaataatattaataaagactgatgcgttttagcatttctaaagtactataccaccattaatctgtgtagagactagagatagactgtaaaatgtaactaatccagtaaaggaaacacacgtcaatccaatccaagtacagtgatgatcaccatttcaatcactttccagtgtccttgccaggcaccacctactactaccagttacaacactacttgctatggcccatgttagcaacgtggtgatattttatagttgattaattattttctataatatttataattaaagtaaaatatgtataatttgatattaaattacacgatattagatatcatatgggtgttaagcatcatgtcctttatcatttttcaagttaaattgtatgtttagcatcaattgattaataaataatgagtaatggtaatgaaataagagcacttataatagaaaaggtttaaattttttaaaaaattgtactaaaaatatgctaaatagatgttctaaaatctttctttattttaaagtttcttaaaaattcacttttaaggaaaattttacaaaatttaactaaaaagttgttttttaatttataaaccatccaatatatttgagcgatttggattttcattgtattatttcgggttgtattttttgtcaatttattcggtttagtttgagcggtttattcggcggtttgtgaattttgttaaacacccatactttttacatatgtaatggaataactctggttattttcacttttctaattggataatttcatataaatttatatttaagaaaaataaaaaatagtttaatataattttttttttttaaaaaaaaagtctaatgacatcgtttaatgtaattgtcttttacttttctattttttgggaatgcgatattttacttttctaatcaatatcaatctatctatatatctatataattgtgttgttgggtatgtggcatggcattctatcattttaatattgtcatttttttattttatggattttttaagatttatctattattatgattttttaaatttaattagctgtttcacttacatattaatgatatttagaagatgaggagacacttaatctcttactatctattcataaaattatttaaactacattagtgtatcttttaatattgaatgttcataaatatatggtaaccgcctatgtgtattcattagttaatataaaaaaaaggtcaagcatctttaacatataatgtataatgggttaataagttacaccatttatttagcttctcatttattataaatttcaaacattttcatctcataatttaattcctctctctacagactctctctcttttagtttttttttctaatttattcaatt

SEQ ID NO: 227956 - DNA, 1822 bp, Cannabis indica
ataaaaattaaaattataactaatgatatgtacattaactaatatatttatataactcacaagatgacaatgttatttaatggtaatataatggaaagaaagatattcaatattaagaagaattatggatgcatttattaattcatttacaaaatcacgagcaatgtcatgaccaaagttgctgcaaccaaagtgcgaaacatatgagaacccaaaccaataacaacagcagaactctcaatttgaataggaaacaaacaaccatccctagaagcattttgtgtcacaatctttgccaaaccactaaaatcacaagcctcaacactctgatcattcatttgaaagtaaatattaaaagcataagaagcagagtctctctgattcaacttctcacacgaagtccctggtcccaagctagtacaatccgacattgaacaagcatagttcacttcacttcccactgcactcatgttcttcacactactatccaatacacaccacttcttctccaaatactgaacccctttagccccaattggcattttttcatgaccttctccagaaaaatccatactaaatttgggttgtccatcgtaacgaaagataccccaatgtcgttcgaaaaatcccggcgccacactttttatgtcctcatcaaaaagactaaaaagataagtttctatgtggccgggtcgaagaggggttcctttatttttagccaacctttttaataacccgctgtagaacttcttggccaaatcgactgtggcatctttgtcaccgtcggttggccaaccgacttccccaactatgattttcatgttggggaagcctgctttctttaaagaccaaactaaggtgtcatggttggcttcaaaaacattgtcataattaaggttgttcttgtcgtttatggacttagaaccaccatcgaagaaggcaaagtcccgtgggaagtttgggttgtcgtagaggctgaggaaagggtagatgttgaccatgaaaggtgatttgttgtcgtttaagaaactgactatatcgtgcatgagatcttttatgtcgttgcgaaagtttccatctgagggagtgttggatgaagactcataaacgtcggcgttttgaggtattgtggctttgattttgtctcctaagccggcttcgtttagtgccttttgtatgttttttagtgctggtaatactagttttatgaatgttccattgtaacttgttaagaagggttcgtttcctacaccaacgtacctgtataacataacacactcatattataaatctgtaaataaattattaatgactggaataaaaattagagaaaaaaaaacaaaacatacgttttacattttaacaattttatagaggggaccaaatgcaaactattttctttttctttttcaaaaagaaaatgattgcgaaagtgttgaagatgtgtgaatgaataatttacatcttcatatttttcttataaataaaaattaccatttgatgttttttaactttttctttttaaaaaaaaaaaataaataaagattaattaaatcaaaagtcacattataattattcccccaaaaaaatgtcccattataagaaagatctccctctctagatctctttaaacatattaaaacaagttatgatcaagagctatcacaaatttagaatataaaggtcattaacattatacataaatataaaagttattattaatttcataattaacaaacaaacatgaatatgaatgatgatgagtagtggtatatgtgtatatatgacaatatataaccatggattgattatatatattgaa

SEQ ID NO: 227957 - DNA, 2039 bp, Cannabis indica
ctataaaatcactaatcatatgaattaaaatgacaaaaaagttattcattaacttatatattaatagaataattaaaatgttaatgtcaactaataaaattgtcttacaaattcaaacaattttttttcttttatttttttttttgaaagagaaaaactttattaaataacactaggcttatctgctagtaaattagcagcagcacaacttggtaaacaatcagtccaaatagcagacttttgagccaaacggctccacttagcaaggctattagccactgtattacactttctaggagcaaataaaaaactctaaaacactggaaggtatcacacatatgcataactctttgaaatcaattgaccccaatctgaatagttggttgaattgtgatgaatagcttgtataatagtgtggctgtcagaacaaatttgtgctttgaatatttcccaacggactgctaacttcaagcccaggaggattgacagcagcttcggcctgcagaacggtggtgcaaaccaggagtgaactccgtcttctgccgaccactaaagagcccttcgagtctcgaataaccgcacttaaactgaaacccgactgaccaacgacctagcgaagcatcagtatttatattgcagaagtctaaaggaggagggagccatttcataacctgttttggaggaattttcgggggggaattctggtgtgaacccagttgtaactccaataaatcagcagcccatctgatccacatttgatccttcaaacctttgtgttggaagataaacatattccttctttgccaaaccagccaagagaaaccaatgaacctgataaaatcatcttttggaatgtgatccttaagccaccaaataaaatcagcagcattagtaatacgagatggaaaaatctgataaaatccgagaagtttccaaatcttaatagtttttggacacacccaaagagcatggcaaatgtcttcttcttgttgattacaaagatcacatcgagtatctagtgccattcctcgtcttgtaagctcaatctttgttgggagccaatgatggaacaacctccataaaaaattcttcattttcggagtaaggatagatccccaaacaaatttccaccaagctttaattgaggaaagattcgaacattcagctgtagcgggattaataaaccaaagcttataaccactcgcaaccgagtaagtaccattaggagttgggtgccaagtgatccaatccggaatgttcaagtgaggtttgatgcctaaaacccacggaatatcatcttggtggaaccaactaatcacttcatttactttccaacttccatttgggtgaagtaatgaactaacagcaacttccttctgtatttgaactttggtgcggaggttgaaagacggacttcttggcagccataagtcctcattaactcgtatcgaacgaccgtctccaacacaccatctagatcctttcataagaagttctcttccccatataataccactccatattgaggacccataatgccccaatttagcttcaaagaagctctccgcaggaaaataaagagcttttaggattctagaaagcaaacaatcgggattagtaataagcttccaaccttgctttgctaagatagcttggttgaagtcttctagatttcggaatcccattcctccttgctccttcaatctacaaagtttgtgccaattaccccaatgtaacttatgtttattcttggttgatccccaccaaaaccgcgctattaaactttcgatatcatgaagaatccctttggtgattctaaagcaactcataacataacaaggtagagcttgaataaccgctttaattagaatctctttcccggcttgagagaaaagactcatcttccacccttggagtttagcttcaactttgtcccttatcttcccaaagacttgttttttattcttacccacgaaggttggcatccccaaatacttggaatgttgtttaacaagggtaacacccaagttagaggctaa

SEQ ID NO: 227958 - DNA, 1356 bp, Cannabis indica
ggtgtgtgagaacttctgtccctaccatttcaaattgggaggagtagattgattggttcattgagtcggccactagaccaaatgccatggacctcaattgcttcctcggaggtgctgcaattattttcaaaagtatatggaaggagagaaaactcccttctccatggacatcagccaattcctttgagagtgcaaattgagcacattaatagtagattccatgaattggatgcaatccaggagtctactggtcctcccaacactgaatggaatccgcctcgggaaggttggattgcttgcaactcggatattgccattggtcaatcccaagcaacggggggtgctgtgttcagggatgcgactggaactatcctcaacatcaccacgttcagatcgaatcactgtgacccgctgctaggagaaatttctgctatcttcgaaggtgcggcagcagcagtcaaatttggctataagaatgtcattttttagagcgacttgctgaatgcagttagtgcgttgaaaagcaacactgctgatatccaaaaactgcatttcaacattcaggataaggttaaaaagttcatcgaactctcggagaaattcaatattcatgagattatatggactcttcgttcgtgtaatggtgtggcccactccgtggctcaatgggcaaatcgaaacaacatctttggagttttggatttgaccaattttgatgatttcctgcagactatttctgcagatggtcattctcctgcttagtcttttctggtttagtaaactattttagttctgtttctggttgctcttttttttttctggtgttttgttgtttcttgcagtctgtttttttgttgttgttcctgttggtagttttgttggtggttgtttgtgtccctgttaggcagggctcttttggccgtttgtgtgttggtttcaaaggtttcatcaataaaaaaaaatgttgataattagatagttatcgtcaatgtgaaaatatttatcgttttaattgggtaagatgtcgttgagggctagccggttggtgcttaaaaaaggacactacaaacactacgtacggtacatcaaatatatggtaccctctgatttgggtgagtagttggtgtttttgatatattaagggaacaatcaattattttttttcttttctaaacaacggtgtttttggaaaaaaaataaaacatttatttattcaataaaaatataatgtaataactagcattaataggtttaaaacttgttacgacagaacacaaacttatagtaaaaggacaaaaaaaagaaataaattttgtagaatttaaaaattgacataagaaaattatatatgctatc

SEQ ID NO: 227959 - DNA, 1284 bp, Cannabis indica
tttcaataattcggaaaatggacagttagccgttttgcaattccaagtgtttccaatgttttgtatgttttctctacttttgatcactttacatcatccatttaatcttcagattaccttggccttgataaatgctcgaatgtcaaccaaatcttttaaacgttggtcaagaccgtggcttcttccactgatttctttaatgctgtcaaaattttcaatgattatcccattggtatgtataaatttgcttgcgtcactttttaatttatatcttcaggttttttatttgtttatttttattttgttcgtcatagagcactatgcaggcagtaaacttccaactactgctcgctccaccttctatcattaattcttccggtgacttaaaatttggtatgatctatagaaaatatagtttatattatctgtttcttcttttttttttttcctttttttttttctttttcatatttgataaattagtgatgataaggtttatgacataatttagttgcagtctttctattgcatattgctatttgcaactggttcaaaattttctttttaaattcagttgttgaagaatttgtctctgaggaagagatgagaagtatagaagatctgaaggtgcaacttgcttgcaggaaggtatggatggcttcttctatacacaagggagaagaagaaggtgaaccctgctacatagcatagacttcagtatgagattgtatatattatatcatttatgtgagggtttctcatcgatattttgtcttaacatatttgtgtttcagttactgaaattttcacaataggtctgattgtaacatgctattactagaactagcatgcttgaattttaatggcattgttgatcaatgtagtctttttgtggttcccatagtcttttctctggtataggacaaaagggagataagtggaagggaagaaaagaagggagaaagagagaagattgagaataggatagaaaaggaaaaattaaagagaggaataatgtgtaattttatataagtacaataatttaacataacagagcttatatataaataggcaaatgaaaaatcctaattaatctaggaattagctgtaatatttcaagtgtcataactcattatagatatgatcttcatcagcttcattttttccccttttatggtggctggtgggtgtttgagtatggaattattctatgtttctttaaaacctaacaagatgttatctgcagtcattctagctgttcacgaagtactcatccaagaacac

SEQ ID NO: 227960 - DNA, 1569 bp, Cannabis indica
atagtagtacattttttcattatttttattatttctatgataggtagttttatttaatatatagaagtacacatgttagcttaaattaaaaactaatacaaccaaatgtgcacatgaacatgataatcaaccattaaatattataaataattttttttaatataaaaaaattcattaagagtagtcggtacaccatgttatattatattatattaataagttatgtaaaatacttactataaacctgactccaatcccaccatgcccgcctccaaatcttgaggcccgacttaggacccagctctgaccctaaacccgactcccaacctcagattgagaacccccctgaccccgactctactccgaacaatttttaaatagtatatataataaactaatataaattattttgtatgtattaaataatataatttacattttattaaaatttatagttgtaataattattacaatataaaattttatcctttcttttttattaaaaaaaaattattgaaaatatatgaagaaaatgtaactaggaagtgaaagattgtttttctgaatatgcatgatgcatatgcaccaggtgaaccattacgttcgcatcgtgtggtataggaaggttcagtagtagtttgaatcaaaaggttgtgggttgtaaagcttttcataattgatgactcaggatttggataaaaacttggtgaatttttcagtggacatttattttaggatatatgtacaggttgctacttatttagaataattaactgagatgactactaaatatatttatttatttatcaaatattattttaaggctatttggagcagtttgaattgcaaaagcataaattttttctttggtttattgcagaaatttgacattattggcttggactcatgaacacctgtacttgattgggtaggtaggctgaatctgaatatttcatgaagttttcatcttttattaaaaacagtattgtgtggaggcgatggagaattggcacgtggaagaggagagtgaaagatggggcaaagcaggagaaagccacgtggcagtcaccttgagccgaaacccccgatgaaaggtagcccccattccctgacccaaaccaaaaaaagaacaccttttctctctctctatatggcgggaacttgaagaaaaaaaatacagaagaagaaaggaagaagaagaaaggaaggacccattggaggtcttgggtagagatataatgtgtttggtaatgagttatctggatgcacacaccttagcactctctctcctcgtctctccaccttggaacgccctcgcttccaccaattgcctttgggcccctaaggttatccttctctctcttcactttgttttccaaaactttctttatatttatttagtttattaatattatgtggaattaatccttctattattttttttggaaaaataccataaataatatttttttaaatttacgatttggatttttgaagtgtttttttgtagtatgtgagttgctatagggattttggttgtaatagtaatttttatgtggaattctgtaa

SEQ ID NO: 227961 - DNA, 1571 bp, Cannabis indica
tttgagcgtgtaacagtataaaagaaagaaaatgggaaaaaaacagtaaactgtctaaatttcccttattctttctaaaaaaaccaagatgtgtgagcgagagacaaataggcccgtatattgtccagcacggcacggctcggcccggcccgaccctctcacttagccaacttcatgtcgccacgtgtactagattacttggagaaaacgacgtccatacttactcccccacacacattctaatctcatgtcctttcatcttcttttattttcccgaaacacccatttaatataataactaataagacttgtccaatattaataaaaaacggttcgtccaatgttaaatagggaaatgctaaagggcacttgtgatgtctagtacttttttatgtatcaatattattattgattcaaccaagtatcgggtttcacataatttaatataataatttttagaaagtatcgctaactaatcgcaaagcaacatgtcgagaagatactagacaccactggtacttaatagcaatgctctattaaataatggtttaataagaattaaaaaaaaactagcatgtgaagtctaccgtctcatctcaaataatcacatccattgttactagaaataaatatataattttctttacaatattaatcaatccaacggtttagattcttttgaatggaatctaacctttctctttttatcgaatgagtctgtcatcggtctttctagactttatttttatttttattttttaatatttaaatttagtattatttattgaacaattaatatttttacttcataaatttttaatattatcgtgtcctttaaaattcatagcttattaaaaaatcctcaaaatataatatatacatttttttaatgaaaaataatattttattagataactattccagttatcaaaccatgtaacaaattagttggaataaactctagactgaaaatacaatcaaggaacaatacagatgctctaacaaacttatgagccaccatatttgctgatcgacgaacaaaataaatagaaatattttttaaaaaattaatcatagccttaccatcattaaccacttgaccgaacgtggatatcataacaattgagcttcgcaaggcttgaacaactgaaagacaatcggtttccaggaccactttttgccaatgacgagccttgaactttgaattcaatttatatatttgtctcattattatatgaactaaaatataacaattgaatgtgaaaaaaataaacattagtgtttgttttgggtaaattaactcggcaaaaccaaccaatttttattgggcaggttgaaatttattttattaatcggatgagttgcatttagattttgtaatccgatctctacgttgagttgaataaattgtaacataaatcgaccaaactaggtacactcctaatttatatatatatatatatatataaatgagggctattatagtagggattaggtattttacctatcaataggaatagtaatttatagccttgaattaatccaattgctcaaattaactcttgaaaact

SEQ ID NO: 227962 - DNA, 1768 bp, Cannabis indica
aatacaagtttgtcaatacaatatttacactttgcttacatataaaaaagtgcatttatatttataagaaacatgtcaacggttacagttaaacaaccgacactatgtaagcataaatccgtacgtacgttatgttcatcaacattagttctctaacacccaaaacagaaatcgctgttccaaggttcccttataacataaaactagattttcaatacatctaagttctttgcaatatcaatctatgcaaataagaagacttgcataatcttaaaaaatctaagaatcgcataatctttaaatacaacccacttgcatttgtggtggaaaaaccgagcctttgaggaaatatgaacgtttttgttatgcttattttccctataattgcatggaatttcataaatttaacaaatctcaaattgggttgctttggaattgtaattttaggagctcatcgattaatgataaaagtagagctgcgtcatttgggttatgtagctgctatgacttgcatcgtgggttgccttgtaaagatgagattaaaccactgaatggagataaacaatcacattaagggaaaaagaaaaacggcagaatgagaaggagattttcattgagattaaaaccgagattgcgggtattgtctattagaatgaaaagagtttcaattgagagagacaaagtggaataaagtcaagacttatgtgtgaaagcacataagaagagtattgctttctggttctgtatctgcttttgaatctaacagcattgccatctcaacaatagttccattagccatattcgaaacaggtctgttacgaaggttctgatcgaagagcggtctcgtcgaatacatcacaatagataatcaatgtcaaagagtttgcccctaatataaatccccactcttttcatttcccctaaaaaacatcccttttcacaaatcattccaacaatggtttcaaaaacaaaacttgaaaggaaaatcataaaccaaatcgcagtaaattaacaaacatatcaatagaaaatgtttcattgaccctaatttgtacattattctcacaaattaaaccaacctcagaatcggtgaaaataggggaaagtagagctttctgagggttcgatctactggcagtggcgagtgattctgaactgaccagcttagatgcgagtgggagagtcgatctcatacgacctgcgaacgccattacgtcagaacaagaaccctaattttttcttttctctttgagtttcttcgtagccaaacaaaactcgacgagaattgagagcactatatattggactttacagagctgggaaagggaatgtagtaaacgacatgtcgttttttatgtgatgaccttacattgctgtcgttttctgagaactttatattttattaaacgacttgtcgtttacaaaacttgttgtcgttttatagttttgagattaattgtgtcgttttattggtagcgcctgtgatataggaataggcactagggagaccgctataatggtgtcgttttatagtttctgttgtttttttttaaatggtaaaaataggagttgagtttaattttccacaattttttttaatatataatggactttatattttttatccattggattttatgtattcatgtatatttattggtttaattcgtatttattcaaaattttagatttagtatttattggaaaaaaatgggatctatccagtattttagatctagtatctattgaattggatccatccaatcca

SEQ ID NO: 227963 - DNA, 1157 bp, Cannabis indica
gaaaaaataaaataaaaaattgacagaatcagaattaatttagacccttttttattaaaaaaaattggcaataatcagtatcttctattttgattagtaagaagcttgttccccacataatcagtcattatctccctaaaaaaaagtaccaatgttttccttttacattaaaaaaataaatccaatatctttatctgattcaaacaagcattccaagattcaatcaaagaaattgggtattcgaaaaaaaaaaaaaaaaaaaaaaaagcaaaaagtgtgaaggatttcaaagaattccattatttattttctgattttaaataaaataaaacattaaaaaaagtattagttggttagtaccaggttggctacctcacaagcttcaagctaatttccaataccaatgcaatgagtgggcctaatgggcccatatgttggccactttatgacagacccattctaaaaaagctcaaaagtaatcattcttgtcttccaaaattaatcaattagttgtttttatataatcaaaagcaacacaaaactttgttaagtttaaattaattatatacaagaagaaattattccctgcatgtcaccccctcattactatcataaagccttattttcaaaccaatcatggaccattacacataatgattctttgttagaattgtgagtacatgaagtattagaaagtatgggattggacccccctcttcttaccaactcaattatataatgtacaatgttttttagtattaaaataaaacatttgggcatgcttagtggggagcacatacttggatattagggtagtgtaagtcttattcatgtttgtattggaaatatttatgaggaaaactgcatagcatataattgtttaagaatactaaaacacaaagtactaaaggaaaaatcttggttcataagttagatttttattgagtggaggagcatgttgatcttcattaagctagattacctagtcaaagactcaaaaattaataaaataataattaaaaaaatataatttgccttcaacaaattagttgaaaatttgttccaaaaaaaaaaagttgaaattaatgaaaagtaagtgaaatgagaatataaataaaaataggaataaaatctagtataaataataataataataa

SEQ ID NO: 227964 - DNA, 2163 bp, Cannabis indica
aaagataagggggttaagtgtataaaaatcaaaacataagggggtttcgccgcaaattgctctattttgtttgtatatcacaatgttcaacactgcattgaaggctaattagaatatttgctctctaaattttgacatgtaccaaattaaattttttgaactttgaagaccgttaaaaatttcccttgagctattgagattgttagaattaaggacttttgtccaatattagtaagaaaagtctaacatggattaaagttcatggaacatgatttgacacatgttaaaattagaggggcgtgatttggtaaatatcaaagtttgaggagtatgatttagtacatggatagacaatcaccgaattattaaaattgaatgaaattgaacaaaagtctttaaatccaacaatcttaatagttcaggagtaattttaacggccagaaaaattcagaaacataatttgatacatgtcaaagttcaagaaacaaaaattctaattagccttaaattaaagttaatttcttatacattttttaaaaattctaaataatttaaaatactcaactattgtaagcgtcatagaaatgaaaatatgaactcattttcaacactttaaattattcaaaatttctcaaaagggtggagaataattattcaaactacaacagaatcaaaacttaattgtttacatgcatggatcaaatatatatattttatatgtataaattaatatatcttgttgcaggagctgtggctaagataatatgtatagctgagtgtgaagaaggctacaagacaaaaacattgtcaatcctaagtggagcatctgatgcaaaagggtatttctatgcaacattattatctccatctacacttattggagatcatattaataacatttggaatctcaaggaatgcaaggcctacttggatcattcaccattggaatcctgcaatattccaactaatattaatgatggtattcatggtcatcttctttcttcctacaatgtcctcaagcacaccagcacaaaattattctcagttggacccttttactactctactagctcttaccaacctaaatcaccatcatctcccactccagcctattaaatgtatttttatgtttcatgtttttattttatttcttttattgtttgattatttcttttgccctattaatttgtttgagagtttcgttcggaaaataatttgaggaataaaaagaacaaaagaaagttgtttattttgatgtgtatttagtattgatgcctatgcatatacaagatcttcaaccttaattccttcaatcgatcgccattttttgagaaacatggtgtgtgtcaatctgacattcacttaataagttgttataattaattaaccattacaataaaattcattcgaaagtaagagtcaaaaaccataacatccgcaccacgaacacccctattaataactagatacgtataatggtaaatattattttggactctgtgttttgcaaaagttagtaattggaccttttattttgttaaataacaaaattgaccctgtattttttaaaattgtacaaataagaccttcaactgacttttgtcaaaataaaacttaataataatctgatctagagatgttatgacaaaactggttacaaattattttaaagttggttatactaaaaataaaattgttgaaaattaagttcaggatcctatttttaccattttagaaaaatataaggtctattttgtcatttaacaaaacagaaagaccaattaataacttttgcaaaacacaggatccaaaatagtatttacccttaaatctatattatatatatctagctattaacagtaggggtgcgggtggtgcagtttttgactattttttcaaaccaatctacacatgcagtttttacaatttcccaaaccgcactcgcaccacgaaactaaataattgcagaaacagcactgcaaaaaatagtgtggtacggtgcggtgcgatttttgcggtttttgcagtttaaactatcaccaaataattaaactatcacaaatacaacaaatcttagcaacattcaaaaacaccataaggcttgaaaataaatatgaaaaaaaattaagtttcaacaatacaataattagtgggttttgagtt

SEQ ID NO: 227965 - DNA, 2290 bp, Cannabis indica
ggggtattgttctttgtttttttatttaccttttttcttagttattttttatgcttgtgtatgttttactcttttggggtgcaactttttaattgttagtttccgatggatttgcagttatgggagcgaaggagatggtaaaatataccaccaaactcatggctggtttacgaagttacattggtcaaagttcattgattaaatcacctattaatggcttcaagaacagactattaaagtgagtgattggataatttttttgcaatgcctgagggacaatccccaaattttgttattagtatttctttttttttttagttaaatttgtttcacatgtatttcactttcctttttccaatacaaaaaaaaaaaaagttgaatatgtgtattatggaaaaaaaaaaattgtaagtggtactttgtagtgatgacaattgacaacaaacatatataaacgataacagaaaagaaaactaaggtgcaaaatgaaaagacgactggagctcagatgatgatataaggccgcagtaatatccattattgacagttttttttttaatgcatttaaacactctcaaatatcatttattttttgcagtcagtaaattttaatgcagttagtaaatttaatgtgttattttttttcagttaattatttaaaatttataatatttttttatttttatttaattttaaaataaattttggaaataatttttaaataatattaggtgtacctgtacaaaaatatatatatataagtaatttatagtgagaattaatcaattattgcaaaaaatttgagtgaaataataattgtgagagtttagccgccaaatataaataaagaaaaacgacagtaaattagtgaaaacgacttggttgtgaaggaaaaagaaacaaaaccaactcgggtacgaatccaacaacaataatacatgattggttggttgtttctgaaaacgtaatttaaatataaattctattttttgcatagaaaaacttaagacaccaaaaaaattactcccaaaaaagaaaagaaagaaaaaatcgaagagtctctcccagttgctcctccggccaacacacttccccgaaaactctctttttaagtctgaagagtagcaaatagcttagagagaaaaatggagcaggttctaagaatggcttccatgactaccccaagcccaaccatctcctgttacatcaaagccaaaaaggtttccaagcttcctcttattgtaaaatgtcaacaaccacttgaagagccaaacaacgtcaaacttcctgacccgattactcggaggttcttccgtttcccatttcttctgattactctaccatccataactgcattctaatccaaacttattgcttttcttttttggattttcaatcagagaaattattctgaggagcagcgaatttgccatggtcggtgccatctttaatttcaggttcttggttttcactcccgtaaaattcacttgttataattccaacaatcatgtatagttgtatgcatatcatatgcactatcagatgatttcgtttcatgttttgattacttaattgtatgaatttgatgtttttagtgggaaaaagcctgattatcttggggtacagaaaaaccaaccggctcttgctctttgtccagctactaaaaattgcgtttcaacctcagaaagcgttgctgatctaactcattatgctccaccatggttagtttcttcttcaactctatttatttgacttaaatctctattgttctttgtcccatacttcctatagaatcggattcaaattttgatcatgaataaatttaatttaggttgaaattttgaggaaattttggattttacaagtaagaacgatagcttttggcaaactcgctttaccaaaagataataatataataactgaaatcaaaggtcaagaaggaccaacaatggggggaccctgtaatcattttttaatcatgatctgttgctaacttaaaagcacatgaaacatgaaattggtcaattgtttaaacaaagtaaaaaaaaataaacacgaaacatgtgcatcaattctcaccgtccattgacaatgaacaaatactgtgccgattgcttttcttactttatttattttatattgttgtttttcaaggaactacaacggtggtaggaaaatgcctgtaagcagagatgtggcaatgaaggaacttcttgaagtggtaaaaaatctttggctcattctctatttgtaatgattatatgaaagttttaaactggagtaatgccag

SEQ ID NO: 227966 - DNA, 759 bp, Cannabis indica
ttttcgattctgaaaacggaagaattgaattttcaacaatggctatggctatggcgatggaggacaacgaaggagaagaagaacacccatcgtttcccaatcacaagctctgtggttatctctgcacggttctcacttcttctcacccttctcctcctctcggcactcgatttcacatcctccgccatgattcccacctcgttttcaggtccgacgacgtcgttttgtcccccgtcgattcaccagaaactaaattgtctggctcagaggaaagttgcggaactcctgtagggatggggaagaggaagaggaagagaagcattggaatggtgaatgggagtatgagtatagtggaacagatttacgcattgttgacaaataaatgtttgcagattgatgcgagaatggtgtgggctgaggaattcaatggcgtttcgacttcgaattcaacctcagttgcaggagaggtcagagtagtgttactcgtcgatgtttatcttccgattgagttttggtccggttggcagttccccaaatgcggttccgttgctggtgctgtgttcaaacacttgaggtaaattgcttctactcatactcatactcaaactcaaaccaattcaaacttgattttatagcacttggtcaaaaacttacttttttaggattgtcatgtaaattgttctttcaataatctttcttttaatttaggctttattaattctttgttagttgttgtttttctctgagacaccgtccttg

SEQ ID NO: 227967 - DNA, 953 bp, Cannabis indica
agacgaataagacgcaaggcaagcaatataaaggaattaactactacttttcatctcaagcttttgtgaggcaggcttcttcataatttctaagtatacaaacacaaacttctaatttacaataccatatgctagccttcttggaaaatataacaactgattttctgtgagcattagaaagtgtgatagttgccaaaataatcaaagcaagggtaaaactcaaaatgctatctataaagactgtaaagcactgcaatatataatagttctgaaagtgtacagacgcagaactcattaggccagagactttattaaagatggatgtgagaaaattccttacttgttattgcagagcgttgtgcgcgatcttccacttctatagccacttgaactagtcctccttccaattgtgatatgcaagggggcacaggagcatcctaaaatgcatatcaacaaaccaaatcttagtctcgtggaaatttgctaccttaaaaatgaatccaaatgcaaatgttatacgaaaagaattttctccttcagaaatcaacatttccagcccaaaaatcaaaatgacgaaaagataaagagttttagaaaatcattctcctcgacgattatgaggcaatctaaagtactacgagtaagaatcaatatattctcttaaaaacaatcttaattatggctccttgacaatcaaatttacagaaaattgttacaaatacaaaatctatactacctgtgggttggtttcagcagcaactgtactaacagcaccatcaacaacatagataaaggaagtagcttccaaatcctcctcggtgcgatagcagacaaagagctcacaacctaggcagttcattcggaactgtttctccaccatcccttcacccctagttaagaaagatcaaaacagtgacataagattcacacaacagtgatatattaagttccaa

SEQ ID NO: 227968 - DNA, 2301 bp, Cannabis indica
aagaagaagaaaaaaaaaaaagacttctttgatagattcaatgcaaatgagcttgccgcttacccataatattttaccaacttcccttaaaaaaaaaaatcctcaaacgaaagcattaacttcccaagtgcaaatcattagaagttaattaaaatcaagaagaaaaaaggaatatatgtaatacaaaaaaatataataaagcaaataaaaaaagcaactttgatgagcaaaacagtaggaagctcaaaccaaatcgtaaagctaaaatctgaacagtttcaactttactcaaaactcttacacagtacatgtatgtatacatttatacaagcatatgcagatcggagaagttgaaaggtaccagattcaagctgaggctttgagctacggttgaagttgagcaaatacatctgagggagaaaaaacaatacagaaaaggtgtcttcggagatgggaaagttagagaaaagaaaatgcaaaaccctagattttggattggggtttgagagcttcaatggagaaagctgtagagagagagaggtatagtagcttgtaaacaaagatgagagagaaaccgctttctgaaactctgtgttttctctttccatactggctctgattattttgaagccataatagtggacccaccaccgtatattttccaatggggcccactttttttttcattttttaataattttttttatatttttaagaaaatttaataaaaactgaaaatcaacttaaatcgtaaccaaaatctacatatcaaaccacatataaattatcgagcaaataaaattaaaaatttttaaaaaattaaaaatagtatataaaataatggatgcttttacaatatattatatatcactttaaaaggattatactgatgcaacctctacctattttagtagtcagaataatttttttgtccaatttttttatattcctgtacgttatagttatttaagatattttacaaaattttaaaaaatttaaaataatttacgatatagaaacagtgttcaaatattttagttcgcacatatataaaataaaatagacacgtgtgcaatacactatttgaactatattttcagcgtattaaattttttttaaattttttaaacttttacagggtgtcttaataggtatagcatacaaaaaaatttgactaaaaattattttaaatgtaaaagagataaaagtacattaatatatcttttaaagaggtgtagtgtagaaattttttaaaataattattttttttaattttagttataaataagaaaaatgtgctggtgaataatttatgactgtcactgtcctttttcttcattttttgaaagaaaaaaaaaataatataatataataaattttaaacagaagcaattattagtttcaaaaaaaaacagaagcaattattttggattgtgaaatttatgataaatatagtcaaaatgagcaggaattttttattaaattcagtagaagaaaaaaaatgtgttaagagatataattacaggtctgttatgtagtggatgtcacttcaagagtctccaactaaccccaactaacctctgtaatcagtggtaatcattttaattggtagattaattgtccaaaattataattaactattttttattttatattatttctttttgaaatgcaatttttgttatttactagggtgtaagtttgttttgtgaattaatttaattaaatatatttttacttttgtattaataattttgtttagaagatagaaacaatatgccaagaaagcaaaaataacattaatttgtttattataagaatatacttttgaattgacttgtgggatcaatataatgattgatatggtaaaccataatttaaaataatgttacccatttttgaaagcaattttgtatgaatgaaaattgtcaattttatgatggaaactctaaaagaagaataagatgaaagaaaaaaagaaaaaaaaaaaaggttggatttactgaaatatcattttcaaaaattcaacaagtgactattgtttgagaaacattgtgcaaatcaatagggacatgtcacatgttcaataaataatgtatatataacataacccttatatattctcagatagtgacgaattttttatacatatattctacataaataagaaaaacatagtaataatactaacaaagaacaatctcaataataacacctcaaaaaaaaatgagtaattaataagtttcattaaatatatcaacagaagtagtggaacaattcaaagaaactataataatatta

SEQ ID NO: 227969 - DNA, 1034 bp, Cannabis indica
tgtctttgaattatcattatcatcatcatcatcaaacatctgaggctttagttaattttctttcatttaaggtgtttcattattcaccaccttcttcttcaatggcttccaacatttttctacttcactcacctccttcttttcatactactagactcagacccacttcctcatacccaattggattaagaagtagtaataataatcataaagggttgtctgtaattacatgttcatcttcaaatggaagagaacctgacttagtcaagaagaagaagcgtgaggagctctctgctaggattgctgctggagatttcactgtaaatcaatctgggtatgtttaaagtttgaacctttattaggttagtaagctgacttttcactttattaggttagttttcaatctcaatttcactataaaccaatctgggtatgtttaaagtttgagtcttttcaggttagtaagctgatttttctgttttctttgttgaaaatttgatttttatttttgggttgttttggtaacttagttttccatctcaagtgaagaatggtttgtcaaagttgggagttcctaaagagacattggaattcttttttagttgggttgattccaatggagattatcccaaagttccagaagcaaaagggtctgttaaagctgttcaaagtgaggccttttttattcctttgtatgagcttttcattacatatggtggaatttttagattgacttttggaccaaaggttggttttttctggtttttaattgtgtttatatacatgggccactttctgcttttgctcaatcacttgctttttttggttgttgcagtcatttttaatagtgtcagatccttccattgctaaacatatacttagagataattcaaaggcttattcaaaggtaagaaactagagagcttaattctctctttcttttgttagtgaaataaccacatttgggcacaagcgaccaaaaattacactgtgcgaccataatgatctgtttgcaaccataaatttacaatgta

SEQ ID NO: 227970 - DNA, 1907 bp, Cannabis indica
catcgcccaacaatgaaactttgcttaattcacccagccgatgtggagcagatagaaaagatgttggcattgagggaatccaattatcagaataaatagcaatatcattaacattccccactcgccaaacaacccctaaatcaaaaggttctttaccccacaatttttttccaaacaaaaaatatactttttgatttccgcaaagaatttattcctgaaatatagtctctttaaaacacgactggccaacgaagaatggacattgtaaatacgaaaagctatattagcaaggacagattggttaaatagacgtaagtctcggaaacccattcaactatcttccttgtgtaagctaaatttgtcccaattacactaatgcattttttttacattattaccaccctaccaaaaacaaacacatattcgatgaacattttaaacaaatatttttggaagcttgaacaggttcttcttagtagtatgtttaacaaacagattcatagtattcgatgaatagactcattttcaaaaaacattttttacattataattatttatttattttaaaaactgaaatgtagttggaaaatatggagaaatttttcgtagtcaattttacaagtgaagggttttttttccaacaaattaatttaaaaaaatggaaataaaagaaaaacacaatcgatttctagtcttttggtgaaataaatactgtattagttttgttgagaatcatgaggtttcatctcaaacacaattggtgatgagtggagtagttaattttcttatatatggctcagtaattttatatttaatccatgtgaaaaatgttaacatctaaaacaataaaaaatgattggaaaaactttttttacacacaatttgtttcttggtttaagtttgtgtcttatgactcttatgtaaatgtgcttacttaggcacacatatatgtatctgtatgtaatatgtatagttttgtttttcaaatttattagaaagataaaggtattttttagaccatataaaaagaataaaatgaatctaatctaaaccaagaccttactaaaaccatttcatcttttattttttaaactaatttgagatatgaaattattcaagctttgcaataaataataaatactggcaaacttctgaacagagaaactgaagctaatttattgttttgtaatatatcttcttctgtgaaaatatctaaaggaaaccatatcggacattatcttaaagttttctgccaataaatttcaggttttttttagtggtaatatacatacaaacatatataatggtatctttgtaagcaagagacctgaagtctattctatgtgaagaataaatgcttcttggttcaaatgtggagagactatttcctgagaagaaaagtataattcttacctgggtggcttattacccaaggttttgatatactattattctatacagctaattatatttatactagtaaacaataatactgggaccttttatgttaccagaaccatcatcaaatatactatgctctactctttaggttattgctgtaccaatttgcttttcataaggttctttttcatttcttcctttttatactttaatccaataataataataaaaaaataattacaagttataagatgagaaaaagaaagtggttattaggagtgttcatttaattcaatctgcactatgcgcttatagtgcattcgatccattaagtgtgaattttattttttggatccaatcgaatctgcacaatagcttaaatccaatccaatccaattcgcaaatatgcggatcgggtccgttattttgaattggttactttttaatattaaattatttaatatttatgatgaaaaaaaattcccacataactagcaacaaaataa

SEQ ID NO: 227971 - DNA, 2212 bp, Cannabis indica
aaccaaaaacatctggttagcctcagtgatggatgtcaggataagaacaataacagacaaaaggtgcaatatcactggtaaattgataatgtacagtataagtactggttaatcatgatttctcaacatctaaatttgggcaaagtagctataaatagcgtagttagatataaataagtataactgtagataaagtaaccttaaagagaaatgttacatatcttaggcaaaagaaacagtaacatttaaattactttaatgttcgaacatgtaacgcgtcatatgacatttttatcctaatattaatatatttaaaaaataaggtgatgtaacgtttgaatgtacagcataaataaacaagactaataagcagtttaattttaactaatccctcctctaattgttgtcataaatttatataagcaataaattgaatggtttaattacacaatcagtagataataaagcaaaatgagatgaaattgacgaaacaattgtcaattagagtcttcacaaaacgtcaccgacacaacacaaaccaagtgctgtagagatcaatgcctctgtttctcttattcctaataatttgatacataaagattgatggtgttgtatagtccatactccatccataccataaaataatatgataagtttatgatagtaacgtatatactagtacaaaacctctcacatgctacagcatctcttcctgaataaatcaattaaatattacaatccagaaagagaaacacgaatattctctgaatttcaaaatcattacttagtatatttgcaggaattcggttaaattctaatactctatttgaaattaaatatatattatatataagtacactaactttatgcaacttcaagatcagagcttaatcaaacctgataataatctcactactccattaacacaacaagttaaacttcaaaatcattgtttagacagatcaacttcctaatacagagcacataaccaactcaaaatcaagataaaatctcaaaacgaacataaaaacgccaatttccatttctcatcacataaacgaaggaagtagagaaagaatagacttacaacgcttctccgtctctcggcggcaatggcgaaaccaaaagcgaccaagctcagaactacgacaagaagatgaaccagagaagatccccttccttctttcattggttacttcttcttcttcttcgtttttgccctaatgaagctataaaaatgggtaatgagagttcagagagatgtgaaaagagtgtgtgaatacagtgagaaactttactcttttttctctctctctaaaagcaactaaatttgttgatgttctttttctaacgacgcgaaaggaagagcgtgaggaacacggacaatgctttccaataagtgtgatattcacgcgaagctgtgtcgtgggttgtagattttagagctggaggctgggtaagtgtttattaatgttaagtcacatgattatcatgatcttgatcccctaataataattacagaaatctcattataattaggtaaacttacaaaaatactcaaatttgagttaatttttacaaaaatactgtcacacaaaaatattttcaaaaaatattgtatttttataaaacaccagtaaaacacaaagcaggacaactcaaaacaacagtagaacaccagtaaaacaccagtagaacactagtgaaaacttaacacagtatactgcagtataaaacttataaaaaacacagtaaaaaaataaaaaatatcgctgacattattttgtaaaaaaataacaaaagttaatacatcatgtaaattttccttataattataacatgtcatctcataaataataatatttagtgttgtaaatatgaatggaattttttttgatacgatacgaaatcaacacaagccgaaaaagttttagcacgacataatatgaaaaaatatggacttagatatgacaaattgacatgacatgatgctacaaattgacatgacacggcacgaaaaatatatctttaagcatggcacagcaccaacaacacaaaaagtatgacacttaagcacggatggactagcctgaaaagaacgacacgcgacaagtacaaaaagtacgacatgacatattaaaaagaaattatttcacaaatacacacaaaaaaaaaactacataattaagattgtacaaaattttaaatattt

SEQ ID NO: 227972 - DNA, 1351 bp, Cannabis indica
tatttttgtaattataaagtatagtttattttttcttaagatggtataaatgtttattttaactaattttaacctaaaataggaaaaaaccctaaattatttgagagtacacacacgacaatagtaagacaaacaagagtcgtaactaaaaatggagaaactagcctcagcagcattcagcaatggtgtcgtacggattaggtgaagtgatgtaattcgaccccatatcaaccgtccgatcaaatattaatcaacggcacaaatattataagactatatttgtagataaaccaacaataaagacaaactcacttttattaaggaagaagattacattgaataagactcgaaacagaaaaatatccaaaactagttgagtagttagagagagcaggtgaagaaacccaatccatggaaccggtagccatggctgtttatagtagtggagcagttgaagaacaagaacacgaaccctatgaacaaaatactgacgagttcacaatcccttttcaattttacataagaagaagaaatccagcttccctcctaaacatcctcaaaccctaaccctaattctatttcagccatgacctcacctaattcgaatgtgaattcttcttccgcggcaaccaccccccgcgacaagagctccaagcagccgtggcggccggcctttgccacgagctgttgttccgctgaggataaaacgattctcaggaagcttagcttgtgccgaacttcgagatcgactgagctttcttcgaagaatattggtccgattccgtcgtttcggagaatttcgttctcggatttgagtcggtcgtcgtcgacgcgtattaacgaagacttggcgcttaattttggggctgagttgtacgattttcaattgagtgagttgcgaggtataactcagaacttctcgagtaattatttgttgggagaaggtgggtttgggactgtgcataagggttatgtggatgagaatctgaggcagggtttgaagcctcaaccggtggctgttaagcttctcgacattgaaggtcttcaaggtcaccgggaatggcttgtaagttatttattttattttaattggaaaaaaatgtatcttttaacattaaattatttaaattacataacaactgtttatttatttatatatttttacacaaatacatgaattgaatagtatctattgcctgttaaatttttttcttccaagtcatcactgtctaaatttattttctttcttctttattcttctttatataattaatatatggtcattatatttacacctaaataaaataaattcttcttaatatttattttattttattattatatatatttt

SEQ ID NO: 227973 - DNA, 3657 bp, Cannabis indica
tatgttttagtcacaaatgattttttattgtgactaaaagtcgcattaatttagtcgtaaaaaaattatgttgtgattaaaaaattgtcactaaaagtaacaattttttgtagtgtgatatcagagtaaaataaacaaaaaacttctaacgaatatccagcctaaaaaataccgatcaaaaaagcgaagaaaaaaaaagccaccaaatccaaaaaccgataaaaaaaagtagatcgagtcaaagtcaaaaaaagtcacttgtgattctgagatagtgagtcaaaaagagctattgtgattagggatagtgggcccaaaaaaaaaagagccacttgtaatcgagttgtccaagatagtgagcgaaaaaaaaatatagctaccatcttaaagagggatgttagaaagtctcacattcttaatgtgtggaaacatttaaacatatataagattcatgagttactcttcctatcgttaattaattttgaaataaaactccatacatctaatcctaaattttactaaaataagtatagaattgtattctctccagagaaaatatgattgaaagtgagtaaataatttcttaccaaaaaaaaaaaaagaagaatgttatcacatttgattatatgtattaagctgcaaacacactattttattaaatatattatcaagatatttttatatatttaatattgacttgtattaaatataaatatacaatgttttaatacaaattaaaattcaatcaaaatatgatacacaaccatataatttaatataatacaatatattatttttaaaaaaatcaatataatacttaccaaatgcgtccttattaatgatattttatttactagttccaactaccacgtgacacactataatgtaatttcatcatgcatggatgaagtttgtaatttagttatcgtaggaaaattgtcttttgaaagaaaagcaaaatagtaaaagatagagaaaatgagaaccaattatgtctttttggttcttcaagcaagagatggagatgttcaaaccattatacatattttgtacatggaaaagaaactagacatattgaaaggcaagaagggtggacctccttatttatttaattcccttcacttttgggataaactttcttcaacaaaataatgtagctaggatgattattttgccagctagatttatatgtatgaatatacttatatacagtgtggattcaagatttaagttaagggcatgatttttgtaagtaatactttttatttatattttaaatgtaagaatttgagattatgtagcattaaatataattaaaaaaataaataacaattaacaaaaaaaactgagtataactcaaccacaaaaacatgaaatgtggattttttttagaataaattgcataaatttaaaaaaaaaaatggcatttcaacccttgcccttgtgataaatctaagttaaacacaaccactaaagatctaggtagtgtttggttggaggtaataaaatggaatgaaatggaaaggaaacaatttttattctattcctttgtttggttgcaaataatagtattgaaatgtcattctaatggaatggcctttccaccattttagtagaatgactattccattttgaagtgaaaggaaagaccattccaatacataatgagaaaaatttaataatttttttattaattttttttatatattttaaattttattccattctattcttattcatattctcgttcctaatcttatattttcattcctcccaaccaaacacgactttaatattattaacttgctttaaaacatatatacaataatggcgacctcccccttttgtatccatgtgggtgtccgcctttatatacatatattaattagtctactattttgtgaacattgaaattatatgtggtccggttcttatacgtactgggattgaaaaattgagaagcattattatgtgatgctcctctttaaagttttttttttttccacaacaattagagtcgacgtattgaatcaactactatgtgtactcaactttatatgtttttgacataataataaacctaacaaattaatttcattttatttatataatatgaataatgatttggacagataatttggaatgataaaacttaagtaaaatatctaaatggcataaattgatcgatgacatatttaggttgagttttaagggcattatgtttgatgtggaagatatatatgttaggggactgcatggacaaatttattatccaattccacatgataatcaaaccaaacataggattattaatctaattaactagtcccatattgtaccaaacacaatagtattaaccataattcaatccaaactaatccaatctatttttctaattttacgcacaaaacaaaccctaatatatggaataatattacttcacaagaagaagaatttttccttggtgcaaataacaaagtataataatcaatgatttatatacattgacttcttcattgactctcacattttggacagcacaatatcttctccaattcccaaggcacttcttttttgcttttgttttaacttcttaagttacaagcaaagacactcttacttagtgcgtaggtagttgaccaatgaagtgatcccacaaattgaataatcgcccaccaaaaaataaaaagcacataaacataataaatatgtaattggctttaatataagcaccaaacgcactcctatcctaaaactagaagtgggagttgatagtggagtgagagagattccaaagaataaaattaatcacagagggcatagccacatatataagtctctccaaatactcaagtaaccatccccatgtgctctgtgactcatttctttgttatttttcaatcaacatgtcttgtaatctcacaaccacttatccctaacttttcttcatctttttgctcacttttcttgtttatgccctaaaaaaaagatgcactttatatcattttattttcctttgaattttggtgtagtatgatttttaggaaaattttacaatgcacccctttaaaatggatacattgatgtacttttatttgttttagcacccgaaataattttttactcaaatcttttctcatggtcatatacgttatagttattgaagacatcctgcaaaattttaagaaatttgaaaaagtttaacacgtcgaaaactatgttcaaatagagtattgcacgcgtgactattttattttatacgcgtgtaaaatagactatttgaacattattttctatattgtaaattattcggaatttctcaaaattttgtaggttatcttatatagttataatgtacatgaatatgaaaaaagaattagactaaaaaaattttcttgactgaaacaagttaagagtgtattagtacatcccttttccctttaaaaagggtgtattgtataatcaccctaatttttattgagaaaaaaaaaaataacttgagaatttaacaatgcaccaaaccggaggtcacttttatatgtaatacaaaaaaattaaagtgttataaatttatttatattctttattggcttgctatttatgtctttttaaacaagttgaattggttatgatttaacaagtgacactagaaagtac

SEQ ID NO: 227974 - DNA, 1715 bp, Cannabis indica
tttttttttgttttgtttttggtgaaatctggtgtttaaaggtcaaaatttctttgttcagagcaaccgatttgtgtaaaatgaactcagtggcgaagcatgcggcaaccctattgaaacggccgaatgaacagcttcagcaatgcagaggaattagggttaaggtgcttgatggcaacctggagcgtgccctaacgtttatgcagcgaaagatgcaatcgagtgggatcgagcgacttattaagaacgagcagactcatcacatcaagaactccgagaagcgtgtattggcaaggaagaatcttcaacttaagattcgatcacaagagcttgctcgtaaactccgagctattctcatcaagaaagtcaggtactttattcaaaattttgctactcattggttgatatatatgagaaattggttgctgaaattaggtgaattgtagtgtgataaagaaaaactcactgagttttcatcaatgggatttgtagtatatagtgagaacttgtttttagcttgtggcaattccaatttttagtctttgaattagtttgatcatggcttgttgcttgtgtaggattaatcttttgtttatattttttgggtcaatcttagtaaaattctgtattacacccacgatatgggtgtttaggtacactcctatctgttttagttacttaggaccaaatttaaacctcaatcttataatgagattatgagaaatttttatgagagtatggtgttttttttgttcttcattctttgggtacaatacaaatgacccacatttgggattagtagtgtagtgtatattatcaggacttgtttatagattgtggaaactccttatttagtcttcagaaatcagaatggaaggtagccctgtatacagttcaattggcttgatcatggcttggcttttttcttgtgtaggattcaacttttatttatattttgtggatgaatcttgtgatgagattatgagaagcttatgacgatatgcatgtattgaatgctgggaattaggtagaaaactcataaaattactagttgagatattagattattttgattgaatttgttgtttgggatttttaagaaagcatagtactatagtagtcaaagtatttgtcttatgacagttttaaattggagcttagtcgtagataaggttcgtagtagtgtaggttcttttggttaggttcttagtctccaagttcaaagaagtcatcagagtgaaaaacaatgttcatatcaggtgccttctatgcctgaacgaaagtattggtcaaagctctatgataggaatttactcctgccaaatgaatagaacagtagagaagtagaagagctatagaagaagaacagtttatattgattacccagggagtttaagagccctgttctctcccactgggcttaccacccttcgcaattgaactctctccctctgtttattatattccttatggtgtacccttaaacccagccacactctaacatgacacccttaaccaatttctgctcctaagggaaagtctaataggtgctattgaactgataagatttcttgttgtattatggggtgcttctgattaggttcttagcataagttttaaagaaaaacaattgatactcaagagggtgagttcaaatggtcagacatgtgttttgctcccacaagctcccgttttgagtccctcttaggtaccta

SEQ ID NO: 227975 - DNA, 2872 bp, Cannabis indica
cgatctctttattttcagtcaagagttcccataaaattctggaatgaatgtgtattaacggctgcttatctaataaacagaattcctactcctttattagataataagactccatacgaattgccatttgataaattgcctgagtatcaacaccttcgctcattcggatgtctggtttttgcatctactttgtcaaatcaaaggagcaaattctccccaagagcccgaacttgtgttctaatgggacaccctcaaggcatcaaaggatacaaattgtatgatattaacaataaacagatgtttgtctctagaaatgtagtgtttcatgaaaacatttttccatttcagaaactcaataacgaggataccaatatagatcctttcactcatactgtgctccctaattctatgataactaacacccctgtctatgagtatcctacaggccctagtactgctctcgatcctccaaatcaaagagatgaaaccagtacaaatgacaatcaaataagggaagaacctaacgctactgttgcaccagcagccccatcgcaaataacaacccaagatcccccaagaagatcaagtagacaacacaaaccaccgagctatctgagagactttgaatgctattctctcatccaggatcactcttctactccacataatattaataaattcatttcatactctaacttatctaaatctcacaaagcattcatttttgcagtgtcgtccattaaagaaccaagaacatattttgaagccatacaaactttagcatggttggaagccatgcaatgcgaattaaaggcgcttccagacaacaaaacttggtctatagttccacttccagccaacaaaagagccataggctgtcgttggatttacaaaattaaatacaatagtaatggtagcatagaaagactaaaagctagacttgttgctcaaggttacacgcaacaagaagggctagatttctttgatactttttctccggtggcaaagatggttacacttaaattacttctagctatatcaaccattaagaattggcacatattacaacttgatgttaataacgcctttcttaatggtgatcttaacgaggaagtttacatgtctcttcctcaaggtcttactttgccttcttcttctaatgcaggaactaatctcgtatgcaagctgcacaaatccatttacggactcaaacaatcatcaagacaatggtacaagaagttgtccgatgcacttctccaagaaggattcaaacaatcgcaagctgattacaccttatttacaaggggatccgatgataactttatagccctccttgtatacgtggacgatattatcattactggtccaaatgtttcaaatctacaccagctgcaaacctctctccatcaaaaattcaagctaaaggctcttggagacctcaagtacttcctcggttttgaggttgcccgtgcaaaggaaggattgttcttgtgtcaaagaaaatacactctccaattacttgaagattctggtttcataggcagcaagcccagcaagacacccatggatcctaaacagaaactcaacaacgaagaaggagaactgttagaaaatccatctcactatcgacaacttgttggaaaactgctctatctcaccttatctagaccggacattacatatgccgtgaataccctcagccaattcatggcgaaccctcgtactactcatctacaagccgttcatcacctcctcagatacatcaaaggcaaacctggacaaggtcttctctattccaggaattcttctttgcatcttcgtggattctccgactcagattgggcatcttgccccatcactagacgatccacaactgggttctgcatcttcctcggagatttccttgtatcttggcgcacaaagaaacagccaaccatctcgaaaagttcagctgaagctgaatatcgagcgttggctgccaccacaagtgaagtcacttggcttcaatacctcctaaatgatttccacattcctcaaccacaccctgcattcttctattgcgacaacaactccgccatacacattgcaaacaatccaacatttcacgaacgcacaaaacacatagagctggactgtcatttcattcgagataaaatcaacaactgctccatcagacttattcccatctccactacacttcaactagctgatgctttcacccaacccctgtcttcaccatttctcacatctcatatatccaagatgtcagtttacgacatacactctccatcttgaggagggggtattaagtttactgttattttaccagttctgtacttagtatttctggtcttattggtgtttatgggtgttttggtcctttcatctatattcaattaattcagttagtttaagtttgttttgttagcttaagtttaggcatgataggtttgtctgttattttctgttataacagttatgtactattactgaagtcggtgggttttagaggtccaagctatataaagcttgcttctcccctgtttgttctttaattgaattttcccttttctttgttcttcaacattcaattcttctttttcaacatacacaaacaacaatctttttccattacaaaagacaatttactcttgatgggtatggcttcgttaagaattaattctccataataacactactacaaatattagaattcatgacagttctaaaaacgatttttttcgaggaccgtcgctaaaaaaattaagtaactatttaataccatccggaaaaatttagtattttcgatgatttaaaattttagtatacaaaataggcgacgtttttttttaataaaatgcaattttttaat

SEQ ID NO: 227976 - DNA, 1959 bp, Cannabis indica
ttttcaccttctaccatcatctcacggtttataattgaggttggctcttcaatactacttccagtattattagttaacttttcatcctgttgcaaaggttcatcttttggtaaatcagagacaacaccgttttcaatcacgaggttgttctgctgaacttcagaatcagcttcttctcttcctgatacgttcttggtgtcaacttcatcaacaacaacaggttccactgaaacatttcgattgaattcagaatctgtaagcatcgacttggggccaactgtgtcagttgactgaacttcttcatcattatcacctttctcaaccacaaggcttttgttctgaacatcagaatcagcttctaacaccccttcttttttccctgatgtgttcttggtatcttcatcaacaccaccaacaacaggttccatcaattcagaatctttaggcatcgacttcggagcaacagtgtcagctgactggacttcttcatcatcatcaccaccacctttctcaaccacaaggctgtttttctgaacaccagaaccagcttctaacgccccttcttcttctattcctgatatgttcttggtatcaacttcctcaacactaccaacaatatcaggctccaccacaacatttacattggaatcagaatctaacggcataccagagaaaacttcttcgtcatttgcacctttatctacttcaaaatcagcttctatccctccatcttttcctcctttggtatcaacttcatcatcaacaccaccaataacagaccccacaacaatattctcatctgggacaacttgttctaccaacttctcttctaaactcacatagctatctttaacatcatttccactatccccaattttaccttgttcaacttctacatctccactgaccctaaaccccgactccccaccatattctttaaccaacttctcagcttctaattctacctcctcaccgtcaaaatggtcgcttttctccatcaccaaaaccttatccccttctttatcatcattactaacaccattgtcagccaccaaatcctcctcctcctcctgtttctgaggagtaacacctccaccctctaataaactctcaaccccaagtactacagccgactcttccttaacctccaaaaccccaactttcgaaccatacaaaactccatcgtcatcactttcatcatcaataacaacatcatcgtcatcaatggaaaccttggcaattggtctcacaccaccactaagcatattaacaaccccagcacccttctcaccattatcatcaaaattgtaaggagaagaagcatcaacaaggtcggaatattgaaaaggagaaaacgaacctgttgagaatgaagaaggcggcgtcatggtggttgttgttggtgttgtggcatcaggcgaagagggagactttaagggctccattggagaaagtggaaaggggtatggaggaaagagataagggatttgaggagtgtgggagagagtgagtagcttcgatagctctgtttggtttagtttggttgggagggagaagaagaagagagataaggcttactttggtttggacgaaacctttctctctctgccttttgtctctacttaccaccaccctatatacatacggcttttaaaacttttttcgacttttatttttgatttctatcatatatatatatatatatatatagtttctcttttttatttttttgctttaaatttaatttgtcttgccattttttcaccaaacttctccctattcatcttagtctttcgtcttctaattgttatagcaaataatttttaaaactgaattataaaagactgcagataaattaaaatatcaataatttgattacccatattatgtgtgccattgtcaagcaaattcttcgtcttatactttcaaaatgatgagatagtgattgggcaagcatgt

SEQ ID NO: 227977 - DNA, 3490 bp, Cannabis indica
ctaaatctatagccccaatcattgagtctgaacagttttagagggaattcaaagccgccgtgacttaacaaaatagattcatgaacgaatccctgttcatctcctctcaacttgagtctcatgtgatgtaagaaattcttttctgcaatatctttctccacatcaagcaggccaccgcataattcgccaatcttcctcatgatctcaaagttccataagtttagaggcactccttctaccccaatccacgagcatctgcaatctactttcacctctttgtgttgttcttcccctgaccacttaacgaaagagatgatagtatcgcctgtgtctggtattacagttctgttgatcttaagtaaactttccatctcttcctctgtcttgcaccaaattagagtgcgatcatcaaacatttggctaaccaccaactttctattaatttcccgtgaaagattgtagaatatggcactccaagacatctcgctattgtttctgaacataatcacagctcgactccaatccttatcacagtcatccgcttgtaaaaattcatgaaaatttttctgttccattcgcctccttggaaacggattccgtggtctgaagctcccatttccttttggtaaaaagtcccaaaatcccaacttgttgtcttttcgattttgggatctttgttgagggataatgtttctcctatcaggcggtttcggtcttctaccagtcgttgattcgacgtgtttgtcatcagtttggtttctcgttgttcccgtcgtctgtttcacaatattggcccaagaatgcttaagtcctccacgcttcttctcctcgggtagcttcaaggtcgtattaacgttgtcatttttcaactgattatctctttttaatacacccttgaggcaccgtgcaaaatccttccatcctctagcgtgtttctcctccgggatgatcaccattgatatcttgttgttcctaaggacagataccttcatgaacacccccctcctgttgtgaaagctttccaagaagcagctgttagagttgttcctaaatgatctcttgaagtttaaattctgctcctcctccctagttatcaggtcttctacaatgtccaccatccatgaagttgcatccaaagtaactgctatctcgtagcctgatatgcgagttctttcacagattctaaccgaaccaccatccaacgttaaagtgagcataaacaccttatgagcagtacgaaagctccaatatttttgagacccctggtcaccaagggatccaggatattttttaaagccaaaaccagtggggtaatgaccaaatttctttccaaaaccagtggggttttggtgcaaaccatgaccagaagggccatggaaccccctcgtatgcatgggcacgattctcaagttagagttaatgttcaactatgaaatatatcaaggccagaaagattaacccctcggaatctaactttttctgactgtatgcatttgatgatatcgagtcttgttaggtcggtagttaaatcttcgtcctccttctttctatttaacacagaattaattccatccataagtccctgtaattgataatttgagcattttaaagaaaaaagaaactgtatagatagttaatgaagtctaagaaaatttaattagttaagttgtcacacttagattgttttaatatattatggaacaccaaattttaacagaagatctcaattcaacctatacgtgcatgtgtgagtaagttcgttttgaatattgcaacaaaatcatgaaataatcgaaagtaacatgcctgttccatcaaatattgactaagatctttaactcctgaacctttgagacctgatatcatgaaatgcctggcaagataaaatgagcatttaaataatagcaagccatataaagcactgtgggtatattagagcaaaacagagggaagtcttaaatgtaattttccacaagaaagaaaatcctacctctcaaaacccggtagatccttgaattgctcagcaactttcaacaagtctttcttttctcaactaagtcaaccttattcatacataaaacccgcttttgtgttggatgtgattttgctcccatatgtttaatgagtcctatgactcttccatcaggcctatttgaacaaaatttgaaaggattacacataagcgaccaaatatatgaatgaattaaaaagaaaaaaatatgttcagccagtatttacactagagacagtatatgtgtgcttctaagatatcaagacaaaaagatatcagatatcagtaatcctttaagcatttgcaaaatacacgagatatttggcttccaccttaccagttaaagttcacaaattaggtacgcgtgaagtgtgattatgttaaatactttcacacggaaaaattgtaaattgttaacgttggcgctttcaaaatcttttatgctggaatttctatttcatacaaacttcaaaaaaaacatcaatacataattttgcttattgtaatcaaacaatacatttgcttctaacagatcatacaactatgactaataaaaaaaagattatagagatgttacaagttacaaccacttagtagaaatcactctcaaaagactagcctaataagagagaaaggtatccaagtagttataaaccatcgtgccgatcagatcctgacaaaagataatgtgaaaatcttaatatgttattttttaaatatatatttccaagaaattaaaaacaacataacatgttattattaaaattaatatggtttctgtttacaccaaaagtagcctttgatggcatggacatcaatgtttgacacatggcagcaagaaagatgacatctcggagttgagtagtcccgaatcatagcaagtcgatctgggaggggtccctagccctgcgcccagattgactacgaaaactccaaaatagaagtttggacttcgataactcattttcaactcgctatctttcactattctgtatcatgaagacatagagcaactaaatccaggccccaggaactgaaattacacgaacctgcacctcaaaagtcaacctgggcacttatggtttcacccgacgcccaagttgacattcccaactaggatttcagtttttgggaacgtcttagtgcaaatgggtcaaattttgcattagtacatcacctagacataccaccgacgtatttgaggcatcagaatcaaattcgaagcaagttcatttttaagcacctggtgcccgagcggcccagcacccaggttgacaatttgtcaatctaagcgccttctaagtatcaaatcgactatccgacttttgcatcttcttcgtcttcatcaaaaacaagaaaaaaataagtactattggggaagaaacaacactttttgggtgccaaaggaaaggcccagagcctaagttgacacctgggactggcccaacgcctaggatgacattttatcaatctcggcca

SEQ ID NO: 227978 - DNA, 3645 bp, Cannabis indica
aaaaaaacattaaacttatttatttgtatatatatttaaaattattatttatactttaactatatattataaacaaaaaaagtaacttaaccaatagagtcttcagtcatatatatttgactaactaaaaaaaaaaatacttaggtagagtttagtaacacttttttaatcaattttctatttttattttaaaattaatttattttatacttttaactatatattataaacaaaaaaaagtaacttaaccaaatagagtcttcagtcatatatatttagctaacaaaaaaaaaatacttaggtagagtttggtaacacttttttaatcaattttctatttttaaaattaaaaaagtgaaaatattttttaaaaacatgttctataaaattgttttcactttttaatattttaattgagaatcaaaattttaaaaacagaaaaaggttactttcaatattttttaaaacagttttttttttcttaattaatattttggactccgaccagacctggatccaaatccctccccccccccccccccgagtttaaataaaatttaaaaaataaaaatgaacttaacaaaagtagttacagaacgcatttttatttttctaaaaataaaaatttttacttttattttgtgattaaaaaattaaaaaataaaaatgttaccaaacggtatatagtaaactccttacagaggaaggaaacgcaaggagatcaaaagtaatctttttcttttatattatttctttctttttgggggtgaaaggccaagtcaatgccaactcttccaatgaccatttattttattgtgtccccacacacaaaagcaaaactaacaaaaaaaagaagtgtttatatatgagaaatgctaataggtattattgtggctcccatatttttaagttttatattgctattgatataatttaatattaaatcacatataatttaatgtaaattttttttagaaaatatcgctaattaatcatatagtataacttttaaaatgtgctagatactattggtgttcaataacaatattcgttcatcaaggcccgctctaaaattggatgggcttaagaaaataaaaattattaggccctcctttagtatttttgaaaactattaaaatatatttaagtatttttgaagatttttttttttggcccgtgagctgggtaggttctagtcgtaagcctagttcaccttatttcaatctcatcatttatatatataaacatatctagtatcatttaaaggtggcatttaacgattaattagcgatatttccttaaaatttattaacttaagttctataagatttgataattaattagcttttaacattcttccatgtacatcttctcataaaagctctaaaagtaagttttctttttttacttagtcagtctccattattacatataaatataattcttatatatatattatatattacaaagaaacaacctttcattttctaggaaccttctctctattcaaataaagtcttaaaatacctttcaatctcataagagacttcatattcatcacttggaaatggaagaaacaaggtaataatgatataaaatctacaccatattatacatacatatatatatagatatatacatatatattttgttgatgatcaaaattatatgaaaaaaaaaacagggaagtgaagatgaagcattggatttataaaagggaaggaatggaagatggtgattttccagtttgttgtagctatgggcctatgagttgggatgatccatttaaatggcaaggtgtgatttttggcccatctggctctccttatgaagatggtgttttctttctctctattgatttgccccaacaatacccttccaagcctccccatatcaaattcttaaccaaggtacaaaaccctatttatataaatatatagagatttatatatataactatacggtaagtttatagtacactctttatttgtttcgacatttagaactgttttttagtttaattttttcacgatcacatacgttgtagctatttaggactatctataaattttgagaaagttctaaataatttacaatgccgaaaataaaatttacatattttgttgtatgaacgattatttttcttaaactttgttttcagcacggtaaactattcaaaattttctaaaaatctataaatggtcttaaatagctacactgtatgtcatagacggcatgtcatagaagtattagacactttggtaccccataataatgctcagaaatctacctaaacaaccatctctagagctctactacataaatttcgatatgtatatatatataaattttgaatgtagtcctcaatctcttatagtgtggtcttgttctatccacaagtaatttatggagtaatataaaaacattactaatgttaatattatttctagattactttagtaacactataaattaatgtgtaatagaactaataatttagaaataatattacattggtgatgctacatattattagtcttctcttttgctttattatcatgatgaatgatcaaggtctttaattttgtaggttattcttaattttgttgatttgttagttaggaaattctataattgccattttacagcttggtttcacttctatttgctttatgaaaaataattattggaattatttaaggccataatttatttttctaattttttttttttgttgttctctaagttgaaaattttgagtgagaatacaagtttttatatcaagctgttttataatagggcattataattcttataattctaaagattactactatatttttttccaagtatttatgtcatatgatttcaactttcttcacttcccattttaaatgaaaaatgacatctatcccgatcaaattagattcttcgaaccctgttgtatttgctcgattccctcacatacttactaattagtttaaaagtgtcacataactcggaatgaactactgataagcttttgtcccaaaagctattccaatatctactactataatatttggtaatacccttctatgcattccaatatctacttactctatcaaattattttaaaaaaaattattattattaaatactttaacgtgtctaatattataccgatgtgacacgtttaaagtaatatttaatatagtaattgacattttaaggttcatttataccatttatcttaaacaaatcaaattagaggcatagcatttcaagtgggactaaattattcttattaatatttctttgaagaataatgccaatatttgtttaatatttttttaacacaattgactgagtgagtgaagaagtcaatagtcaacaacgagacttattggatgggaaggaaaaaatagctgagttgtcaaaaagttaggtctattaagtggaagagtggggcccatttttgaaatcttgaccacttccatatgtgaatgaactcttcttcttgaagaaaatttcaaaagagagtaataattgcacgagaaatattataacgttgggtaattagtataggaaatttatctaaaggattgttctattagttttatttgttttggtatttagaattttttttagtcaaatttatttttc

SEQ ID NO: 227979 - DNA, 1941 bp, Cannabis indica
tttgacattacggcggattcgtctgcggtggaggtggctagaatgaggcagagaaacaacaaccatgggaatattttaaaactgaaatttgggatttccaaaatccccatttttttccagatagagagaagaagaagtttatgagtgtttaaaaggaaagagtcaaatgaaagacccgggtagcttggccattttccatggaaaataatgccatgatgaataagtgagttacagagtgaacaacaatacagagaattgactaatttgtaaaagagagtttgaacaaagatcacatcagagtctcacacggatttgaatttttctaagtggcagttgcagtagcaccatcatcagtattcagacccatcttttaagttatatagaaaatatgactaaaaaaaccaaaatacatatacaaattcaaatacaaatacatatacaaaatggtaagaaagtcttatggtaagaaaagaaacaagtcaataatatattcttcttccttcctctttttagttaccataatagtgtgataattaagtggtcatgtctttaatttctttgacaactaccatgggtttcagtccattgtgaaccacatccataacaaaactggtaattacacctgcaccaccaacaacaaccaaataatacacaatcaaaaagccaacacaaataagtttttacatcaatgacacatctaatctaacttagattacaaattcaatcccacccctcaattttagcaatttagtcccaaataaataattaatcacaatcaagtccttagtagcaatttaacatttattgttttttgtttacaaaacttttagattttgccagaattttgttattattcaatgccaaatgataagtgaaagtatttgaaaatgtataatattttaaaatgagcattgtaacgagacactcatgtgcttagtaccatgataatttataaagtatcactttataattagttagcgattatctttaatagttattcaagtaaaataagtgtgacccattattgagttgcaccaacaactatattacacccgataaggatgttaagcaccatgaggtaccttcaacatttcttcttcaaaaaacagaaagtgttaagttaaaaattaatacaaaaaaaacttaattgctattgtttttaaaattaaagagcttgaatttttaaagcgttcagtttaatgtttaatataaactaggcggtcgttttaaatattaaatcaatattatacaatttatgttaatatttatttataacttatttaaattattatttttttttaattttcaaagagtttcttttaatatatatttgaatttttcttaataaataaataattaaataaattcgaaatttataaattataaataaaaaattgtaattaataatacaataaactatgattatacaataattaataacttataaattatggatgcataagtgatccctttttattgtagaatttttgaaaattatttactaaatgaacggtcacatctcctctcaaccaaaaccaaactaacaagttcataatgaatttgaattatacttagtaaaacagagtgtcattaatcttaaaaagtaataatttaagagactaactaaactcttaagttcataattaaattaaattaatcatcaaatcaaactaaacagagtgattaatctgaaaccaaactaataataaacctatatttacgagactaatcaactcttaagttcataactaaaatttgaaattaatcatcaaagtaaaacacaggctaagaaatttaagagactaatcaatcaactcttaagttcttaagctaatcattactctaaaaccaaacttaataaatgaaattaagagactaaatcaaagttcttaaagctcataattagattcattaaaaacagagattgaaaagagaaagaga

SEQ ID NO: 227980 - DNA, 2470 bp, Cannabis indica
ataaaaatatgatatataatctaattcaatataatacaatacaatgtaacacgatttaatacaacgtaccaaacaagcccttaagagtaatatggtcaatttattaaattggagttaaaagtaccaaatatacaaaatacaaggaactaagtatgtcttttgataaaaacatatgatacaaaataactatattccccaaaaagaaatgaaaaccaagagtaatatgatggtaacaccttaaattgtcaaatagaattactcaatacaattataaggaaaattcaagaatgatatgtcttgtcaactatgaaaagagtatattgttaggatccgcatggttatccaaagtttataactatgagacatcatgaaatctctattttgaactaaaaacttggataaagatatgagtgaagtactgcttcacaaactaaaacaaaccatacaaatagattgaagtaatcaataaaattgaagaatcttttgctgttttaccctgttagctaagcagcctatctggtcaccatctctacaatgtgtcaatgttatactatctccaacttgtttcaggttctgtaatagaaatgtggtaagccattggtggtggttattgatgaaggtggaataaaatggtgatggaggatattagaggaattattcggaaagtggggctgagtagtagtggcagccagcgatggtggtgaaacactggttgttgaagaagggaatcctgatgatgctgcagtagagaagagcggcactggaggaggtaatacagctgctctgccatttaggccttggattggccaagctgcccagttgtgtacaaaggaattcacatctacccccttctctatttctctttcctataagaaatgtaatgaaaacctgagctcagatatgcaaacatattcactgtacagcatgtctctattgtaagttaattaccctgttgttggcaaagaaattggaatttatgccactcgaagagtggtgatcctcatatctttgggagccatgatatgacagtgtagccccaacagtggcaaagttctcactctgtaaagaaaaccaaaatgagattttactaagcaacatgtatagatttatgcaggttctgatttttagggtaattctaggtaattctttagtacaattcctaaaagaatctacattatctaattggttcagcattcaggagttcatttttagtttttttttttttttttcataatcatttgttatagttatttagaattatttttaaattaaatttacaaataatcttaaacaattataaagtatataaccataaaaaaataataaaacaaaattaagctataaacttcttacagatataaaaacaaatagaggcgttcggaaatagtgtcttgtattatacatttttcgagatttttataacctttgaccattttttaccatatctgtacaatcgtccttattcatcaaatattagataccacgatcctggtcattcattgtgattgtacactacgatcctaactttttatggtgatttgattgtacattttagatgaataatcaagattgtactccaccaataattatagcaatttaataccaaagttttagttagattaccttgtctctcttaagaactggaaagtcacagtatccttgctgaaagtaagcatcatcggcttgagcattagaagcagaaagtggagcaatacccaagttcaggtcaagattttggttgctgcctgtaaatcctgaaagagccaagcattattttataatacaatggcaggaatattaattacaaaagaaaatgaggtttttaaaagaaactatacacaccatcatggtcaacctcagacatcatgatttctccatcataagagtttggatcaaagttagtgaccgcttcccttccattgcatttaatggcagccttgtcatatgccctgattttggaaacgaaaacaatggtttgttgagatcaaatgaaaccatgaaaattaaggacatataaagagttcaactgaatattgaaaaagcctaaagaccttgcagcttcaatctcgctatcaaataggcccagataaatatacctgcatccaaggaattgatatactttacccaataaaaacagaattcccagctatacacatttttaaaataatttcctcaaacctactactacttgttattagccaaaaatgataaaggattttgttttattcttttttttttcttactttttgcccataaactgacccattcgtgcttcccatcgtccacacttgtgtagtgtcactcccctgtatttggagcttcctctagagaatccagtgctctgtctacgaagtatatgaacaaattcctccttgctaaagttactcatctgtagaagaaggctactcaaaatcaaacaaaacctccaaacccaataacataaaatgaatagagcaagagtacccacatg

SEQ ID NO: 227981 - DNA, 1984 bp, Cannabis indica
tggtaaaatatatccaacaacccgcaccatgaaactaaaaaattgcagaaaccgcaccgcaaaaaatggtgcgatgtggtgcagtttttgcagtttctgcggtttagattattaccaaataattaaactatcgcaaatacaacaaaacttgagcaacacttgttaaaaataacataaagcttgaaaattaattatgaaaaaacttttaagtttcaacaatacaatagttagtgggctttggattggacattcacatattggacctaaataaatataagaattggtatttttataatatttagtgcagtgcgatttgaaccacacattaacaattcaaaaccgcaaaccgcactgcactgcgcggtttagaaaaaattcaaattgcgaccgcactgtaaagaatttcaaactacatttttttgcagagtggtgcagtgtggacgatttagcggtttgaacagttttattaacacccctagtatgtcttatggtccaatagcattatcagttattatttagtgatactcatggcctaatattagaaaaaaaataaaataaaaagcaaaatcccacatgaattaaagctcataagacatcaaccctaagacccttctcgtttcttcaaatataaccgctaactctcacattctctcatccacctctcaccttctcaccatctctcacggtttccatctcaccaattttcacattctcctctcgccatctctaactgtcacattctcaaacttgttctcactctcatgtcatattttaatctctcttgcgttctcactacatcgacgccaaaatgacctaaaggtcgaagttaaaggcttggcgatgagaaataggcaaggactgatgtcgacgacttcaagcacaagcatgcttgaaaaggtaactctttctctgacttttaatgtttggctaaaatatttgggtttaaaaattgagatttatgacatattgttttttttttacatatatatttgggttaaaaatgacataatatttgagtacatattttgagatttataatctctaagttgtgtatatttctgatatttaaaatttgattttgttttgttactgggattgtggacactagattccaatgagatggatgatatttttgcttaagagtttaagtactcttgacaacaatttgtaatttttaattatttttttttttacattttacgtcatttaagaaccgggacaacctcattaattagcatcagttacaaactaaggcaaccttatatattagcatcaatatcaaatgaagaaaaacactttctattttttgaggtttatataacattagttatatgcattgacgttgaggctcagtagtatcggttacatcctataagaaccagtaaatttttttatgacaaattatgtccagatatgtctagagtcttaagaagtcatgtatggactttacttgtttaatttgtccatatcagcttattttagatattaatggttagttggttacaactttcagtcttttggttgttacctatttcagctaggcataaatatcatcttcttgattcagttgcgactaaccctcttatatcagagattgagatcgtattttactcttttctctctgttattctttgattcttccaggtacatgtgtgaagctccatgagtggcgattcaaaatttcaatgcaagacctgacaaaccatgcatggtgtccaatgacatggtgtccttcgggtagagagacaataatccatgtatggtttttctcaagagcctctatctcggtgtccattgcattatcccaaacagggatgccatgagcttagtgaaagaactcaggttcaaaatgactcgaaatggccagaacagcagctcgaaatgctgaagatagcttgttgtagccaataacctgagacaaagggtgagtggtaacaaaagaaactttagcaagcttagacaaattggtagaagcaagataaca

SEQ ID NO: 227982 - DNA, 2105 bp, Cannabis indica
tttaaaggaatggaaaatttaaagggtttaaggtctttgaacctaaagtgaagcaaaacacatagtcagcacgctaagcctttatatacactagaaaagttcaaagctttaagctaattatagccccccctagtggtctatttctacaacaataacttttcaaaagaagtgacttgtagaaatttttaagaattcctagaaggagagttccactcagcttccatgcataaatttattgcaagaaaaaaaaaattataaatcagtatagtcggtatatataattgacttagaactactttacaattaatgaatttcttgactagagtactacttaatttgtacatgtaagtctagtttacctattcaatcttagtcaaataaaagaccccaatctatctaattaagtagtaattaacaatttaattatttaattaattacacacgcaaatgctcgttattgtacatatttaaaaatagaataaggaataattccagtaaaatttccaaaaacatagagttgatgcagattaatttttcagtttcgaaaattaagagcaataattcctaaggtcactattttcattagtctattagtctgtagttaaatgatatatttgttcatttaaaaaaatatcacgtgttgacaaattatttgtccaaattataattttaatttaaaacaatttttttaaaaaaaaaaatgagtaaattattttaaaaattaagtttaatctttgttttttctttttctcttttccgtttttattctcagcatcgaccatttctcttctctcttttttgttttcttcattctaggcctgaaccttcatagctactatggccagaagcttcgaccacccttcgatcgagctccacttctctcaaatctgttcgagttaaactaccccaagatcaaatgccccatgctttccttcacaggccgtccttctcattgcacaaatttgaaacattttgagcaaaatagatttttatagagaagtttaaaaatgccccattctcaaagcttcaccaccattttattttctctctcttctcctacagtttccttacaacaagaacaaaaaaaaaattctcacccacaccatgctcagatttgcaattgggaccacgtcgatgtcattcgagagcctactgcagggaggtcaaagttggcatcgcttcaacgatcataagctctgcaatgttctcatttgccacctattttgtatactttttctttccctgcattccctccttttcccttctctttctttttcttttttatttttcttacctagtttctcagtagccaaacagaatttggcttcaatattttggctcaccgaagcataaaagccatatgaggctggtggaatgcactcgcgcttctatctcaagaactgggcaaggtttcctttttcctcatgaaccttttaatttgtggtttgttgactgtacttctcacttcaagtttcgatttttgaaaatgttgtttttagtatgaacttgctacagactctctgggttatatgagcttgagaatatatatcttttttagtcaatggtgaatgtctgttttgacaagcttgggtgaagaaatacgcaaatagtaaactatcaatcaatttgattcaataatatgactttatttttcttcataggcatgtgaaccgagatttgggttggtttttgtcattgatgaccagagcctaaccaccttgtgaaatcaaagaaaaccattgtcggatctgtattgcactcagtcattgacaactagagccatggttgatggtcaaactactacaaaactgggctttagatgtagtttttaaggcctttctgcatcggtttaggtaaaattcgctactactgatccaggtgacgttgtaggttccaaaacaaccgacactgaatggtaccctatggcgtcagttatttcataggaatcgacgccatagggtacatatggcgtcggttaatagtatataaccgacaccatatacccatataaccgatgctatataacttaaaacccgatgtctaatctataattaattatattttttcagttaatttaatttacttaaattatatatttattaatt

SEQ ID NO: 227983 - DNA, 2502 bp, Cannabis indica
tttagggcacaaaaacccaacagtagctccctgttgttgagtgatgccaagaaagagcatcaggtgtaagaaaaagactcaaaggaatggagaggattctttcaacatcagcttgactaaataattcattaagcagttgaaggttccattgtctttggtcagtgatcaaatcagccaccttaaggttttgattttatcctctatacaataaaggcttgaaaatagtgtgtccagggatccaaggatcactaccacatcttacatctaaaccagatcaaatcctccatcgcaagcctttcttcaacagctctttacccccaaacaatagatctccaagttaatgaaggagagttacccacaccaacatcaagaaaatgattaatatcgattagtgagcaccctgctgagaagagaatcaagacattcaagaagtctccatgcttgtttagctaagagagcttggttaaagtaaatgaagttacgaaaacccattccaccttgaaccttagttttacatagaaaattccaatttttccaatgtatggattgaccagatgcagatgatccccaccaaaaatgagctataagttgctcaatttgattgcataacttggctggtaattgaaagcaactcatggcgtacgtagggattgcttgtacaacagcttttaataatacctctttgccactaatagaaaaaagttgttccctccaagagtttaagagtttccaaatcttatccgtaatgccactaaatagttgtgttttgtcacgtccagcaaacaaaggtaagcccaagtattatgcatgacaaggttggatcggcataccaagtagttgctgaaagaaatttttgtcagtagcccttgtatttggagaaaaagagagaacacatttctcagcattgataacttgtccagaagcttgactgtataattcaatgcatcgccgaactgctcttaccgacgatctatttgcatgaaaaaataacacattatcattcgcaaagagtaagtgagtgacggcgggagctgatctagacactttaagtccttttaaggcaccattcctttcttcatattacaacaatcgagagaaaccttcaaagcaaataagaaaaaggaatggggatagaggatccctttgcctaatacctctttgaggttcaacaacaccatgtacaacaccatttgtaataaaggagtatgaaaccgaggtgatgcaacgaagaatcagctgaaccaaagtgataccaaaccccatttttagcataacatgttctataaaatgccactccacacgatcgaatgcctcactcatgtctaatttcatcgctgcatagcccttggctcgtcttttcctatttttgagagaatgcagaacttcaaatgccactagaatattgtctgtgatcaacctctaagaaagaaaggcactttggaattctgaaatcaccattggaagatatggttggatgcgaagcacaattgtcttggagactattttgtatagcacattgcagaggcttataggtctatactgagtaagttgaaccggtttcttgactttggggataatagtgattaatgttttattcagcaaaaaagaatcacaaccattgtttagcacatcaagcactgctgtagtaactaatggacccacgatattccaatagtttgagtaaaacatcacagacataccatctacaccagggctgctatcacttgacaaggattttaatgcttgaaagacttcatctgcagtataaggtagcgacatagttgatcttgtagcctcagaaatggtagtgggaatagtgtccagtactgaatttaaagcatgttgatcaactccttgtgtggtaaagatagcagaaaagtaattcttaattaaaccatagatatcttgactgctggtgtgagttactcccgctgcatcacgtagctctgtcattcggttgttagcctttctagctgacactcgctgatggaaaaattttgtattggagtcacacgatttcatccaagagattcttgatctttgatgccaataatcctcctcttgggcaaggagatcatcaagaattgcctcagattttttaagtgctgaaaagtgagatgggtcggttctagaagagttctgcaaggccgtgacatcaagaatgcgatttttatattttgaaatacatgactgacatcgtcgcacgtgcaaactccaaccgctatatacatgaccaaaaggctgtaaattttaattattagttatagtatttattataataacaaatattaatatatatatatatataaactaatatattttttacttttttatacagtttggagaaaagcaagcatacaattcgaaaactaaattattaccattatagcgacagtggatagaacgattgatggcggtgattcacgaaggcttagacagatgatgttgaaaggcctaagaatttttcatccctagcttatttttttaggttaacttgtaatt

SEQ ID NO: 227984 - DNA, 2364 bp, Cannabis indica
ctcattcatgaaaattcaggtggctgggacagaagagggagtgaaggagcctcaagcaacattctcggcttgctttggtgccgctttcataatgatgcaccctaccaagtatgcagccatgctagctgagaagatgcagaaacatggcgcgacgggatggctcgtcaacactggctggtctggtggaaggtatagatgacatgacgatcatgtacttggttgtgacacataccacatttcagtaattgcatatagtttactctattgtgactctttgaaccctgcagatatggttctggaaagagaattaagcttccttacacaaggaaaatcattgatgccattcactctggtagcctcttgaatgcaaattacaagaaaaccaaagtgtttggacttgaaattcccactgaagtggaaggagtcccttctgaaatcctggaccctgtgaacactgttagttgacttttctatcttcctttctttgacctttcttatgttagaagttttattgggtcattttaactcttttcttttttccagtgggcagataagaaagcttatgatgagactttgttgaagctgggaggacttttcaagaagaactttgagacattcacaacctataagattgggaaggataacaatctcactgaagagatccttgctgctggtccaaatttttaaagctggcaaaagaagaaattactagtgtcttggaattgggggcaaaaataaaagatcttagtataattattatattatatatgtaatcaaaatgtggtctgagcaccccaaaaaagaagaggtgtggggagaaaaagttgggttatgtgatatgtgtcaaatggttattgtaataagttgatttatattagtaaaaaatgtaggtgatgaacaatcgagtcagtcgcgccttgcatcagttcatattatataccttgtatttcagtggaaaagcatctttgctcaaaaagctttggcctattttcttcttcttctttgtcttttatttttacattcttttttattattgcattaaaaaagtccattataatatatacctagcacttgaacgttaactgtttagtatttatggaagattaatttttttttggctttcaagtattcttccgtttagatttttctttttggcatacagaagatggtttcaaatactcatgttatgttatgccatgttatgttttatgttttgttgttgttggtgattattggatagtattgtcctaggattaataagataaaaatattataagattatatactatttttgaaaattaatctcatgtttattgacatggtattagagccatgtctagaggaagggaaggaaagtttatttcttccgtctaagatttatatgtttatttttcttatcttatttatattttagtgatgtaaatattattttaatgtatttttcaagccaaacttgtattgtagctgtggtgctagactggttgtttgggattggacttccacttaattctattgagtcaagttgtttagtttgatctctgatttttatagaagatattcgttttgtaataatttaggcttgttagaagatagtactagtttaccttccaatttttttttgaagcgtctttaatttatatttgtagtctgactatcatagctactcatgaattagttgtgcatgcgacacacaactctttccataaaattaagtggatcagttcagagcctaaacaaatgacttggcaactcactttacttaggcaatcatttttctttcgctaactgttttgaacatacttcacttaggtattaatttcttttgttggagttatatagtgaaacttctatgtagccttaagcaataaaactaaacttatatttaacaataattttgagaataaacatataatattctaattatacttataagtgaatgtttgaagataagagattattccaatgtaagttgagaaaaatttaatatatttttttatgtattttaaattttattttatttcattatattcttatttttattcctgtatttttattctacgcaaccaaccgttacaattactaaggaaaacaagaataatattgtatctaatctagctatgactattgatagattacaggtaataaattggttgatagaattagttaggatatttacagttaaattagttagttaatgactgattgatacacttgtacaattctgttacaaagttcttgttacaactcgttgacttttgtaagcttttgtctaaaaataaagcttagtttaatgacttgatcaaaatttttacaaacctttgagatacattgtcaattttgtgtctaaatagagttatattatgg

SEQ ID NO: 227985 - DNA, 2681 bp, Cannabis indica
tattctcctcagaagtctttcatgtgctaatggaggagatcaaaccaacttcacctcatacacttcttcctgctgaacttgatttgaataaccaaaacaaaaattaaagactaaaaggtgattttatctttgggaattcagcttagaacacataactaaaacttaaggtagttatgtgagaacaccattagatttcaccccaccaagtccattcacccaattccttataaagggatctttcagtagtcctaatgagtcaacaatctctgagaatggccatagcagcttcatagcacaatgagctccccgcgatccaacttggatgaaagatttcagaagcgccattgaaactgcgtcttgtaaaagatttcatattacagatgagaaaagtaacaaagtaacaagtaaaaaaactaagccagagttccaacaccttgaagaactgtgtgttggctttggccaaagccaacacatgagaagaatttagccaacacctcaaatttaatgatacaataatctgcattaacatagtaatatcattgtatacaaaactcattactatcaaaatggaatgaaaaagtacttatatgtataatgtactcttaccttaatcatcactagagaagtagacaagatgggatatgcttaactttgtcgaaatcctcacctccttcatttaacctctctttgaatatttcagacataccttcaatcttgatttccttaagtgtagtaatgtatcttaatccatctggaacactgtcgaaccccgagcttttaatcccaaaaaagcaaagactagacaaggccccttcctccatcttcaactctcttaagtaacatagagaatcaatgtgaagagattccaactgagggaaacctccatttgagcacaccatcacattccccttgaagctataagctcgaaaacaaaggactcttaaatttggtagcttttcaagggttggcattggatcatccttaagacgagtgtctctcaaatctaacttgattaggttcggagagaattggctgtcttcaggaaattttatcactgaagaccacaatttgagcttataaatttgagggcagcttaataacataggaacaatatcaatactatcacatgattgagaaaatacttgtaaattccaaagacggttgaatgtgatgattggaggatcttgaaaaattctcccaaagtttttgtccacataaatatgtaacttctttagattcttcaattgcagaaaatctttcctaacaaggtatttggtttgaacacatgccaatgtttgtaaatccttaggtaacctcaaccatttactagagaatgatggtatgtataaatgccttaattgttccaacttccatattacattaggcattttcctttccaaaatcccacattttaactttaatgtctgcaagcatcttaaattaccaatagaagacgggatctttctcacatcggcctcaatacttaacatccttaagtgaataagctttccaatttcttttggtaatgttcgcctgcatgcatccatacgtagctttaaaactctaagcatgtgaaagcgattaaacacttgtttgaatacttttttgttataagtatatcctcaatttgtgttgtttgcataacgaagatgatcacgaagtcgactatcattggaatagatggaaactcttcgtacatcagttgctataggttgtagtggctcctcccatttattcctcatgtcaataaattgtaaaaagctctccttttcagctctagacaagcacaagtctcgcattagatcatgtatttgaaatgttttcattcttcctcttaaactccaattttctacttgaatcatgcttctatgaactaactcacttaaccaatcatatgccacatcctccatagaatatgttgtacttcctctagttgatgatatgaaaccttccgcgattagcataagacataattcatttacttgtatcttcgagtcttcaggtacagagacaagtatagaaaacaaggcttcaaataagttggtaactcatcgtaactcaaacctaaaacccatgaaacaccttgatattctgagtcatgctctctgcctttagttatgtatgtcactatatttcctgtcatctcctcccactcattaactgtgtgtttcatagatagaaccccgcttagcacgatgatggctaatggcaaacccgagcagtatctaagcatctctcgccccagtacttcttttctttctttatctctggagtctgataacatatgcacaaaacattaaactcatatatattactaaaactaaataatattctttattgaagaaaatgtaaaaaaatgagagtgaagtgtattacttgttggatcatttccaaaacatgaagatttgtttcgaaagagctcccaactttcatccccattgagacaatgaggttcatgaataacaccattttgatcagcatgaagagctacattcttatttcgagttgtgattaaaatcttgctgtcgttttcgtcttgaggaaatgcagcttttagacaatcccaagttagagtgtcccaaatgtcatcaaggagcaccaaacattttctctgtttctgaagattgtaaagctctttagctatttcactattgcccatgcttttgatttctgatcgtttg

SEQ ID NO: 227986 - DNA, 969 bp, Cannabis indica
ttgttgttattgttagcttcaaagcatgaaacagatggtcgggttattttagctgaatttgagacattccgcgtcttaaatacatatgcaccaaataatggctggaaggaggaggaaaactcatttataaggagaagaaaatgggataaaaggatactggagtttgtttcacagtcttcagataaggctcttatatggtgtggtgatctaaatgttaggtcagtgtttttttctctgttcatgactcaatagaaacaaatatatatgtatatatacacacatatgcgtgcagatacttatatatgatttaagctctagtagatggcatgatgaatctcttgaactgattggttttgatagtactcacattttgcacaaggggatctagtcaagaaaaaataaaggaatgcagactgcagtgtgactgatttcagaaaggtctaaaaagaaaaaacaaacttgacttgaaagtaacaaaatcatttgtattgtagctcaaatgaaatttgttgtttctctcttattccagtgagccaatgtttatgacgaatgacatgcgtctgaaaaaaatagtttctgtaatttgatctatgatacagtttagatttatacttttgttgattgtcttgtcattttgaataattgaaattgtatgcagccatgaagagattgatgttagccatccagaatttttcagcacagctaagcaaaataattatgtacctccaaataaagaggtgacttatctgatgttgaagtttcttagaacaagtactttttttttgttgtatggagtataaaagtattttagttgcagaatacttagtagatgattaggctctacatcacaagcatagggcatttgtattaccatgcatattacagatacgtttgttattacttttcatgttagaacaaagaggttcattgtgaatttttaaaaataagctactgaaacaaataagaacc

SEQ ID NO: 227987 - DNA, 2918 bp, Cannabis indica
aacaatatcatcttcttcataggtgttgaagaacttggctaacttctcagaaatggattctcgaccaattctactcaaatattcttcatttccctcataatcatcatcatcttcataagcaaaacaaatcccccacttttttagcttaactcctttcatgaatggtcgatctctaacagttacatgaatcttaaagccagttttcaattgtgtaaccaacgaattatcttttgaaaaacgacacaagtgaaattgatcttcactccttttcggtactcctcccaagatcaaagttgtggtgaatatgggcaagtcttgcttgaggattcttgcttgtatgtcaactattccaggaagctggtgaatcatgtcatcttgattttcaaggttgagagaaacaactacgcctatagttacacttttgattggtcggtttttgcgctctgagaatgtaaccacatcttgacaaaaccaatttgggatcttgcttccaggcatgctaagactccttatattcctcaaccaaccctacatcaaacaatgaataatgagttacatatatggaaggtttaatataggaaactatgaaatgagagaaagagagagaggaccttagcaagtcttttcttagctactgaggaacaactatggcaacaagtcatgtgcaaccttcttatagacttaagtcgttcaaggccaggaatatcctctactttgtcacaatttgtaagattcagttcctctaagctttccaaattcgagatatctgaaactttttccaaggaaatacactgtgcacaattcaccaaattcaaacttgaaggaagtggagggagggacctaagttcatagcaatgagacaaatgaagctccttgagatatgaaaggccttttaagctagaaggaaggctggagaaattattgtggccaagatctaaaatctgtaatgatgctaacttctcaaaatcatcaggaattttgcccgaaatattcctattacgagcgtccaatacacttaatgaggacaaatttgagaaggaaggtggaaagaaatgtgcctcttgtgaactgcaaatcattgatgtctctggttcattatccttacgtagtccaacaacttgaggcttcttcgaaatgtgtaattctattaaacttgagagcatcccaaagctatcaggcaattcagtcactccagtatccttcattagtaaacggtacaaggatttcaaattcccaattgaagctggaagcttgaggagctccctacaatcggtaagtcgtatcattgtaaggttgtccaacttacctattgactctggtagttccttgattttagcatcaactatagtcaaagtagtaagagacatcatgttgcctaaggattctggtagtgatctaagagatctacatttcctcaagattaacttctttagtgatttcatggcttcaatttgatcaggaagttctttgattgatgtctcttgtatttcaagctcaacaagagaatttagtcttcctattgaattaggtaatgtacttaagaattggcctttccccaatgataaccgcttcaaatttggtaatgtaccaatacaaataggaagttctttgattggacttgcataaattagaagctctcttagcatcttgagtttgccaatagaatcagaaagtacggacaacgaattagacatgacacttagaatctcaaggttttctaaagatccaatggaatctggcaattcatctatcccagatgaatagagggataaatctctcaaagaacgtaaacatcctatgcactgaggtaatctttttagattcctgcaatgattcaagttgagcttttcaagttgagttaggccgaagatagattctggtagtctttctattgcagtattatcaactagaagttccttcaatgatttcaagctatttaagtctttaggcaattcttttagttttgagcaaccagagaggataagattttgaagctgcttcaagcccgagacatcggttgggagattaataagtcttgtacaacctttcaggtttaggtgaatcaatgtgctcatgttcccaatatattcatcaatcttagtcaagctaacacaccgttcaagaataagtttttccaacttcttattcttggataaattgggaatcgcaaccaagctatagcaaccacttaggttcaatatccttacattgtcagcccaagcctgatagatagaaaagtattaaggataatctatggcattagaaaattaaagggtgaaaataaagatgagataactatagcaaaaacatgtaaagggagctgcatacgtttttggagtaccatgcccaaactgttttgattttgctatctgaaaggtcaagaatggaaagtcccagcgcacaaaatccaaatggaagatttttcaaaggacactctttccactgtagccatttcaaactcacagggaatttaagctctccctcaaggttaacataatttgtttggagtagtctaagattgaccattgtttcaaaggatttagtaagaattttgacttctcccttcctttcaacttgatcttcttggtagtctttatatgtttcttttaagtaagtaaatgcattcaaaaaagaggggttacttcggaagtttctccacgatattattccaccagaaacatccttcactgtgctcttcctctcgaagtctaagacaattccttgtgtatgttttcttcgctgttattaaacatgcaaaagtaatgcattagaattttggacgtgaaactacataggtgtttgtgtgtcaaaccataaaattcaatatttagttctacaaatttcaatttagaaactgctaattacaacactgtgtaagataatatttatcgcaagtgtaccttatcatcaagtaaaac

SEQ ID NO: 227988 - DNA, 1871 bp, Cannabis indica
acttgactgcgtatacttgcgtagtgtttataatttcgtaacaatgggatatatctaataattacccaactactctttatctttatccttaaacgattatgctgactaagaatgttatttctcgctgaagtgagttatctttttcactgtgtttataggaaaagatgctaagtatagatttacttctccttagcaatgttcttcatattgtaatgatactagcgaggtgactacttcgtcgtgtagaaagcgagatggatgaatgtagttatttcctccatacacaaatatgtgggtcaaggagctgcaagctccttgatgtctcatcttgtacgctcttattatatactccgtttatcccaagatagacgtattgtctcatcaattacatatgctaatagttattattcttatctcgcatatgtttatgtggtcaacgagtttgagtatttctatcaactttaattaattgaaatgagttatttagactgcatttaataatgcaatttaattattatattctttgagctaattcatattccttttatagtacacgtgtcaacttctggtgaatagctaaagtttgagtataacatatatatatcaccatcaaacaataataaagtgcatatggtaaaccacttaaaaatgggagaagcttgaacagttaccaatactgacacacaacgacagttcaaccgagattgacaccgtcggagaaaaggcaagagaaaatctggagtgccaggaattttgctggtttgaagtttcaagaatcgtgaaattgaaaatctaaaaaaggaagagatgaaagatatttatagacccacaggggtgacttgagtcgtcgctcatccaagggtctcacttcaaatttggataaaaccccatgatccagtggctagggaaaaattgtcagaggcatgagtgtaataggcgattacactactcaagccccaatttgacaccttgcaattaatgggagcatcaaaatcaaaggaaaaattgaatcggcttaactaaaattgaggaaaatgttgaaaagcattaacaagattgtcacacgtgttgtctatagatgagtgatgtcagcacttcgggagataagttgcaatccccatttcacaaaattgtgaattgagacttgggggtaaatgttgtctatgatttttctctaaatacgtggcacttcaagaataagccaggtggcaatgggagcctcagtacgggatgtgttgtattaaatcaccttcggagcttaataattgcaagagcttcaggagattagtcacctctggaaggatccaccaggaggatgatagttttgtcttttcctctccgtgagcaaaactcaacccagagaggagatagagggatgtacgagtcttggcgagttgcttgaggctaaattactatacacacatttaatgcagcatagggaggaacttcctaccccttactctaaaaaaacttgctcaaggatttaaactcataatttcctaattttacgatgccccatacatcatttatgcattatttgatggctacattatgagctatcaagtcatcggtaaaagacaagtctagtcttaccaaacacctacattaaacccaggtacatcatgaagaataggcgatcatgccctataatcaagtctgaaaaattgtacaaagcatggttcatagaaacacgacaatggtggcctttttaccaccattatgaacctatgaataccccaacaatgtatagaagggagacttttttttttttggattcacagtaaaagaaaatactcagaaataaggtggcgtttggttggaaggaatgtaaacataagaataatattgagaataggaataagaatagaaat

SEQ ID NO: 227989 - DNA, 2139 bp, Cannabis indica
cttcaggttcaggatgcttgaccacatccgataaacctgaagaagttgttgcaacactcgaatatgaaagccttgatccttgggataggctagattggtccttttgcagtgaactagtttctgtcggacacaaacatggctcttcagctggaggcggtgagtttggcctgaataaaggaaaccttctttttttaataggaatacctgcaagatagtcaacagactgccgaataacgggtttaaccccactctgcaatgcaagattaattcatcaatatcccggagctaaaataacaataatacttcacactaatttttagtagtaactttgaatctaagactaaataaacacctcttcatttgctgaaaccggcatgattccaaacataaaccaagcttattatccccgtcaaatcttttgaagactaaatagtaaaaaaacaaattagcatgtccttgtgcgcattctgatacttctgctttcaaattctgcactacactaaattagcatcaagcccttttcttcttttccgtaacaaatgacgtctgctatgaatttttttaatgaaatgaattcctccaatctcctagatacgaaattaaaccagtgatcgacacctgctgacaaaacaaattgatgatcctgaaccgaaaccatccaatcacaacccataattattcttttaccctcaccctcctaaggaaaagaaaaaaccagaagattctgaaaagattcctgactctagcaaaaccacccactgaaagaacacaaaagaatacatgtatcatcaaacaacgcaacaaaattttaatatatatatatatatagcaatccagagaaaaaacaacatgagtgttctgtcacccattctttttttttttttaagaaaaaaaacatacacatacaacgatcgagatgaaaggacttcagatccagaaatttaaagcttagaaaatacgaataacaaataaaatcggatgaatttttccaggaatttgtatgaaataccttatataaacagaagaccgccgacgtttcaaaaatgaaatatgaaatctagcaataaaaaaaaaaaagaagaattagattaggttttcggtaaatgccaagctctgcaacttcaaggaaaacgatgaagaaaaagcagcttggggcaatggcggtagggttttgtttcttttctgcgaaatggtttctatcaccatggcgcactacatatatttatatatttatggtaattaattaagtatttaaatcaaagtggacatttcctttgacgataattgcggaggaatgcgatgccacgtcaaaaataagtgccacgtggcattatcagtgaattgttttcccaaaattgtccctattctaactaatctcatcttcgggaatctcgacgtgacgtgtttgaaacttcgaaccaatttccttctgccgacaaacgtggtgggacctaattaggttttccacaaagaaaagctaacaaagatagaaaataaaaaattgagggtaggtaatagtattatatatcaactaataaaaatagccaaattttatttaaaatttgtaaagatattttattttaataattttattttatataaaatttatatactaaatcttttttaacttcttcttctaatttatatttttaaaaaatatatttattaaataaaaataaattatattttaaatatgaaaataataaaaataaaatattatatgaattttttttaaaaaaaataaaaaatatttatacacaagttaaaaaaaaattataaaaataaaatcaaataagtattgaaattaacataaaataatatgagggaaaaattttaaaaaaatattaagagtaatttttaaaaattattttaagtttatattttttaaataatttgatatatttatttatagggtgcaaaaagaactcccctaaaaataaaacttttaggagtgtttagaatgggttaatgctaacaagggaatggtaaagtgaaacattaaccttgtttgttttgagtgtttaaccttaaaatgttattcccttagggggcgtttggtataaggtattcaaaataatttgattatagagaatattatgaaggagaatatgattatagggtaaatagtgtaaaatagtg

SEQ ID NO: 227990 - DNA, 1074 bp, Cannabis indica
ctctcatcacagacaatcaggaatggaacatagatctactacatcagttttttatgtcgattgatgttgataaaattctaacaattccattgagtttttttgctggcaatgatagactaatatggcatcactcctcaaatggtatttataatgtgaaatcaggattccacttggccacttccttggaagatcaacttgtttcttccagttcagatgctaaccgtgactggtgcaagtatttttggagtcttaaattgccacctaaaatacgtctcttcgcttggaaagtcctccaaaacattcttctcactgctactgcactttttaaaaagaaaatcatagatgcagctgcttgttctcttcgcacattgaattgggagtccataggacatgcgctttttgggtgtcaacatgctaaggcagtctggaaagagtctaagtttgtgattgattttcacaaagctcaatcaatgtataagggtgactatctgctatatcttgcaggggtgtataatcaagaggatttgagctttttatatgccttttatggggtatttggacaaacaggaacaaagtttttcatggtgggacatcatgacatagcacctctatcatttcctataccacaaggttctataatgacttcagctgagccaacacagctcccaaaccagtacctgttgcagactcgacaaatctccaacagtcaacaatgaattctggttagcaacatcaagttccatggtctcctcctacactaaatggcttcaaacttaatgttgatgcagctacaaatatagagcagaaaaaattaggcattggagctataattcgagaccatgaaagcatggttgtggctgctttttcaaaggtggttcaaggcagttttcgatcggatgagatggaagcaaaatcactttttcatgctctcaattgggcatctcaattacaacaatctataactcatattgaaacagatgcattgagagtttccactgctttgaattctgctacaagtgacttatctagtttttcagacattatttttgatgttcgttgtcttttatccttttt

SEQ ID NO: 227991 - DNA, 3135 bp, Cannabis indica
acagataacaaaaatacaacaacaaattaacaagagtacaacataaaaaccatatttttactaaataaaattaaaaaaatcgtaaaaatattaaaatttcgtgtaaactattatttttgttaattttttttttgttagtttttgtattatatatatatatatatatatgtttatttatatatatacctcatggttgggaagcttgaaaatgttatgctcgaagtatgcacgtacagctgaaattcttgaatatcttatcttcatcacaaacttgtctccactctatacccaattaattaagcacaaaataattattaattaattaatgatttttcaatgctacctacttttgaattttaattttattcttttatgaaaataaataagtataattaagagataatattatataaaatgagaaaaatgcatactcttaaaggtgaaaggaatttgattgacaattctgagattgctaatgcattcccacttcgaacaatgctatcacaacttacaccaattctttccatcacctcataacaacctaatttattataagaatttttaattaattaatggggatttataatttataattgtacaaaaaaatatcgaccaattaatgtataaaagattcttgcaaaaactaaaaaaaaagattatagtattttcatttttatagtttttttggtaagaataaaaataatataaagtaaccggttaccggttaccggttaccgcaatgagataattgattactctaaaaaaataactagttaccctaagtatttttcacatatctttttttctattgaagtatttctacaaaatatatatcttttctaagaaaaaatatattgtttttgagtagatcaaaactcatatttcacttaatataagggtgaatgcatatgttgcgaaaaatgaattcttttatttaaataaatccaattagcaatttagaccaaaaactttaattttttttttgacaaaatgatctgaattgcactaactttaacgtatttctaccctaagcaatcactaacatgtttgtcttctttcgaataattgtttttactatatttggtatatggataatcataaaaatctaagatatggtatttataattgaaaattacttagacctactcttttttctgaataaaatctaaaatttagcatttctaaaaatataatggacattttttaagaaattttcgcaatggaaatgatcattcgaaagattctatattttgtaaaatgaaaaccctagccaaatttcattcaaacttttttagggttaagatcgtatcaaaaattgggtcacaaccattgtgtagaagagaatattttagagtcatggaagaatcgaaaagtttgtccaaaattaaactcaccacaaagactaacaaagactaacaagtaatcttactaaaaaaaaaaacacagaattcaaaatagtatcattcatccatatatataactataatcaaaaaaattaacttatatatatatatacaaatataattttacttaccatgttggcaataacttgcataaacggcattgttgacaacaccatattgatcaagctcataatcacgaactttgagctcaatttcaatgtactcactcatcattattgatcttctattatggctactactaactctcatcatcatattatcatttctactactactcaatttcatattattattattattattattggttgacaataatattgatcggagatgaagatcatgatgagtagctgggaaagacactgatgatgaagacgaacggtgaggatggagacacgtggcaacgtttactacagctgatgaaatcattgtgtgcaacatgtttcaatcaattatatgttttaatttgcagctttgtctcgcccaagctagcatggtatatatatatatatatataaatatatataaatatatatctgtgtcatattaaatgtcatcttatcattcttttgattatatctatgtaagacataatgtgtatttataagtggtgtacgtttctctatatatatatttttgacaaatcatggtggagatatattgtattgtataatattttattggattttgttgtattatgctagtattaatataattgtattaagatgtgtgacagaattaattttgtaagtaattaggtatgtatatacaaggtatcataattcataagcatatgtatgagttcgttgtacctaattttttaaataataatatagttttatatgtgtaaaataagagaaacaaatcatgaagatatcttatttgcccatgtctcattattacttgaaattttcaaagctataataacaataatataaatatatataattgggtaataaatgtaaattatgatgataagaagtagatttacataaatacatagatcaattactaatattggtataggactccaataattggttaagaatactctaatacatttttttcataggagaacacaatcaataaataagaaataggaaattagtaaataatcttattaaaagtgaattgttaagagatttggtacgagcacttcaaaataatatattaatatgattaattgtaatattaattaaagcggagaatataattttgttgttcaagacaacaaattaagttttaatttctcaacttaaaaatgtgtatttacattttgttaaacgattcacgaacaaagtagttcatgttcttgcacgagcttctattatttatgttgatggtgtctatataatgggaggactgcttccactattgcatccttgatttcggatgacttggtttaatgaagttacactttcattaaaaaaaaaatgattatgaatactagctaattagatttttccataagaaattaataacacaatcaaataagaaataaaaacctaataattaatcttattaaaagtgaattaaggcagctacttttagtaataattttttagtcatcacgacataaattttttgtgactaaatctgattttcaatcacaagaaaaaattacttgtaactagaacatggtatttagatacaagttgtcactaacataattttagtcaaaacaaattgtaatttttatgactaatacctt

SEQ ID NO: 227992 - DNA, 2314 bp, Cannabis indica
ttttcttgacagattacaagcttttaccaactttttccaacaatggtgtctctgttgatctctacttcagtcacaaccagcttcagaatctaatcaatgtctcttggctaaaaacccatgtagtatctcttctccctaatgtaaacattaaaagcattgtagcaattacaagaagacaaaatgaactttctacagttctgtctgatctcaaattggtacactcaatccttaaaagcttcaatcttgacaatagagttaaggtctctgctgcattccctttctcattcttcaagaatctgagtaatgaacaagaaaaagagctgagtagaatcatcagttacataaaggaaaagaggtcttatatcattgttgaagcaaccatggatgaagaagagttgtttattgaatcattaattcaaaaggctaactctgttacttcttcaacttcaaatcttcttaatgatgttccaatggttttaaccataaagagcactgttcttctcagttcaaaagaagtaactgaattcagtgacaaagtctccaaatgcttattacaaaacaatactcgaattagagataatgttattgggttatatacagagttactaactaaagcagaagattttgaagtgaaagaactcagaagagaaaaagaacagatttttcatactttttcccggagacaactcctcactactccgatcaaactcgacccacaaacacctttacacgacacaatctttcccaatactccgaccatagtaactgttccttcttcaaacccagtaaccataaccccagtaagtccattagatacgcctgtaccgttccctttaaccactccggtcaatgttccggtcacatacccatcaaacactccggcacctatcacagttcccggagcacaacccgttactaatccagtcacaacctatccggcaccggcgggagcagttccaacgacgactccaccttcagcgccaacaggaaactctccggcaggatcgggtcaggcctggtgtatagcaaaaagtgggtcgtcggagacggcacttcaatcggcattggactacgcttgcggcagtggagccgattgttctcagatccagcaaagtggggcttgttataaccctaatacgcttcagaaccacgcctcgttcgccttcaatagttattatcagaagaatccggcgccgacaagctgcgattttggaggcactgcaacattagttaacgcaaacccaagtgagatttaatttcatatgatcgatttgtagttttttcaaatttgtagagttcgaaatctgatctgggttttttcaggtactggctcgtgtgtctacccaacatcttcttcatcatcatcgtcatcatcttcaacaccagcttcaccgtcccctgtaactccggcaactccaactcaaacgccaccaaccctaactccctcttctccaatgcaaggaactacaaccccatcaactccaacaactccaacggtgacgaatccagcggctggaacaccatcgccatcatggggagtcgcacctgggtaagtacaaaaactaaagtagagacctttttctaaagtgtcatcttttttgggtcaatgagaattaacccttttcattttctttagctctggttctactccgccgacagtgttgaatagcagcaccggaactaccccagatttcgggttggatagcccacctgggttcaacacttctacatccaaagctggtgatttgagaagaccctttattgggttcatatttctattactaggaacattgttatggtaatatagaaaacaaatgataaagcttctccttattcaatcaacggtcaggatctcatcaaagaaaatcaagagctttttgtatagatcaagatcatatcattgtgttgcagaaacctgtacgagctttgatggaagatatatatagatggtcaatgatcagtggtcatcaccaccaccattgaaacaacatccaaattcccaaatatgttttgaggtgattctcatgattttctgtatataaatatttattatgttagaagtttgtggagagtattgtagttctaattgaatattcaaaattgctttagaagtttattagttacaagtttttcatgaacagtcagtagtgaagctaaattttaactctttttgatgagaccagcaagtttaaaatcgatgttgatttcagtgaaagatctaattttggctgatttgaaatgttggagaaaaaggggaacatctattgtggacaatgtcccacatggaataaatggtagagaattgagccatata

SEQ ID NO: 227993 - DNA, 2197 bp, Cannabis indica
tttgttttttttttgctattttagttttggatttattagttttgatttgaagtaaatgaaaagaaaaacgtgaacccttttgtctattttgtctgaatttaagtaaagttgtttgcttttttttttttcttaattattttttaattaattgttgtttgaaattatgtgtcagaaaatccgatctcatgggataattaagcaaaaattgtttaagtgtaaacaaaagatgatgaactgtttgagtttggagcgagatgatcaattttatgatgcttatgaggacctttcttctgtttcggattgggattcggatagtgtagcagaggattgtagttctagtatttcgagtagattaaggtatgaagtttgggctgagaaattaggtggtgatgtctttgaacgccgtaggaagttcttgaaatggatgagtatgggtttggatgaggatttgacattaatggaagatgaaaagaatgttcttaatgatgaaattgaagtagaaatggataggataaccgaaaatagtggagcggttttgagaaattcgggtttcgaagaagaaggggtttcgtcgagtgagtctagtatgtattcttcgtcgaatgaaaatggtggttctgataatggtcatgagttttgtcaaggggaacttgataagaatagaatgcttggtagattttgcgtggctaattccgatcaacttgttagttctaaggcgtttcgggggaatcagagaccttcgcctttggttcaggttcaggttcaggttcaacctttgaggcagagagaggttgaggatgctagatacttttttcatgttaagaagacgattaagagaggttggttaagaaaattcggtgttggaatgtgtgttgttgataaaaatggactcggggttttgaatccccgtcctattggaacaacaacaactacaatggaaatggggttgcaaaaggtacaagttcagctgtatagaaagcgaagcaaggaactttcttcgctgtttgctggacaagagtttcaagctcatgaaggttcgattttgacaatgaagttcagtcttgatggacattatttggcaagtgcgggtgaagatggtattgtgcgagtgtggaaggttagcgaagatgagagatcgaacaaatttgacattgttggcgattgttcttcttcacaatgtttcactattgataatgttttaaagttatgtcctttggatgttgttgatagtgggaaacatagtaaagtaaacgaattgagaaaatcgtccgattctgcttgtgccattttccctccgaaaatattcaatttattggacaagcctctacatgaatttcgaggacatagtggtgacatcttggatctttcgtggtcgaataaaggggttagtatcttgttctcagctcggttttatgtgaaaattgttttcatttcgatactgatgtgattttaatctgttttgccctgcagtttctgctatcatcgtctactgataagaccgttcgattatggcaattgggatatgaaacatgtcttagagtcttttgtcataataatttcggtgagctttttgctgccttagagatttcggttgttcaatattgcttcggtttctcgttgattatttattaaatttaaacctactgtttttgatgcagtcacttgtgttgatttcaacccgatagatgataactatttcatcagtggttcgatagatgggaaagttcgaatatgggaagttcgtcgctgtagggttgttgattacattgatattcgagaaatagtcactgcagtgtcttattcacccgatggaaaggtcggtttctagtaaatagtaacaatttaagctgcaattttcacggattttgatcatctaacattgtcaccgaaatttttgcagggtggaattgttggctccatgtctggaacctgtcttttctacaatatcataggtatgaatatacagtcccaaactcgaaatctgtaaatattagaaattttgtgtagttgcatacggtttgtgaaaacatatcgttagtaattaattacacccgattttgatagggttatgagtattggagagtgtaattacacggtcagataaacatactaaattgtgtaattctgaatatcataggacatgacatgactatgatgtttcttcccttgtttatgatcaaattaactttatttgtag

SEQ ID NO: 227994 - DNA, 2678 bp, Cannabis indica
aggtaaataataactaattactgattaattaataatactgcacctacataaaattactcaagtagatccatgaaaagacaaatatatataaatatatatatatattttgggttattatattttatattttaggtagtttttttttattatttttaaccaaaaaaatcctaataattaatagaacaatttaaattgtaatacaaatttgtatataataattaataaaacaacttaaatccacataaaaatttataaaattattaaaataactctaactgtaaaagtaaataagaaaattatttcatattacttttttttttattttattttttcaaatttaatgtgtgggtttttaaagtgttttctcctgtagtttctatgtaagttactatacgatttttggttgcgatttagattgttcagtttgttaaagtaagggtttctacgtaaaatttcgtaaaaaaaatataagaaaaaaaactattttaaagtgtaaaaataaaattcctaaaaaatattataaaaggcaattccttatttttttaacaaacaaaaagaaacaataattattaatacacaagtaggaggacaattacgtgcataaagtgatcgtaaacgaactttcgtagctcttttcttcttttgttctattataataatagcatgtccattctctccatccttatccactctatatcaatttgatttatgtatacagacaaggctattatgctatggcgatcgataatcatgtttttttctgaatcgatcggtaatcatgtttattattaattactatactttactttttatctcttaattaagtgaagtaattcattatctgacagttaatttctataattgtttgatgacaactagataattttgtttttagaattttttacgtaagtatatatcttaaaatttagttgaaagaaataaaaacataacaacagtaataagaacggaaataggaatcggaattatttagaatcaaatttaaaatgcatttacaaaattaataaaaaaaattaaaaaatttcttatcttgcattagaatgatcattattctttccatttcaaaatataatagtcatttcatcaaatataaaaaagtcatttcattaaaatgatatttgaatactttaaaatgcaactacaaaaacaaaagaatggaataaatattattacctttcatttccattctatttcactacctacaaccaaacgacaccaccatgatctcacatcaaattaaattaataactttttaggtaaaaaataatttttttaataaaaaaatttcaaaaaaaaaatacatgtggtcattgtctatattgagcaacatttcacataaaattgatcttgaaaattgaacaatagtacatatatggcaagaccactctcccatgagcacccccattggagatgctacgagctttccaattataatttgctttggatttctagaatttttaatttcctgctaattaatgtgtgggctacgcatgccaagtggacatcactctaaattaaggtgggttaggctcatgactagaacccaccaaatttaatgcatttagttataccaagaaaaaataaatatattcgcaataaaactatttaaattaaacgatttgtcatacttaaacccataaatagattttttgacagtaaaattagccaaaccttactttttttatgctatttggccttctattcaaaaaatttagttaagtggcacagtggacatactacagtgtacttaatgtacacgtggcaaattttagtggtccacataatattaattattaaaatattataaaaaaatatttaaaaaaaatattatattccctttttcctttttttcttttttgttttcttatttcttttcttttgtgtttcttcttctggacaaaaataccagatgttgtgataaattcaacatgcaagtatacgtatcgtttcaacaaataatactcaaataagtaagaacgttcctacgaggactgtagttaagtactaatcaattaaattcttgtttctatttagcagaatcgataataaagttgaataattaaataattaaaaagtaggaaaataacaataaagtgtaattaactatgatgaatatttaagaatatgaatctcgttagttcttagttcaatttctcaattgttaatgttaattattaagtatctcccttttgaagatgacagattatcaaatcaaccctaacttttctcagatcattaaggtcataaatcatatattatctacttgcatctctaaagtaaattaacatacaacttgtattaaattcagaatctaaaaatcacataagctatgtaaatactctcgttttacatcaaaacttatgtttttcctattagagcattcataatattcacttctcacatttcatattaggatcataaatcacatttaagatgaccagtctaaaatgtgtaattgaaataaataagaatgataactctaagatttagagttattttcatatctttaagcttgaatttaatgtgaattgtggagcaattaatgtctatattgtgtaattgtgtttagtttgttgtgtctttgtaataaatggaagtgtgtgtgttagtaagtgttagatagacttatgttattgtttttatgtgttttaagcagaaaa

SEQ ID NO: 227995 - DNA, 1479 bp, Cannabis indica
actacaataaccacaaataaaataacaaaaaataatttttatgtcaatattatcacataactgaacaaaacttttaaaaaatacacacacgtaaaataatgtataagatttgtgtagttaaactttgtaaaaagattaaaaaaaacatattttttatcattacaagataataactggctgcttttaatcctaaaaattttaatttattacacaatagaagtacctcaagttctaactaaaaatcataaaaaattatacagacactatacttagccacactataccttgcctcagttggtcaactcactcacatgaaaatatttgtttctcaatttattcttttatagcggtaaaactaaaatttagtagaaattagcgaacaagaaaatgagaaatgtatcaacaagattatgaaaaatacatttgatattactttgtatttaacacataaggtgatccaagattttaataaatactaggtatgttagattgatcaacatcatatctaaaggctattcacataaatttaaacttaaaatagaattaattcaagactattgcaattatctaagtgtcactttttatggtaaaaaactcacccttaattcacactgttaatcaactaacagtagcaagatcgatcccaaaacaaaactagtaaatttaagaaatcataaactaaaaaaagttgaacaacaactagaagatgaatttaaatgaacacatgaaaaataaacacatgaaagataacaaaacttacaaccactttattcattcatgatcatcatattacacggagagtagcttgaatctaaatgtacattttgcacgatcttgagtcccctcaattaaaagacataacgatgactttaacatccctcccaactctctcaactctaaatttctctatgcttattgtttgaaaaatagtgtacaaatgaattaaaaatcttgcacgatcagtggtgaatggctacattttatgttggatgctgaagcttgtttcgactggtttcagctccaactattttaactaacagttttgccaactaggattaggaagcaactgatgtggcagggagaaaagtgagtcaaatctaccacaaatccacctaatttgattcacttgttcactacctgatcagtattgacagagttgatcatactcttgcaatgctcaagaggttcaaacagtggataaatttgtctttagttgaactttttgtgaaaatgtcaacagggttatcatgagtacaaattttccttacctaaacctgtttttccatcactacatctttgatgaaatgtagcttgatgtcaatgtgttttgacctctcataaaacattagattcttcatgagatgtaaagcaccttggttgtcacaatggacagtaatgtcgtctgagttgaatcccaattcatttcattttaaccagatagccttcttaatgttacgaaaattctgtttattacgcaag

SEQ ID NO: 227996 - DNA, 1634 bp, Cannabis indica
gaagccttcgagattcattcacctttctttctctctcttactttcgccaccaccacccgcccaaccctttattttatttaccttgtctctctccgtactcatcaatactagtcgtcttttacaatttaactcactcacattacatacattaatatgtactacatatatatacgttacgtacttatgtatctatatttatatttacgtacatacattatctctcttttataagtagttgccttaaaatttaccatcacttaagatcatcatatatgtaactactttttaatttttattttacataaattagaaaacaaacagcattttacgtggggttatattttatttagttataattaaatcataaaattatattaaattttgtattttgtattttaaattttaatattttttttttgtatatattttaaatattatgagtaaatattctactaaatttttatttttttaatcataagaaaaataaattaaatgatgattttttaattaattagtttattatagatatacaatattatacaattttttttttgataaattataagtttttcattgatctcaaacacagtacaaaaatatgatgttcaaaataatcactgcaaaacccaaccagtgcattacaatcccttaacccgtttttatctattacactaaccccctgtaactctctattttgattctttacatatatatacactgaacttgttgttgatttcaaatactattgttcttggctttccataaataatacatcattgcatttacaattattatacagttagtttttaaaatatacatagtttaaaaaaaaagatatataaaaattgataaatctatatgaaatttatcatttttaaattcgttgatcgtcgtatcttacttgtagtagtcatcacgttgttgtcattacttaacttagttgtaatcgtcactatccttctaatttattaattaataataaaaaatagagatagaaaagtgctgtcatcacaaaataaaaatgttgtgatagataacattatgtataattgtcaaacctgcaagaatttaagcaaacatatgaaaagagtacttaactcaagctcttatattcacataacgaaaacacaaattcatacataaattaatatgcattaaaacattcaaattttgaatattaatatgtataaataaaacacaaaattaatactaacgaaagtaactttaataaaatgatgtagaagtagaaagtcatttttttatacacataaaattgaaaaagaaaaaaaaattaataataagaggtatatatatataagtgacggtgaaagaaattagaagaatataatatatatattgattatactattgaaaaagaaaaaaaattgattataccaatgttcataattgagtgtatacgatgttttaatgggctttttttagttttaactaataaaagtaataatattacaaaaatacttccagctgaccaaataaacaaatatacaaaccaaatagaaaaaattacacaaatagctagcacttacacacaccttcaactcaggatccatgctttctgggcaactatcgcgcaaccacgctgaaattccgtattttaatattcccagtttgat

SEQ ID NO: 227997 - DNA, 1352 bp, Cannabis indica
agttttataaaatatgtttttagaaaaaattttaatttttaattaaaaaatgttaccaaataataaaatataaattattttcacataattaataataaaataaaataagttcttattgttttatatctccaacaattaaattaaaataaataattaaaataacaaatataataagaaggaggaaacaaaattgtatgtaaaaaaaaaaagttattttcaaaatcagtatccgatattttgcccaagtgaaatttttaatttttcaattcaattcattttgtacaaatgggaatgtctacactttttgtgaaaattagattggattcatacataatttttctttctcccttcatctctttgtgactactccatccctggctctccatccacacaccacacacaatcaatcttccctaccaaacatagttcctgcaaaaaataatacttttcataacttgtgtcgtccatcaaatattatcaattaatggaaatatctatattattagaaggtggggagtgtgaagaccacagaccccttatgttgttattattatttattttattttctgaataattgtggccacaaaaaaaatatgaggaccaaaataaactgcacccaatcaatttaacatttcacataataatatatatgttggtaattaacaattggattcgatatgccattacataataattacatgtaacatggtagttttgcttataatttacatgttaatggaaacgattaaaaagtaaggcaaattattttgataatcaaattagtatttaaagcatattctatgctaatcacttaatgagaattttatattattgtcttaaagtaatggtatttctttttgacctttaattttggtgaaggaatcataatataatgtctcagtatattctgtactggggctgtgaggctacaacggactgaatgattcgtgccattagtttaattaatactcatatatataatttttatagtataatatatttatatattctatcaaaaataatatatatatatgtcaaagtcatataaacctgagccagagatttctgtttacaattaatccaagctagaagtgcaattcccttgaacaaaaatagttgacgtgaaaaagagaaaaaataatattaatattaatatataaggaataaagaaattatttttgagaaagtgtggctgcatgcttaatttgtaattaacatattgtatgatgtaattattaagaatgatatatatgttatagtaatatatatgtaaatttgaaacaatatattatatataatatatattttctcaagaaaaaatgattaaaaatatataatataaatttaaatat

SEQ ID NO: 227998 - DNA, 2558 bp, Cannabis indica
aatttttcaaaaatttacaagaatgtgttgtaactataacgaacacctttatgaaagaaaaaaaaaattgaaaaaaaaatactccggcatgtattttcgggcacgaagattgactaagaaattataataagaggttgataaggtaccaccctcctcggtgtgatactattattggtgtaattaagtattaacttaaaaaaaatatcctttgagaaatattgctaatcaattgtatagcgtcatctatagagggtgttaagtaccactggtacttaattatatgtattatatattatatatattttttgaaatcttttctttttaatagtttaatatatatgtttttttgaaatcctatattatatattatatatttgtagtagaaaaggggttattggcaaaataccctcttttttattttaaaattaatataaatatgaagttttcattggttaattttctttcggttttggaatgttcgaattaaaatgataggttttggcctttttgcaattaataaaaaggcttcattttcaagttttaaaatgtgtgaattactttttctcctataattacatttaaatggataattgattgttatacttttttttggtgtattttttacaataaaaatagtgtttagagtcagtttatgaatcgaagttctattagtattaattttaggttaattagtaaattttgatatgtactaaattatattttttaattttttaattattaaaattattaaatttaagaatttttatataagtttattcaattttattaattcagtgattatttatatattaaatgctctgaagactttgatatctaccaaataatattcctcaaatttttacatgtaacaaattatgtccctagaatttttatctatgttagactttctttaaattcaacaattgatgtctattcaatcgacactattgattatattatgataaatcatagtattattaataacactaacacaagtattagggacaattatatagtgtcactaacaaagaaacaaaaaaacacaaaaatcactacctataattgttagggtgttaatagtactatttttaggttaattttagtgtgtttttaatttagttttactcttgttttgagtaattttacgatttttatcttttatttttacaaatttaaaataaaaaaatagaaaatatcgaaggaataagatgaataaaagatagaaagatcaaataaaagataattgtgcacaaaataagggtcatgcctaggcctgtgtcaaggcaaacctggagactgaggattttgcaacacgagcagcaacataggaagtgcatgtcgcaacccacccctttaattcgaagcagattaggattcttccgtgtgggttatctttttctatcttttttatcttttattggctataaaagaagtggacttcagctatttttggcaagcaattcaaaagcaatcaagggagtacaaattttgaagatcaaattcaacactggaggcgttttcaagagcatttttcaacattcttttcttcttctattcttaaactaatatgtgtgaaattgataagatgaacatgagtttcacagtatggtttgaaccgtaattattaaattcaaactcgcaaactgcattgcaccgtgtggctagacaaaaatgcaaattacagccacaccacaaaagattttaaactacattttttatgcgcaatctgggtggtttgtgcaatgtttgtaaaacaaaaagtattttttgtgactgtctagtatatatatggcacaataatataagatggttatggcagcaattcttgctgcgttggtgtacaaattatggctgaatagaaactatatatactgaaatagttgtagtttcaaagtatacataatagttcagatgttgaaagaagtaaagaatagaattaggcattttatgcctaagaaagtaatgttgtaaaattagaataattatagttccatagtatatatacttgctgagtttggctcaattttattaggtatttatgcctttttgttataatgttagtgttttaagttttaactattgtaagcatacgcaatgataatatcgtagctcataatttagctaaagatgttttatttttagagattgctatagtttagtggtcgggattgttggatggtgtttgagttgtttcaactcgttttgttagcagaaatcttttaatgagaatctcatttggttaagtttactcgttcaaactaatttttacttatttttaattattatagttagtttttaatatttaaataattaaatttaaaattatataagtattaacatttatgtgtgcaattttttttgaacacccttacaactacaactagagtcaaccatgaacactaaggattaattaaattaatagtaattataataatttattgttcttattactaattgcacttttgggacccatagacatgatggtctctagctaccaatccacattttttttttttattttttgaaaatagacgttgcatagataaagaagcattaga

SEQ ID NO: 227999 - DNA, 2345 bp, Cannabis indica
gagggtatgaaatgtatggagtaaatcactctttgcatcaaaagagcctaagggctcccaacatttgtaactagtctcacaacaaaacaatacctatataggcaagttttccatcatttgttcgaagaaggtttccagggtgtggatctgcatggtagaaaccatactctaaaagttgattaaacgagcagtaaacccccacctagcatgagaaagaagacacctcattaagccaaagggtaaattgaaataaaagaaaatagattcactttcaaaaagccattgtgacattagtttagtgaatgacctcaatcaagtacaaatccttcacacctgacagcttttgcccctacaacatcaatgtaagaagtaaataaaccataatcactacatgcatggtatatctaaaaggtttaattaatctattaaaatattctaatttttttattttatacagtgtggtacctaaattacacatcagtaaatggacctagcttacatccaaaatcaaggcgcacaaaaatatgtagttttatttcctcaagaacggaagagagaaaaatatacataagtatatccaggaaaagatgacaactatattaataattatctttatccacccaaaaaacagatgtcaaaattggataagtctttctaattgtaaggactactggtgcaaaattagtgtcttctttcaaatttaaagcattggttcagatgaaaagattgtactccagaccaaagtcaaatctcatattattatatttcttgcaagttttaatgtcctaccttcatcctgaatcaaatctaaacaacttgtgagtctaaactagcttttgaagtttccggtttcatcagtgcttggaaaatggatatgtcatacaatttggcaacttccagctgaacttttttacaatccattgtaggacaacataaattaacaaaattggaaagaggaaacaagttaaaatataaaatacctccacccactccataattagaactcggcgtgaagtttgtcccacatacatttctggtaccacaacatccggcagattaccatacagctgtctgttcaggcacaagatgaataacaatcaggccatcagtaggactggccaactatataatacattcaataaagatgatgggatgaagttataaactgagatgcagactaattgatatggtatctattaaaataataagaaaaaaatcatcaggagataaccacaatactatcaaaggacagtactgttgataagaaatatgttaccaaactataaagaaaactatcattaatcttttccttttttacttttgaaaagatatattaatactacaaagaagctgataagataacatttaaatttgtgttgttcttcacaaatacactaattgctactgatagcacacaaaatatagatttcagtacatgatagagctgtagccttagcagcaccaactactagtctgaatgacaatcaataatgaaaagcatgtcaccaataactttcgaattgttttttctttttcttacctaaacttgacaccattctgcgcttctagcctataatccatctcctgcattcaatgtgatttacctgtattcaatataaagctctaagaatatattatatacctcatacaacctaaagagatcagcactaaaagtgtaatgaaacaaatcttacacgatacaaaaaaataaaaaaaaaaaaaatagaatagtaataagaaaagcggaaaaagagtgagatgcttcgtaaactatcaacgtcttcaacaaaatgtatcttgacacaaacggttttgttttattattacattgttatgagtgaaaaaactttattttatataccaatgtgccagtcactaattaactaaaatactatttttattagaagaaagtgtatacagggtaactaggtaaagatgggcaagtatttgatgcaaaggaatttaagtgttccattttcatattccgtgacagggtggggatactttttctcactatttttacagttctgttgggaatcaccatcctttttgttgaaccagcccacatattataatattaccagactccttttgtaaataaaaaaatatactattgtgctagtatgcatatttaaagccatcaaaatcttcattctatgatagaagggcagttagcactcatttgttactttgaaccatttaataagaagcaccgagtgaaaagagaaagctgcattaagttttctcataacacttcacttttccttcatgaattttttcagtatctttagcaagaggaaagaatagaaacactaggaaaaaagaaaagagattgatgtatatac

SEQ ID NO: 228000 - DNA, 1515 bp, Cannabis indica
tttttatatactcatttcattcaacactttatatgaaacatgatttttataatgttacatattgcagcataaattttgaatgttaggttaatttatttaaaacatcatagagaaattatataaaaaaaagataatttagttatatacaaattcagaaagaataaagaatataaaatacaaatatttcactattctctctgtaaagacaagagaagattagaaaaatgatttgtttcaatcatcagtaataaacaacatttttattattatatttagtttctcaacacaattttttctttaatttataaatattcatttttattattgttaacattttgctttgtatattttcttataaaatactattatatgttctttgtatagagttttaaattaaatatttattttattaaaataatattgtttatttaattgaattatatatgagtatttttatcataacaataaaaaaatcaacacacatgaacctaaaaagaaaaactaaacaaacaactaaaaaatatgtgcatagcgcacataacaataatcatctatatcaattttcttatacacaacaaataagtatttattttttccattttaaacaatgttttttttttttaatttaatatactcaactttttgataatattttttcttttaaggttatttttttttttaaattactatagatatatttataggattcttttaatgtggaaaatttaaaaaagatcctattagtaggacaattaatatatatttcgtaagagcttctcatttatattttggttgtcaatatttatagatatatttaggcaatgtcaatgttttttcaaatgatgtagctcataatttctgaagagcttctcatttatattctggttgtatctttggattggagaatattccaaccaatttattagtttgatggttaataaaattataattttgcattcagaaaaaaaaaatatgtaactgggacccacataattaattggttatgaataaaagtgcacatttaatttaatggatttgatcgtagatgattatttgtaattcagtacccacatatatttgttcgtatatatacatgcaacattcaaagatttttttttaagaaaaaactattaataatatccaaaagtgcattttgaaacattacaagctaaattatgttgaagaaaataaacacaaattcagttaggagattatcaaaaatattaagacattattattttgctgaaagaaaaaagaaatgaaattaaatggagttggtaaagctagctttgaactaacgtgttggagagtctggttggtctggtcggagaagttctatagacggtggctggtattttgctggtctagccaaagaagttctatggtacggtgacaacaacagagagagatgtaactatcggcgtcgtcaataataaaaaattatcgcagaagttaccattcatagcttcaacatcaacttttttcgtaaatagttgtgcgatcaataacaacctt

SEQ ID NO: 228001 - DNA, 2252 bp, Cannabis indica
ataataatctcacctaataattaataatatttttctttaatttttaattgtatcactttcaaataacataaaaaaaaatagcataaatttagtatacgtgcctcgcacgtagttttttgctagtatatatatatatatttatattgtttgaaagagatctattcctttttgtgttggtgtctcttaatttttccaataaagtatatcctaaaaaaataaaataaaaaaggctcaataaattaaaacaataacaaaagatggcgtaatgttaaagtctaccccccacatgaccaaacttcactcaacaaacatgaaaagatggcttcaattcaatcctaaatttatgtacaaaatacaaggcttattacatctattttttctcatcattattattattgtttaaattttaatgttatcttagtagatatggttgactaatcataatcatgatacttatgctattgtttattcagagattgttttagtacggcatctggaatttttttgggtgtccaaatatgactaattagagctcaccctaactgactagtaaactacttgagttgagtgagaacaaaaacacaatacaataataataatattcttcttcttcttctttttttgttttcttctttagcttttcaaaaatgggtttcagtaaaattagcaaatatgtactgaatggtaccaaccaaaccaaatacttttctttacaaaaaggtctcctacttttagtgactgaaatttcttcttattgtagattgacctagtttttagtttaaccagcctaaactttttctaattaattattagaaaaatgctaaagagcactagtagtgtctaatacccttcttatgtgtcaatattattattagtttaactaagtatcgagtcctatataatttaatacaatagcttttagagagtatcgctagccaatcacaacacgacatgtcgagaaagtgctatgcaccactggtgtctaatagcaatgctctaattattattataattgactaaggatgtgttacttttggattggtctttaatgaaatttaagatttcatttcataccattaactagtcaaattttcgtaataaaaagtattataataatttgaaggcaatgctttgccaattcctccaactatattttattaacatttttattaggtatcttaacattattattaagctttataaatgattagtaaatttaattattaaatatttaattgtaatatctagtaatcagacaagttgatcgttttctttaatgatttgtatttttcaaaataccagatttttactaaaaaaatatagtctaatatccctttatttttttcttaaaaaaaattgagtgaatctcttactctcctagccttattgaattgactttgcaactgagtttagactaattagctcgtgctatagtataaaataataaaaatataaatacattttggtcagcatttgtatatttgtgctgtctttaaaaataatatatacttacactaaaataataaaaaataattgtaaataatattttaaattgtatatttttgtaaaagttattaattgaactttttattttatttaataaaaaattgaattctgtattttttaaaaatagttcaaaaaaatacattgaaccgattttttgtcaaaataaaagttaataacccgatctagagttgttatgataaaattaagtacattttctctatttatttgtgctagaaaaataaaaaattatacttaaaaaataaaattatcgaaatgtatcagtttagaaaatatagggtttaatttctcattttatacaacagattgtccaattggtaatgtttgcaaaatacatagtccaaaatgttattaactccaagaataattaatatttttaccctttaaactttttacattactaagttgtgccccctacagtatataactcgttaataatgccttcaaaatattttctttacaataacatagtcctttcatcacattttattcaatttattgtgaaatgagtgaaaggtggatgataattgataaataattacaaattaaatactttttacgtaaataaataatagaataaaagagttttcttttttataataatttaaatttgtatttttagtcttaattattaaagtaataaaaatgataaaatgtacttaatttatatttatttatcaactactatctaccgcgttactcctttcacgataaaattaaataaaata

SEQ ID NO: 228002 - DNA, 3281 bp, Cannabis indica
tgttgatctctgcacccaacctccacttgtttctatctttatccgactttgatcttgatattttccaccaggatattttcattcgaaattttatcctttttcttctgatattttctaactcttcatctatttttaaatctgcaaaactaaaagataaaagcgtaaaaatgctccaaccataatttaaattaaaccgaaaaatgtgctaaaattaacctaaattaaatactaaaaatatcctaacacatttccaaacaacaatcacatattgatgaaaaaataaaataaaaagttgatcacttaagttattccctttattgacataaaatgggtgaaaccccttgaacttgtaaagtaaactttctcttaataatatgggcacgacccaacttgtatataagagaagtttactatagattttttcaataattaatatgacatattgaatgaaatatttcatatttgtgaaagaattaagtagaaaaatgtataataagtgtgccccataaacagacaaccatgtatataggtaagtaagtaaagggtcacgtattgattgcagtagtgataaagaaaaagggggcagcttaattagattagattctcatatatatccattccaagttgacttttttaattatttcacggacgacctatgctttgctttgctatgctatgctatgactcactcccaccattccactctaaatccaccaataatttattgttaattttgttgaaccagtcaaatatgtgagactttcaaccaaaataaaataaaataaaataatgtgagactttaaatttaaagtaaagaaaactttttttatttaaataatatatataaatcaattaatttattttttttatgttgggcataggaattttaatttgggactatttagtgtagtgctatttaatttagtattagctagtggtattttatatcaactactttctctttttcttatcccttcttcaccattaagttcatttttgattatctgcaattatattatgtgaacgcactataataaaatagagagtaagatttaaaaaataagcttaaattatacaaaatatgactcccaataataaataatagactctaaatttaagcagttttttacttttttactaaacttttttaattatattttaatcaaaattactattacttttctattattttataaaattaatatatatttgataaatttaaattataaaatattattaaaataattaaatactaattatagtagagaatagaggtattcgtgatgcgagtagtgcaagttacaacattttttcaaattaaactgcatatgcggtttttgtaatttctcaaactgtaactgcaccgcgagatcttaaaatcacaaaaattataccgcaaaaatacaatatgttgcggtgcaatttgagcgactcacaagatgagaagattgaaagctcaaagtattaagggtacaactttgataataactagcaatagaaatgtgaagtggttgttggtcttacgactcacaacatgggaagattgaaagctcaaaatatttgaggtataagtttgataataattagcaggttttattacaattaatcccttaaaaaaagggtaattaaggttttgatttaaatgtcgcttttttattaaatgtgaaaattaaaagacaaaatgaataatataaaaaaaaatgtcaaaacaaagaagatgtaaggaaggtcataaagggtcctacatcatgtctaacaaagatagatagatatagatagatttttatcccacaacatctttttttttttgaaaataagcgttcattgataaataaaattagacctcacggtcatcacaaaataaatcttgcggaatagaagagattcctaagttaccaaattgtttgtgggtaaaggtccacttggctacattgtgagcgacaaagttacaagatctgggtatacaagtaaacacgcggccatcaaaacatctagagagtttccaacaaaaagaagaatagttctcaatctcccaaaccgaggacacttgattaagagcatcaatcaccactcttgagtcactctccacgatgataaacatgtgccccttgagctttgctgtttaaatagccaactgcctcgccgcaacaagcatcagagaaatccaaccttgttgtattagcccaaacctcctcaccataacagtttttagccaccaccgcaatgcaagagctttccgatctactaacatcacaattaagttttagccaatcctgaggaggaggccaccaaacctctctctggataaaggaaacagcaggaaggagagcaccttgtaaatcagcataagaatagcagataacatcaatacattagttcacattattatgataattattgtgcacattttcatttttgacgcgccaaatagtatccaccacaaccaaagcatataaaaagacttcatctgcattgatgcccttaatctttaagccccagattttgacccaatcccaaacacggatactagagtcagatactaaataccccacggagaagagcgccaaaggtggaaagccaagttgcacttaagaaacaaatgctcagttgattcctcctccatttcacaaattgggcaattaacatcatccacacagaatctcttattgagaatggcctcagaggtaatgcattagaaatgatattccaccaaaacaccttatgcctctccatgattctaatgttccatagtttgttccaaaaaggaggggacaccttgcaatgaggggctcttttaaaatcttgaataaggtatgctgatttgcacgagaaccgcccattatgctctttggtccatatccatttgtcatttccttggccagatgggtgatgagttcttatttgtcttttaaatatgatcaatttatgtattaatattcttaaattgattctttaaattattgattagtgtgattttaatttttaggctattttaaagaccattcatgcatttagagtcttgtggaaggattttagcatattttggttgaaaatagtggaagccggcgagcttgattttacaaggcaaaacttaattgtaaatttagacaaccttaaaggcagaactagacttggagctcaacataaaagttgtagatcttgttcttagctttctagagcatcttgaattgtctaattctgagtaatatcgagagagttatggtcaaaatactatcagtcatcgtagtagaaaatttctaaaaaaaaatagcgaaaataaa

SEQ ID NO: 228003 - DNA, 1880 bp, Cannabis indica
tgttctgttcatatttttagagtagtttttaaagaattgatttttatagttttcttgatttgggttttttcgtgtggagtttttaaatttcaaagctgttttagttgtttattgttttatcatgaaagagtttaaggagactgagttatattccagtggatattctaagatgggatttggtgaatggattagaagagttgactaaataggctactgttgactttttgacttttatgttttgtttgtcatcagtgatagattacataatataatctatgctaatatgatttttgcccctacatgtacgaaattattgaacttttctaaccattcaaaattcccactaactattttaaggatttctgtcaaattttattcaattttactaattctgtactaaatcattatctatcaaattatattcaggggaatttttaatgaccttaaaagttcaaggtatgatttgttacatattaaagttcgggaatcaaaaatcctaattagcctagcctataatctaagaatttagctcgttggattgttataaactcttgtggagatcttatttgaatcgatctgtttaggtcaaatctgtgtcctgaaactcaaaattaggataaattttttgttgttctttcactagttctataattttcaatgcgaagatatctaatgaaatgtacttttggattataaatgcctataaatacataagggatctctctgtattgttctaggaacatattatgattgaattttgtttgactgaacatttactctcattcttcagctgttgagtttgagcatttaagcaagttctcaatgccttggcctgcttaatgacacaaaattttctcttattcgaaactcattgaaacttttcgatcccttaatgagttattatactttaagttgtgcagctgttgagtttgagcatctaaatatgttctcaatgccttggcctgttttaatggcataaaaaaattcttattcgaaacacattgaaacttttcggagacgttttctgatctattgctttctgtgttgtaaactattgcgatttgcagattccagccccgaaggaagagctcgagatgcttattaccgagtaggcattaataagccatatccatatgcaagtaaagggctttaaaaatcccttgtttggttaggtatatttcatccaagaaaaagaaaagaatgtaattgtgtaacatgcttaattttctatacatgttacataaagctgtattttagaagctgttattagttattaatactactgtattttactagtgaactctcaattgtataaagtaaatcaggttaatgtacaacttggatttaagtttcaattagttgaaaaaagacatagacttgtactgtttagttggatagtaaagcattcagagtataattagttaatggtgaaagaaaacccattgtaccaaaacatgaaagtaggcttgaatgatgattattagtccattttaacaaagaaatgaaaagataaatagtgtacattctaaaatcttttacagtgcagggtttaaaactcaccacttggaaagaaactggccaactttcttgatctttaagatcatctccctaaatgttgttttatatttgacacaaaaagtgattttatcatacatttgatgcattgtgctcccgtttataattgaagaacttccttccattctgaaaagaaaaaagaaagaaatagtatttttatatagttttcttgttatagcaacctgaaaataatgaaaaaaaaataataattttataatttttgtaaaaaaaattgtaaaaaatataaaaataaatagaaaattgtaaggtttgtaaaaattgtaaatttttttgttatttttgag

SEQ ID NO: 228004 - DNA, 2550 bp, Cannabis indica
caatatattattaaatgtaatacgattaattttcttagtattgagtagatatacttttacatctattaagcattacatatttactattacatggcaagttaccttctttttagtgaaactcttcttcaattatttaagacaaaagaagtcttcttcaatatatgatgggttaaatgatttgtaagctatgttaaaatttggtgtaaatcatatgggcacatatcattacacttaaaatatcaagattgtacttccaattcaatttttctactatgaaatcataaatttgaattggtatatatgcatctcatggtggtgctaaatttatagatatttttaaatattaaatttacatttatttaaatatacatcataatttcaaataaaaaaaataaattaatttttaaatttactcatttatattttttacattcttttgtgttaattgtaatgtatctttttatctatattactttcaaacaaaataaattaaatttacattgataaaaatagtataatttataaatgatatttttataataaaataatattgtgtagaccatgtatgaaagcatgaaagtgagagttgaaaatgctgttgaaatgggaaaagtttgcgatgagaacatcactggagaagatgaacgaaaagctttcaaaaaatggacggacggatttactcgccaagatcatcctacggtcatccaggtcatctaataatatattattggtatttttttaccaagtaataatgaaaatttataattaattagaattaattttatgatttactatttaattaattaacaggttatattgcatggaagtaaagataaagatattagaggtgatgtaatgccaaatttgatttatgttgcaagagagaaaagaagaacatcacttcatcatttcaaagctggtgcccttaatgccctagtaagttcccatttcaaatattactttaaatatttttatgatggttttgaagcatttgtattatatgtgtaaatttattagaaattttagataataatttaggtgttaataaaattatagttcaaccactttattagtttatttgtgttttttttactattcaaaacggaacacaattacaatctaatttgatatgttttcacttaacatggaatattttaagaaataaacgtcttttttagaaaatagtttcagagaacgctactaaagagcaaagagctcagtaggaccgaaagctaaagaatccattaattcgaggcatatgctaaaataaagtctctaatacaaataagataaccatgctactacaatgtattgagatttggggaaagaatataaaaagtgttttcactgtattttttaccaaaaattgaattaattatctatttttatttatttatatatttatttgaaaatttataaattggcatgctttaaactacaaaacaatgatcagttgattactaatattttagaagtaccttaattagatatctcactataattgctattttttccttattttttttaataaatgtatagaaaaagagaaatattaaatgatattaatggtatctactatctaacaacactaaagtgtcatatatcaaatctctcatttttaatataatttattattatgaaaaatgctttattcacatagtaccattgctttataaataatgctttatttcattgttaaataacatatatttttgttttgttttgtttttttttattattattgaataaagattagagtatcagccatcttgacaaactctccaataatcctgacccttgattgtgacacgtactcaaatgatccccaaacccctatgagagttttatgttacatattagacccaaaaattgaatcccaaaaagttggctatattcaatttccacaacgatttcgtggtataaataagaatgacatttatggttgtgaacacaagagattatacagtattaatccactgggaatggatgggcttttgggcccaaattatgtgggaactggatgcttctttagaagacgagcattctttgggggcccattaaagtttgtgtcaccagaaatcattgaactgagtccagataatgttgttgacaacaaggctattcactccaaacaagtaatggatttggcccactatgttgctacttctaattatgaggacaaaacccaatggggctataaggttagtactcttttgtgttgatgtttttagttgagaattatgcttttttattacacattaattaaatattactgtaaaataattttaattaataaatatgctcttttataattaaagtatcaaatataatttcacataatttatttaaattaaggaccctaatgcacattatgaggatatgacctataaaactcaatataaattaaagagtaataaaataaaggaaaaaaaattatttttgcctataatatttaggaaaatatacgcagtgcaccttaaaatggaatttttttttcacagatcttgtatgttttacaagtttttcacttgtttttttcagaaaaaaaaa

SEQ ID NO: 228005 - DNA, 1814 bp, Cannabis indica
aaacgatctgggagaaaagccaccaactaagtctaactaatgagggatttgtccctgttaaggttcggggcaactttggtagctgacacgacttgtttcaaaaaaaaatagttagagaaaaacaatttaagggtaaggtattcaccaaataatatgccaagaaaaataagaaatttaatatgataccttctaaaattatacatgattcaactaatttcataatgccaatgctatgtttcctcacaatcaacaattacacacaaaaaaataacaaatgaagacattattgtatcgttcaataagattataaaattaattattgagtaacattttgttaaaaactacaaatagttcaataggttgtctcactaaaaaactcaaaccaataagtttactatataataatcaattttaaagcctccaaagttaataccattaacaacacatgctttcgattacagtgtatcacagtacagaagacaacaacagattaagattttatgcccatacataattctgtcacccacaagcataatttccccagatgttctctctatattttgatcaatctcctgaaacacaggaaaactaggactctgtttttcttccatgaatatctacacaactagctttctatttgttccatcactggttattttccttgcggcgcacgtatcgggttctgtcgttgtatcttggcctgtcttgggctctctggggctgtggctccaccctcctttgcctttctggtgacctttgaacgatttctccgttcacatacaattcggctgcataaaggcatgcaaatcataaatatatgattcattttaagcaagaaaataaagtaggctaggcaacactagatttgcctaatgtagaaaaagatgtgactccacaaaattgggacaaaatgcatggctagacatatggcaataaggtattaaaactgaaaatgcacaactagtagcaacatggatgtgcaagtattttgaaatcaatgaatgtagatgcacacacatgcaatcatactaaattataatgtttcatctctactgatccgcatctcgacaattattgaaagcacaggacagtttcgagagacatttgatataagtccattaaatagcattcaaagctaatcattgcctgttaggcttattagctttgccaagatggactaaaacttgtaaacttattccatacagcaagtttctgctacgaaaaatcacaattagtgaaagttactcatgatttggttgctgatgcacaaaaatgtatcaactccaatgattctgaagctccacaaaacatgagaagcaacaaaacattaggagcgaatgcatctgagtccaatagcattcaaagctagacattgccaactaaagaactactagctttgccaagatggacggagatgataaaaagtttgacataaactaaggacattttttgtgatcaagattgaatgattcacaaaaatgtatcaactccgatgattctgaaactccacaaaacatgagaaacaacaaaacattaggagtgaatgcatctgagtccattagcattcaaagctagacattgccaacttaagaacaactagctttcccaagatggactgagatgaaaaaacgtttaaagcaacataaactgtactaaggaaatattttagagattaagattaaatgaaaaaatcaattcaaaagaaagcaaggatgcctattcagcattatcattaaaaaatgtttcatctctactgatctgcatctctaccaaaattcaaagcacagaacagtttagagagacatttgatatta

SEQ ID NO: 228006 - DNA, 4413 bp, Cannabis indica
caaatttaagctacaacttaccataggtcctgcaggccgcgactcgaactccaaaaattgataatcaacctcagaatttaattttcaccgttagattatcctctgcagtcaaaaatagcctaaatacattttccatactttttggattattttattcacatttaataggtactccttcacctataaaaggagagctcaacaagctcattttgcatatccaaaaaagtagccataagatccaaacatctatctctaatttccctctctagaaattagagcattcagacttagccatttttctataatctatctcatgtgaataaaaactcaaagtagacgtagctatattactcttgcgatacaggaagtgaactactataaattgatgtgtctagcatttatacctaacatatctctcattctcaccaatctagagagcgagtgtggcttaggagtctatgtccaaatttcctagtcaatattttggtactttcattgagagccaaaactcaagaaagtcacttacaagatcgttgcaatacgctcctcaagtgttgaaagaagatccacatcaactggccagcaaactcgaggtacaccagttactgaagttggaattgggactactcatacagctcaggtgctagcaggaggcctataaccagctctacaactcatcccacaaggccgccaaatgctcttggtactggaactgacgagtagttccacctggggagccacatgtgaagttggaagactcttaggaggtcgatcctcgagttgaacaactcagccaaactgtggctaacctacaaaaatagctacaagactccctcgacaattgatacgagctattttaatagtggttcatggggaactagcgaaacattgaaagccaataggttgagtaggaacaataaagagctaacctgtctcaacagattagagaagccttcactctagtcacggaaccacccctcgaagaggtctttttgagttggtaagagagattccccatcgaccaactagtcacatgggaactagtgctcaaggggaaaccctcaatgcacgaaacacgactaacatgcttggtagccttggaagtactaagcaaacaccaagtgttaaggctccccaaagggaagaaaactttgagtaagagtctgaaaggtctcaaactcgtggatgccaaccaataggccctccacctgatgtggagcaacctcagaacattgagagagccaacaggactcctccactgagtccttttcaatgcactcatgacaccagaccccaagacactaccaaaggaaagggacttgctactcaaaatgaagggagtaatcgaagactttacttcaaaactagaggctatgagatctgacaagtaaggaccaacgagtcgcttcatactcgagagtactcccgagatgaaagagttgagttgtgccatcactttgcctgtggcctcgatggctagcagtatgagtacttccctcgactacatggagaggagttaaacttgaggaaccagttcaattctctttgtacttgtgatcaagctgaagactactttgagggaagtagccactacaacactctagatgaatgctctggtagcgcttcatcccaagatgacccaaaattctttctggaaacatcaccgatgtttctttcacgacccgatggtcaggagaaaatgacaagatccaagtcaactagagtccatggccgatttggaagaccaaaagaccaacaatacactttaagtagataatagttggtagaagcaggagctttaagatgagaccctaatcgggtaataaaagctccagctgggatgcaaaccaccatccatggtgtcaacatggcagagtttgactacctaacaactctagtgaagggaatcatgaccccgaagttgtgaaagttagaactcaacagagagtgtcacacaccactctctaatcggattaaagctctaccaatcctccaaagttcaagaacccttcctggaatcaatacaataggaaggaagatctactatctcacatctaatactttaaagtgcatactaatttacagggagaatcaggtgtagaatcttccctgccacgctgacaggcatagcttagcgatggcacctcaagcttcccctggattgttcaactcatggaaagatctagtggatgcttttggcaaccaatttgctccttcctgacaatgtcaaatcaaatccaatgatttggtagacatcaagcaaaaagaagatgacctcctcaaggagtatataccacacttcttagaggtagccgctaagataaaaaggcttagtgagaacacaaggttaatggcacttgtagtcgagctcaaggagatgggccctctatggtccgaccactatctcaaggcagttcacaccataaatgactttcttattagaatggatgactttatcaagcaggaagaagtggtcacccgagctaagggcttaaaaggcgataagaaaaagtcattagactccccatcccctaacactgaggcgcagggtaatgggaagaaaggaggttcaaacaaagggaaaagagccaataatggtggaaaacaaggcaactcccctagtggaaagaaagctaaaattggtggtaggccctttcgagagtatgagcctcatttcactacctactccatcctcttggccctaagagaggagatctatagaaccacacaatcaacagtgatgtaccaataatcccttcccttcaaagagttaaggaagatggacaagaaaaaattctgttgctatcacaataattgcggtcatgatacaaatgagtgtaatcagttgcaggatgacattaaatttctcattagacagaaacatgctgctcttcaatataatgtatggaatcctatcatgtcaactacccttacaacaatcccttggatgttgaggtgtagatagccaacatgatggtgtaaagggtaatgattgatgacagagcatccttaaacatcttattcaaacaaaccttaacctggatgggcttttcacttgaagacctatagtcgtgcaaatagctaatgtatggtttcaacgaagctggtattgccccatgtgataaaatcagactaccactcacaatcaacactaccccaaggtagaccaccatcatggtcacgttcatagtggtggatgtgaagtcttcatataatgtgatgctcgaaaggccagccctatatgaccttcaagttatctcatcaatataccacttgtccgtcaagttccaaatgacggctggtatcgattttctctttgccaatcaaggaactgcccacgagtgctataatgcttcattatctctcactaagaagacctcttctgctgcttcgacaccaggggatgaacaagacctctcccatggataccggagacaatgaagaccttcaaaatttaaactatggagaagacagagacgaaacctaaagccacttgaaggtgcacccaagatggggacgacattgaccttcattttaggaaatcaactctagagttggtctgaccaaggaacttagagaaattccccttaacacaatggacccaaccaaggttattaagattgtaacaaacctcatggaggtcttgagtgagatgctcatggcttgccttaggagacatcaagacattttttcttggtcgcatgaggacatgattgggatcgacccccaagtcatctttcatgccctcaacatagacaaagtaaacttttggcctatacaatagaaacacaggctccttaacaatgagtactccaaagctcttaaggaagaagttgaaagactacacgagaacaacttcattagggaagctttctacctattttgggtatccaacattgtttggtgcctaaaccaaatggtaagtggagaacttgcatcgacttcattaattgataactctttttgtatatgaaattaattttgttctcaaatatttttagcttattataataatttttacttaattttatttaattttacataaatattaatttagtataatttgtttagttttagttaaatttcttaattttttgaatttattttatttagttttccaatgatttatttgtctcaactatgtagttgtccattgagtatggtaaggcccaatcttcttagccattattgagtatggagtaatatatgaaaggaaagcaaaagaaatgggctgaatgattaataggccacatgctagactttggaaagaaaattaagggcaagatgtcatatttgatataaaaaagagaaggagagggcgtgaaacaatattggaggcggctgggttttggtgctgctccaaggatgtcatatttaatagttctagcttgttttttctcaaagtttgtgttt

SEQ ID NO: 228007 - DNA, 2222 bp, Cannabis indica
tgatttcattctctaggcgtggttccgtggactagaaaatctcttgtgtcaaatgatttaattttttgcaattatttttacatattgtctattatgttttgtcactgcaaaattagtctctataataacagaattacattctgcttctgcagacttatacaattttatattttcatatgtattgttgacatttacaaaaactcaatttttcataagatatagaaataattaagcatttttctttaatataagtataaccaacttattgcacacccaatggtctcatttgaaaaaataataataataaaatatttggtagaaatggtgacttttataatttttacatatagtctaatgtatagacctaggaattagtactttcgattacttgttagtcaaacagctacacctatagatatatcatgtatatatatgatcaactcaatatatataagctggcaaaaataaaataaacaaagtctatattatagtacttgagtattaatttatgcagcaaatattggccaaaatatcttaaagccacccacgtgagaacattgattcattaattaattattgattaattcctgcataacatcttctcctactaattaatattgaagaaaatgtcttatattaaggagagtgcatagatattccggcctgtcacaacgccatggcttcagccttaagcagctccacagctgtgttgttcctttcaactttacttcttctgattcttttcttcatctcccataacctaaccctaaaccaaacccagcttactatccactcttactcctactcccttactaacatttcaaccaacaacaataataacacaactattacttctattcctattccttcaacaagtcatgatattattcaaaacatcgaccataatagtagtactactactactccaccaaatgtttctttagcctcttttctctcaccatcaagttctttgcatccaaacactactaataataactttcaaactgctaaaaaggtaagcatgcatgcatatgcaccaatattaatatttcattttattacgttgttgatgtatactatatatactactagtactttttgttttaattttaacatgctacatcatcttgttgtatgaagatcattaatagtagatcagataaaattgagagtgatttggcccaggctcgagcagctattcatgaagcaattgttaccaaaagtttcaaatctgataagaatgagagctttataccaagaggttcggcttacagaaatccctatgcttttcatcagtaagtatatatatatacttctataattagtttattcttaatatcaaataaaggaaaagaaacactcatacaaaagaaaaaaaataagaggtttttatttcaatttattttttatagtggaataaataaatgaatataaaaataattaaaaagtaaacactactcctttcaaagttttgatttcacttttgaatttggccttaaaaaattgaatatatatatttatatattacttcagttttttaaaaagtagaaaatgaaaggatcgatgaggctcgttattcaaacgacgtgttttttaagcatttttcacacttgggtttacaaaataaaaaaaaatctaaattgtaagaagcctaacaaccaaaaaaaaaagctaataaatatagtaataattaattaaattaataatatgataatgatgatgatgattaggagtcacatagagatggttaagagatttaaagtgtggagctacaaggaaggagagccaccagtgtttcacatggcaccagtgaacaacatatatgctattgaagggcatttcatggacgagatagagagtgagaagagtggatttagagccagaaatgctgaagaggcacatatgttttttctgccattgagtgtggttaacatcattagttatgtttataatcccattcttaccaaagctgattacagccgagaccgcctctgtcggcttgtctacgattacattcatgtggtcgccaataagtaccccttttggaataaatccactggtgctgatcatttcatgctttcctgccatgattgggtaattattatttctcaaactcatttcaaataccccataatatttcttaattttcactttttttttattttattaatattttattcattgatacgtaattctgtagcatgcatgcatatatatatata

SEQ ID NO: 228008 - DNA, 1787 bp, Cannabis indica
tttttttctttctattttttaaaaggatagttcatatttttagtgtacgtgttatatattttaaaacatcatataaaatatttaaaaatacataaatattttctacaattataccaaaatttaatttcaagaagtggtgccaagcgctataaatctataaatatatattcataatatagaaaattgataataaactataaaatatgatcaaatcaatatatcaatatactattaagtattttaaaatgtcaaataagttgtataaataagcaaatgtctttttcaatttttcataatatcacactatatagttttagtagacgtgttggttaaagttgctttttggaagcaatatatatatgtatatatatatctatatatatatatagagagagagatcagagagagatagagatttattgtgttttaatatagatttccaaccaggtaaggttccttgaaattaagccagtacaactcaaatgaatatatgattaaataaatatataaattatagatccttttgtatatagttaagtggaagattatgagcgtagtatgccaacgttgatcgctgatcggatcaaatatgcatattgacttaactcatcgcaaaacgtaccctaactatatatataaataatatataggtcaatagccatacaaatgaggttggtacaaatcacaataaagtcatatatggaacctaataagtctatttcattattctttatattcattctatatatgattcaatatatattgatatgtatatacattatatgtccagatcacgtttgatatcacctattggtcattggagatatataaaaacaagttttatgataaatctgtatttgtttgtttgtataagcattatacacattcaaaataaatttaatatttaattaatgttttaatagaaaaagttattttattatataaaaaaatacatatattatttaatagtataattaaatatagttaaaaaataataaaaataataaatatgcacataaaatatttattatgatggaaattttgtatttaccaaatgtcattttaaaaaaaaaaattaagaaaatgactaaatataatgaggaaattagactttatactctttttatatagttcacttttatttttaccttctttttcttaaagtctattatttttatctctttttttaaacactgtaccaattttatccctagtcatttcaagatattctccatgtaactctcttatgtcaaggtattttgcatacaatacatataaaaagaggcatgtttcaattaaatatataaatcagaggtaaatgtggttaattgataaataaaagaggtatttttcaatttaccccaaatataataaagagctgagatgcaaaatgaccttaaatttagaaactaatttagtaaatgtcccttcttaaaaaaaattaagaaaatgacaaaatataataaattagctaataaaaattataaaaatatatttactacatattattttttaaaatatatacaataataaaattaaattatatatattttttaatattacatattactatattgtaacaaaaatgaataaatatattagatcattagatataggattaggattttttttcccctcgaactttggcatgtaccaaatcatgcccccttgaacttttaaggtcgttaaaaatgccccctgaactattgagattgttgaatttaaagatttttgtccaattgtagtaaaaaaatactaacgtggataaaagttcaggagcatgattt

SEQ ID NO: 228009 - DNA, 1759 bp, Cannabis indica
acaaacgagagatttgttttattatctgagagttgtattcctttattcaacttcactaaaatttacagctacctcataaattctaagaaaagcttcacaggctccttcgacgatcccagcaaagtaggccgtggccgctacaaccccaagatgtctcctcaaatttcattatccgattggcgaaaaggatcacaatggttcgaggttaatcggaagcttgccgttgatattgtctcggatacaaaatactaccccatattccaggaacattgtaatattccgtgttacatggacgaacattatatttcgacgttgataaacattattagaccagaagaaaattctaacagaagtgttacttgggttgattggtccaaggttggtccacacccaggaagatttaccaggaatgatgtcacagctgagtttctcaacaagataaggtttggaaataactgcacttacaatggtgaaaacaccaatgagtgctttttatttgctaggaagttcgtccccaacaccttgccacctttgttgcaatttatacccttactgtttaatacttcaataccagtttaatatttttgttatatgattacttttgtttttttaacgcttttacccaacaagtttgcaataacattaattgttgtgatttgtacttttatttctatttgctaattatatacaagttagatttatattataagagggaccgtaataatataaatatctagtatttatgtatgattggtaataatgaatttgtattgatttaattgagaataaatggatatgcagggagtagctcagtgatgttgatgaggagatgttgatagtttagtagatgagaataatttgtcttcatagaaaaaactttgtagtagtgagttttattgatactttgtgtgctttgaatgtcggtttacacaatttagaatccttgcatgtgtctgtggttagcaatgtttggtctagatccttctagttagtacaagaaatttatcaatgcaattctacttgagcatgcataacaaaaaaattctacactagtgcttctataaaggcctatgatgttctatagtatttatcacatgtgtaggaaattcaaaagtttttttcaattatttaaaaaaataaaaaaaaaaattctaaacatatgttgattattctagactatattgagtattgtagaaatgtgtagcaatttctaatacctcttcttagtttagatgttggtaactccaatcatatcttgtagtagctccaattttcatgtcatggtttcctttgtgaacatgtttattcaatcatccaatggatgaggtcaattctttgcagccatatagcttggttgtagtcattgcttaatatactttgttttggttgatgattggaaaacagttgcttgcttaattgatacttgtttactcgcagacagatcctagtgatttggatgtaaattttttacatgtgacacgaaagaaaatatcctggagttaagcagtcgcgagtcatagcagtcgacctgggaggggtcccccaacattcatccaggttgaatctgggaactccagaataggtttggatcccacgaagttgttccctactcactatctttaagtatataaaccaagaagaaaaaaaggatccaatccaaggcctaaaaactgagaaaaaaaaaagagagacgaaacaacaccctagaagttaacccaggtgcctagggttttcacccaacgccaaggttgacattcca

SEQ ID NO: 228010 - DNA, 1633 bp, Cannabis indica
aatgaaatccagaatgaaaatcctagggtcgcttatctgtgtaaaccctcttactcttactctcttacttgttattattattattattgttatttcgtgtgtgtttatatgtatcagtttttatgtgtgtgaattgtggagaattattctatgttctattagattagactgtctttgttaagtgtttgaaattggcaacatatataaagaaagagactactagtgttgagttagttgatgcacaacaaaaatgcagagaatattggatttttgtgttactgaaaataagctttggatggtacttagtatagtataagttacctttgccacgaaaacttgctgcaaaagtgttgttgtcaacagattttattgaattgattgaatctctgcatgataagagtaggaatggagcttgtagctggaaccttttgtgttcttggtgaagttcaatttagcctttcatctatgaacgttttgttctagcaatgctttcagatgagtatcattctggtagcttttgtcttcttcttcttcttttttcccttcaaaaaatgtatttaaactgttcttttgcaaaagttatgatttccatagcttttggactagaatacttagaaactacttattgtgataccagagtctgtaggagaattgatctattaattgagtagcatgttaaacccgaagaagctttccacctagcttctgttgcaacttgaatatctgactttacttttcctttttttttttttataattcatgcttcttgtgattcataaaggaccgaattgcaatatgcactgttttaagcatggtttattgatttttcaaacttgctatttgctttcattaggccgtttccatgcatttgagaaggcccatatgatggacccaacatctagtggacgtggtgttcgacaatttaagacatatctcctgcacaggcttgagaaggtaggcatttgattgttggtgcataatttctttcctattaattttgtatgatgcttgatgttcctttttgggtgtattttttttggaagctaaacacaactgcttgtattattattatgtagaataatacaggaagtaaaagggtgtacaagactgtaccacccaacctacaaagtaatgttaaataaagttcctagtaaaatcacaaagcaaacaggaactatacaacagtattacaagaagacctgtcaatctgtacataaataagagaaaggcacatttctaaactctttcacattgaacaacaaatagctgcctagtatcttactttatcccatatggcttctgcactatcttctacccattcagacaatcttttattcattttcaaccaaatttcctaccagacagccactgtccctgtcctccataatagtttcattccctgacacaaactggacaatgaattcatcacatcattgggcatgcaccactagttgttgaaggagttaaagagcctaaaccatatatattcatagtgaacgcatgacacaagaaaatgcagtgttttgacgtgtcagtgtatctggtctttagatattggttagaatcatgcgtgacacacacacctatgtagctaggggccccttctatcacacactatgtgatgtcctattta

SEQ ID NO: 228011 - DNA, 2042 bp, Cannabis indica
aagtgttatagtttcattgctcttagaaaaaatctcaaaaaaatcctccctttacaatggacatgagagtcgtatttatagtcagccccattcttcttgcaccctcaacatgcccccatactccctatgtccagtcactttcgtctatcatgatgacattgtatcctaagtgacctgacatatctagaatcctaaattacactaataatgtcccttccattttgtacctcagacgaactgaagtttgttcccgttatgtaagcgtattgtgctgtcgttatccctcctgacatcttcttattaaatctgctggtgtcaggaaggaaaagtggataagcagagtgttgaaacagcaggcaccggcattgtgtacgggtgaaggtgcgcgggtgcgggcgtggcgtggcgtgggcgcaggcaggggcgaggtgcgggcgaggcacgagcaaggcgcaggcgtggcgcgggtgcaaatgcttttcaagagataatttgatttgactaaaggagattcacaaacaaaggaggcggggccgctttttgtccttttttgtttgtatggaatatcttgtacctctccgtttgctatttatagaaatattttacttcttctatttttgtggttaacacttgccccccagtctaaaagatgactttttagttatctttttcactgtaagtgaactgtcttctctacttttgttgtgagcctcatccagcgttatgtctagaactacgcattgccacattgatgggattcttcaatatggtaggtgggcacatgtgatctttcatgggcatgcgcgtttgatcttaatcgttgatcttatttcgatcctacggtgatgaacctcctataaatagccttatcttctttcatagtttggcttcaccttcacctttctaaactcgcttccacagtctagtctttatttccttcgagctatacttacgtccttaggctttcgacacatgttctccttgtgacttttgacgcaataggcttacctttgcctacatctattctgataggtaccttctcaacccatacaacttgtttcatttcttatatctgtatttttgctacacttgtggttactcatttaccttatatagcctgcctctgagtcttctagtagttagttccccactagagtatttttctttcctcctactcatggcaaatcatagatcaccttatgtccccaagggagttcccttcatcgaactttcatccgattcggacaaggaaggtcccaatccttggacgcgataccaccaattgatgttcgagcgcctaaagtgcttggaagcaattagtgaatcaagaacatttggctaggcttaaaagagagattaagcttttggagaatcaagggcatgcccacacgcatgcctgtttctcccatctcacgcagctttatgctgacataacgagtaaccttgctcacttagggtgcatgttctcgcctgagccatcttcccccagttgctcaccaagggcggccttgagttgaaatgggctggcaaaaaaatttttttgggcccttacgataaagataaatagtatttttaaaaattattaaaaaaatatgtatatttttttaaaaggcaattttttgatttgggctcctaaaatgagtgggccctaggcgcgagcctaccccgcatatgcccaacgccggccctattgctcacccatacccttggttgtggagccacccgtccgtcgagtagaggatagagctcccagcaagcctaagtcgagccggaaggctcttgcgcgttggatgaaaggaatgaagtgcattgcgtcccgttctaactttccttgtgcttttgcagatatggacaaaccacgccaatcgagtaagcctagcgcgccccttcccacccaagacccctaaatcccgtatgggatggctgatgtcaagaacaccataacaaagtcaaacattaagaggataatcaacgaatacgctgtggagcgaggcttcaaacccttgtcggaggattttcacgttaaaatttgaattttaggt

SEQ ID NO: 228012 - DNA, 2153 bp, Cannabis indica
taacaaaatagagggtccatttagtaaatttgcaaaacatagagtccaaaatagtatattgattttttttttcttattatatatacataaataaaaaatttatgaacaaatttttttaaaaaaaaggctagtaatagaactgtattcttaatgtacacggtgtatttttttttttctaaaaagtccaatttcaaaattttgcataaggtccttaaaatatttaggtcgaccggcgatggacccgtgatttttactttgtgggggcttatttatcataaaaaaatatttatagctacattataatcactcttactaaatttatctaattttgtaaagacttgttctattattttggtatataattattgaattaaaaaggttacatttaattttttaaaaagcaatatttttattagtggaagctatagcccccacatcattgtaaatgggtccatccctgaccgtgattgatggttggcacacactagtgcctaataacaatcctcatatattaaatatattataattttcttatataccaaaaaaaaaataataaaatcttttagtttcttcttttttgtgccaaaggcatttagtagtgttggtgtggaacaaaatacatgtgaaaaacttggttgtatatctttttggattattattttcacttactttttgaaacctattctaatatcacaacacctagcataaacactaattaacatgttaggtatcattccatttatggttatatgatcccaatacataccaatatataattaattaaagctaattaatctcaattatatgctcttctaataatgggtttcaaccctaaagtataatttaataaattatttaattaatttatttattctatgattcattcaggtgaacctatacctacttatatataggcctcactatgtacaaaaagatctttatatcaacaaaaaaaaaaattatcactaaaagtaacaaatttataactaaaaaaatattatcataaatatatcattactagcttaaaataagtcacaaaatttataatttattgtaactaaattaactatagtgatgatttatgacttacatttttagtcataaataagtttttaataatatataaattttcatatttagtaaatccttcaccttgtgctaatctataaacattgatcatcattaataatcatgattagtacagccctaaaccatttcaaattattttaattatctagtctaatttcacattaacgacacgattttcgatggcgcctttgattaatattcataaacaaatttacatgtgtgtaatgaaattcataaattaattttaagggggtcatatatgagttgggattaagttgtttatatttgaattaataaaggataattggtaaattaaaatttataaaaaaaataataataatggtggacctaacaattaagcttcattaattaagtactaataaaaatgattaagattctaatcgttctgtattttcttgcacaacttgaggttgtcggtagacataataacaaaaccctagctctatactcatcataatcatcatacttacaataagacactttatcaggtgaaaaaacattatatatttaattatttatttattaagaaacaatttcagagaagtatcccttttgctttctcccacccattttattttgtaattattatattctcattttgtacatattttcataattatttcattaatttattttcttttcatgcatccaataagagattgtcttctttcatgagcttaattaattttaataatgcaactatatatataattcctatatttttcttatgcttcattcttatgtacataaaacacaataaattaaaacactcattacaatttttggcgacaatattttagtcataacatatattttttgtgattaaatgtgacttttatacgtcaaaacaaaaaattaattgtgactaaaacatagtatttatatacaaattgtcactaatttaattttctttgttgtgactaaaaatatatttagttataataaattttaatttttgtgactaaattacggatcttttaatcacagtatatatggatgatggtttatataattagtcacaatttttttatttttagctacaa

SEQ ID NO: 228013 - DNA, 1715 bp, Cannabis indica
gataaccaacctcgtgtaacatgctccttgcattgtcagacattttgtcaaattcatcgatgcagcaaatgccgcgatcactcaaaactaatgctccactctccaaaacctaaaagcatcaaaccatttgtagttaaggttatgtcagaactggagaaaggatatgtagtaacataaaattgaagagttagttagcgtcatactgtttccccagtttcaggatctttggtaacataagcagtcaaaccaacagcagaactccctcttccactggtgtatatacctcgaggagatagcttgtgtatgtactgaagcagctgagacttactggttccaggatcaccaacaagaaggatattaatatcaccacggaagttagcaccagatggcaacttcaaagcgatcccgccaaacagctgcaatgaggaaggttgcatttagtactacactagtcaaaagagattcaagacaaactaccctttaaacctaagacaaaaatacaatcaaggacttggtgaagcgaaactatcaaaagtacctgacaaagaaggccccttttgacgtcatccagctcccagatgtttggtgctagagacctcatcaaacggtcatatatatctggttgctttgacagttctttcaattcttcaacctgtagtcaaaacaaaaataagattttgtagaataattcattttacgaaagaaagacagatattacacattagacataccttcttctcatcgaaaacaatatcatctgagtttccacctaaaggattatcaatttccatttgatcatccaccagcattctcgacttgtcagtcttctttatatgaagacaatcaatgtatgtctgcattcaaaagaagaagaaaatacatcaagaccctgcaatgaacaaagaaaaaaaaaaaaaaaaaaaaaaagaagaaagggaaccatcacacataccttgaagagtgattttacagttctgtgtgctggtccaattctgacagtcatagccctataaatcccagtgacctattgaaacagaaattcattaaacaagtgagcaaacaaataaacatccttcttaagattctgcaacatcatctgatctgtctttacctcaactctatctcctggttttccagcatcaaccagtttatcatgcatcaacaagctaacagtatgtggagtccctccctcaagaatctcatcaggtgtctcctgtagccttacaatctgcttatcagtaaacctgatttcagaaggagaactagtcagtaatcatttgctggaattcacaactataaatttaagtatccaagtataataaaccattatttgcaaacaatattacatacacaatctctaaatgcatgtcctttgaccaaattagtctattcaaaactaattttagatctagaggtataaaattaaacttcaaagaggaaaaatgaatttaaaatgaagcaaagcatgggttgtaaaggaataattcagaagatcaacaaccaaactagcacgtatagccaatcaaacaccaaatgcaagtgacaattgcatataaaaacatgtattttcataaaatcaaagctacagttacctgcatcggttgtgaacaagtgtcatggagtttcttgcttggcattcttccttcaagcatcttgttggttcagttatccgtcctgaagagggaaaataatttagaatgacattgtgatataga

SEQ ID NO: 228014 - DNA, 2370 bp, Cannabis indica
agagagagagagagagaagaagtgtgatggagctagaaaaagaaaaacaaaagaaaagaaagaaaaagaaaaagaaaaaaagaagaagaaaaaagaaaagaaagaaaggaaaaagaaaaaaaaaaaaaaaaaaaaatattttttttatttttttatttttaaaataattaattttttaatttttttaaatattttttacgtggacgaataaaattgtgccacgtgttctcggtccagtccaacctggcagttaacagctaaatttcgacggaagtgtgtttttgctaacagaatagtggttttggaggtttacccgcagaaatttgggttgtgggggtttagtgaaactaaaaccaaagtattgggggttttgccgccatttaccctttctataaacgtaaaaagtagagacaaaattgatatcagtactataaaccactacaaaaaatttttacttatagtcacaattactacaaaaaaactgctacttttagtgacaactttttagtcacaacataattatttttgtgactaaatgtaacttttagtcacaacaaaatgttacttgtaactaaaacatagtatttggttacaagttgtcactaatttggttttagtcacaagaaattttaattttagtgactaatacttttagccactgaccttttagttacaacacaataatgataatttataattagccataatttttttatctttagtcacaacacaataacacaataataataatttatgcaattatggttgtagtgaatattcttaatataaccatatctgtgatgtcatataacgagaaacatagtaacatacgatacaatatttttaggtattaaaaatagaaaatatccctacaataaaaccaaaaatgatgacactacctaattaattttttccattatatttatatatttaaaaacaatatgcctctgaatagatctatatatacatgcatatataaataatatttgcatgcatgtgggatcaattgtatatatgtaagttctcacataaatatcaagtaataattaataaaaaccagatatacataacaaatacaacttgttatatcacacaactacttgttcttaatttgattacgtacgtattttgtaagtctgcaaattgacctataaaattatgtctgtgataatatatatttgaagaataattatgtttataaattagctaaaaagttgtagtggaagatccaaaatgatatggatggaggctctttttcttcttgtgttggtgatcataacgatactccaagaaaattgctatgcaaggaatatgaaatcatcatgttcttcttcatgtggtactatctctaatataacctctccttttagactcacaactgatccttctaactgtggagatttaaggtacaatctttcttgtgagaacaatattacactcttaaacttgcctctttataattatccatacaaccataataacattaaatatcaaatatactatgtactagctatcaactataataactatactattcgagttgttgatcccaatatttacaaattacatcaccaaagcaactcaacatcttcctttttgatcaccaacaacactttgtcccttggggactttgagccatataattataaaaatccttattcagcaaaattttcgttcgagtctggaaggcaacaaagtgttgcaaaaaccctagtgttgattagttgcgaaagacgagtggcgaattcttcttacattgatgctaatccttgcatggaaagaaagaatattaataatataggtagttttaattggtcatattatctattggatgctgatgaaatgagtccttatgagttggatttttttcttgataaaacaagtaactctcatagatcaaaaatttcatacttcatcatgtgatgacatcaacagacagttagcatatggtttccagctttcgtggatccaaggttttgacacaacaaaaggggatcaatattgttacctcgatgaaaattctaacaaagtttattgtcactatagtgaatgtcagattactgcaaatgcatatgtaccggggtatcaacaattttgtaacggtataaacacattttcaacaataattaacaacgttttgaatatctatatatatatatgtatattttcatatttttatttaatttgttttttcctttttttttttttttggtaaactagtaattgtttttcttttattgatgcagtcacatttgtaatatttattcgccagtctatgtttcaaatcaaatgtaagaactattaactccttcatgatacatccttattgtatgtatttcatagttcgttttacctaataccttttgttta

SEQ ID NO: 228015 - DNA, 1645 bp, Cannabis indica
gatgatgatgatgatgatgactgccgttgtttgttgtgataactgatcctgctccacgagacaggaacataagacagttggccatggttaggttttcaagctctctgtctgttatggatctcttcataaaaaaaaaataacaaacaaaattgggtaattggaaacaaaaaaaaaaaaggtgtgtttggatgttttcaatatgtgattttttttttttttttgaaacaaaaagaaataatattggaagatttattgaaacgtttggtgtatttatataggggccaagaaagaagtaatgttagagtttgttttttagtcaaataatgactttgtcatggttgactttttagatatttttgacctttccttcaaataaaaaaaattattacaataaatagctgggtttaatggttttattgttattatatattattaacgcataggattaagaatcacgtaagcatgacactgaataagtgggtgaggagaataagctataaaatttgagttatctagaagattcatacgattcatatgagtattttaaaatttggactactagtttgatagtatataaacttgctttttgttgatatgtttttctttggtaaatgaagctacgtacacttgatgatcatgaggtgcacacaggaaaagtatgtaccatagccatatatatatataaataggacttagacttataatatacgactattcctctatatatatataagttacagaatacgtgtaaggaattttattacttgaaatagtagtaaagagatattattcaactattgatcgaactttccatgtgaaagtagtaaaatgtatatgtaacttttcaataattatatgtcatgcggtacgtattactaatcaaatacatgtgaactctatgtctctatatttataacagtaaaacccatataatcaaacaatatgggtcacgcgtgtttctatactttaggacaaatgaaaatcatgtaattcatgcattaaattatatattaattttattacggtcgtactattttaattgttaagggctcgtttgtaacgtcgtattaggtcgtagtatattgtattatattaaattgtattttatacaatatttttatgtaaaactatatgtagtattaacttttatggacacctaaatatataatattttagtataaattaaagtttaacatagtattatattaaaatatgatatataattcaattcaatataatacaatacaatacaatacgacctaatacggcattccaaacgagccctaagtgtcacctcgaaaatacgttaagacatatcattgaaccacgcatttaaaaaaaataaactttatatttttcccttaaaaaatacttttatttgtttaattaaaaaaatgatttggtttttttattcaaatttgtatagtattaattaaaaaataaaataaataataattatttaatatatagtttcataatatatcattccatgtttttgagttgctatttaaagcatatggctaaaataaaagagcattgctattaggcaccagtggtgcccagcacccttaagacgtgtcgtcttgcgattggctagcgatactccctaaaagttattatattaaactatatgagactcgatact

SEQ ID NO: 228016 - DNA, 2752 bp, Cannabis indica
gcactactccatccaacaagtgacgcgtgaacagaatgcaaacgcagactcattagctaatacaactaattttgacactctcggtggagttctcgtcacatacctagccaaacaaagcatcaacgaagattaggagcctattgtcatgatcgaaaaattttacatcatggatgactccgattgcccaatacttagaacaaggtattcttccaactgaccgaaataaaactaagagattcatgtccaacaattttagacatgaaatataatttttaagtccaacaaagctggaaatgatacaagcatcccaatgggtcccatcacatccaacattgttggacatgaaaaatacctctttcatggcgttgcatatcatatctatcaacaagaggatgtaaaagagctttcataaccagtttgatggtcatcaatgaccctttctgtaacagtgtgtaatatattggtatgataacataatttaacaattttatgtgtccatttaagataagtattacctatgtgatgcaacatatccatacacttagggattttgacctccttataataatatttgatattggttaggagattatcgtcgtaggcatgctgtaacgaaaaggagaagtttaaccacactcacactcaacttagaaatgttattgaacgttcatttggaattttaaaagcaagatttcaaatactagataagatggctccatatgattttttacgtccaatgagatattattattgcatgttttgcaatttagaaattttatcatgaaaaagtgtatcaatgatgaattcttcaatcaatttgatcaacctcaagtaatcattcctgcaaaaaaaaaaaatgtcaagtaatctttgaggaaggaccagaaaaaaaaaattggaggaaacaaatggagccagttggagagcagaggatgcacagatcatgaaaaaatcgaggaatgaaattgcactaaagctatttcaaaaaagaggaaacaatacatattttaaatttcctaaaattaattatgttttgtatttgaatatttgtacattttttaaaatataatttaataagttcattatattatgtaattttttaatttgtgaataaacttctaagtggtggaagtttctttggaagctctctcttcctctaaagataaagaattttgtatgaaaagctagcgtgaattttatcccaatttatgctaatttaactagacatgaaataaatgcttctaagatatgtcttatttgtttacggaacaatgaaacaactctccattccttgtggttgtgtccttcctttaaatctactcggcatgggtagggtttgaggggcttggatagtttgaagatggcatctaatttctatgaacttttagttggggttatggatattttgtctaaagaagaagttgaagaattttttgttctttgttcgagaatttggtatcgtcgcaatacctttgtgcatgataataagctgatttctaatgatatggttagtagctaggctcttagctatctttggtggttccaagatgcccaacaccactctgatcgatcggtcctagtgagttcaacacagtcttcttcttgtcatatagcgggagtgagtcttgagttaaatttgagagagattaatttgtttgtggatgctcacattttctctaaaaggaagaggtttggcataggagtggttgtgtctcatcccaatggtgatgtgctttgttatgctgctactccaaccgatggcataattgaaccgcgtgtggcggaggcttcagtcctgctacaaggtcttcatttttgtaggcggtataatcacatttgtgtgttttatgactgtttgcattttgtaaattcagtctctaataagatgaaagtttagaatgagtggtattgttattaatgatatttttcatgtttaaaagtctttctctcatatttcttattctcattgtaagcgagctaataatatttttatacattctttaactaaataggccctcactttaaatgattttgagtttggttgtctaattatttgcctaacttattttagtttttcatgcttgtaatgatcgttggatttatgtagctttatgcctttttaatgacattattcattttttccaacaaaaaataaacactaaaaaatacattcagaaattaagaaaaaaaaaactgtctaaaatattttaaaccaaacaaattgaaaatgtcttgatttaaaaaagaaaaacaaatgcaccccaaaggtccaaatatatgttacttaggcaaacttaaatttttagggaatctctcaactttctctacaatagaaaaatcaaaggtttcccaatgtgaagcaaagaggaatgtgaattacaaaaaaaaaaaaaaaaacaaaaagtatatctcttgttatttctattttagggagataattgtccttattattaatttatctattaaaaaaatgacatctctatttcatgcaccttaaattaaaagttatttaaagaatcgtatcaccatcctcttctccctctctttctttgatttttattttttttgaacaatctctctctcgttttttttcccagaaatctctcacaaataataataatatttgttttcacaacaaaaaaaaataatatttatttttaacaaaaataaaaaaataaaaattattgaaaaattgtaccaaaccaaacacggtttaaaagtattttaattttttgtatcacaaagaaagagg

SEQ ID NO: 228017 - DNA, 2245 bp, Cannabis indica
tcaatcacacaatataaagttgaatgtaaaaaaaaaaaaaatcaatatttacaagcttcccctgcatcgaaaacacatttcgactggatagtgcttgggtttcctagaatcagggtaaaataactttcactatgactcaaagagattactatatccagtttgtacaatctccaatcaaaccaaagagattcatacatgaaattactctaagtcttgaacccgcttcaagaacatcaatctaagtccccttagatcttcaagagccaagatccccttctctttatctgccgaaatccctttagatcaagcaactcaagaaattcacttctctccagaagtttctcttctttacaaaacctataacaaaacaaaggagaaagaaaaatgtagcagagcaagaatcaaagtagtgattctggcaaacatgacgagttagttagaaaaagcttaacaagctatttatgaccaatactctattaacaactgacttatccaactgtaaaaccagctcattgcacctggcaatgaactgtaccaaccaaaacaatgaaactcgaagctgacctgacaaactatacaacgttcccaaaaaccaaatcagatgcatctaactgatcaaaagacaataatttaagcaacataatttgccactattacatgtggctcttacaatatgaatatgaattcatctcatgttcttttatgattttcttcaatatggtttaatgatgacactatagcttatatatgtcatgtactacttaattttacctacaaataaattaatgtacatgtctaaacatctcacttatgataagtttgtctttttaacttttttcatgatagtttgatcacaatgtgaaatgatgaccactagtagtttgagattaaaataacaaaacttaaagaaagacaaaagaaaacgacaaattatggttaattagtttaattaaaagaaagataccatatggagtgctccttcctataagtttcttatagtcattgtctctttcatttttactacaagaccaaataaggaccacccactttattataataataaccatagaaaacatcaaaagaaagatgataactttgcataaaaatattcaagtttattacaagtgcaaatgctgtagatatatttaatgacaactttcaaacttaaagaaaaagaaaaagaaggcatagatatattcaaatcagcatgtgcatcagtggaaatcgagaaaataaaatatgtttaaattaataccattttaacaccattgcagtaaataatattagagagtatacttagtttgataactggtaagcttgaaacaagaagagaaatatggcggtagaagaggctgttgtttcgtttgtgattgaaaggcttggagactttctcataaatgaggccaagttcttgtatggagtcaaagaccaagtcaagaatgcaaagatcaagctgcaatgtatgagggctttcttgaaagatgcagatgcttttgtaagaaatggtgatgagagagtaagccttttggttgttcaaataagagaaaattcttatgccttggaggatgttattgaaacttatgtcttcaaagtggcttcttctaatcatggaactatcagacgtgcactaaaatggtgtgttagcattgttgatgtgtatagagttggatcaaagataaaggagatctcatccaacattgatacttggacgttgcaattagaaagatttggagtacagaaatcaatagacaaggctgatgaagcttcgtcaagctatgtccaagagcgaagacagttgaggcaagcttattcttatgttgaagacaaccatgttgttggattcgatgaagacattgaagagttggtagcccttttgactgaaaaagagaaccctcataagcataaggtgatttcgatatgtgggatgggtggtttggggaagactactcttgcaagaaaggtttatcaacatcctcaagtcaaagaacattttgattgttatgcttgggcctcaatatctcagcaatgtaacagacgagaagtcttggagggaattttacttggtttcacttctcctacagatgaacaaagaaaccacataaaaaacttgagtgatgttgaattagccaagaagctttatgactttcagaaaaagtggaagtgtttggtgcttcttgatgatatatggactactacaacttgggatcttctaaaacatgcattccctactactcaaggagacaca

SEQ ID NO: 228018 - DNA, 2083 bp, Cannabis indica
caaaacgttgtgttggggaggaattcggaggaaaaaaagagtaattacatatacagtgagtgtgtttgtgtgcattttcttgctacatacgctctactaattataagtcgcatgagtagttgcagctactatataaaccacaaacacaggttacatttttatgtttatttatgaaaacatgcatggtgcaccctaatttggtatttttctagactcagttatttctagtttaaatctataatttagagaaaattaatgtagtgtacatgttagaaacacagacaaactaatcaactacctctaattttgtttttgaatggaatgaatactataactttgtatatatatatattggttctgtataatttaattagatttacatttgatccttaatcagcatcaaagtataattaattaattatcctagcgcatgcatgatgtgaaagatattgatgtgtttgacaacatttgtgtgttttataagtgaaatattataaaactactaagatctaaattaatgtttttgaagatctccatataaatatttcacttttgagttaatgaattatatacattaatttagtaagaagatatgggtttagtttagcttgccttattaagattgtttgtttgggaggtcattatgttttttatatataaaaatttattaatacaaatcatggtcatcactttgattataatattgtatcttgaagtcctttctttggccatataagatatgagaatcatagttagtgagtgtgtgagagagtagtgtgactgacatagtacatgtgattgtgaagagagtatgaggaccaaaattaccattcgccaatcgaggggagacttcgcacgcttctcatcacaagcctagccaatagcaaacactccctgcacgaaaaagggcaacaacttgtgctacttgtctcatatatccaaaaggagtaagacacttggaaaccatacatacactataatatatatatatataattaagaaaaattggtggatgccaacatcataaaaggtttggtgactttctccaaactaaacttttcattggctacaacccatgtggggatggatttgttagaccaataagattctatttcctcagaggcgggtcccttggattaagggcacccaaattaaagattagactaaactagtatattattaaatggctatatgtattcgagcttggccaggtgtcaatcatcaacaaatcataggagaagtggaccaaacaaaaagtgattcaggtgagcattttttggcattagtttatgatcccaccaatggaacagttttgcttctttaatattgtgttttaattagcataatcaataataatatatctaatgcacatgagctttatcatgactttcgattagttttcttccacccaaagccataaaaagaattggcctttattttggtaaggaggagaagtagtgtctctttccatggatgaagcccacatgctcctatggactgaaaaacaacaatccactgtacctcataagtaactatagtgaaccttattgatgatttaattttagaaaatatatttttaaatattaataagaaaattattttaccaagatgatttttgagtgaagtatttgttgtaatatactcccgacctattttattattatttctactagtcattactataaaaaacttctttggatgtccattaaagttgaacataatcataagtttttgctatctattttatgctggatatgatatttatggacttgaaaagaatattttttaaaattttttttcaatattatacttcaaattgaatttatttataaaaaatactttcaataaaattataaacacaaaatactaaagtatgtcacattagcatgaatactgaaatctgaaataattattgaaataaaaaaaaaaaaacttaaaaaaatctcgctttcaaaaattacagtcttttgaaagttttaaaaaataacaatttagtgtttttgatgtaaataatatatcaattagttactttttatttgaaaaagggtaaatagcggtcataaaatcccaaaaacttttaatg

SEQ ID NO: 228019 - DNA, 1753 bp, Cannabis indica
atattttcttaaaaataatgtgaatattgtaattaaaaacgtgtattaaaatcatccgtcaatgctaaatgacaatgttgtaaatgaaaaatgtacatttaaagatgtgccaaatttagcagaatattatatcttcggccaaattttactcaacttttagcatgtactaaatttgaaacaacttttgccattggagaagcattttttgtaagtatagctagacatcacaaatttagcactccattggacatgctctaagacaataatgcatacatagggggtaaaaaatatcattacaaaagaagcatgaaaattacccattgtgccctccatgtccaccctttggcaacaatttcattttggcaaaaggcaaatctagatcatcatagatctgtaaaataaaatcaaaaattgaagtggtggaacaaagcatctagttaataggacaaagtacatctcaacacaaagaaattaagaaacataatagtaaagttaagaagagagaaagaaactacataccacaagtacttgcttcagtggaatcttgtaatatgaggctatggctccaaccttaataaacgggaataaaaaccaccaaattaaaaattacaagaaaaacaacattgaccacttgtgcaaatagaattcaggtagcaacttacagactcaccgcttgcattcatgaaagtttgcggtttggcaatcataactggaacatcttcaatataacctggataacagaaccaccctatgaaattcagtatcgaccaattgaaaaggagtataaaatatgtgggtatattgatcctctaatggcaattgaaatacaactatacacacaaacatcatcattcagctaatttgtcagattgtgcagtgttaactttgcaagtagaaacaagcaaagcacgcaatatacatatataaaattggcatactcatgcatagtgatcccactgaaaacaaaactgtttccagtcaataaggtccccaacaaagtcattcgcaggtataatatgctatggttaaaagcaaatatcaacaacggcaaacatatatatctagtaaaaggttcggaacctttgccaagaagagctttgaaagaaacactggtaacacatatcccttcagcttcagcaacagcatctaccaattcaaaaccaacctacaaatcaacaaaaccagttaagaaaaataaattataaaaacacccagggcttgccaaattctctgaaagcaattggtcgatttttttcgtacggacattatggcgagttccgttgtacttcttgccggggtttccaagaccgacgatgagccacggcttccgaggctgtttgggctccggagacatcgattccggtgccgaaatagaagcggtggtcgagaatcgggagaatgttgaacgagtaagagtagccgttgaaaggggagacggaactaggatttcggaaggtcgaaagctatggcggtaagcaggcttgcgaagggcggcgattggggagagcgagatacaactaccgacaacaactctcatatttgattttacttttagtttgaaattgtcaaatgagaattgtacactacaatgagccaagcgaggtgggcgccgccgagtccccggaagttcagtcttgcaagttttgttggggttgggattggggtattgttgtgcgagatgagtgggtgggggggttattttgatacttaaatttagatggtatactagcttttgttatcttttataaaaata

SEQ ID NO: 228020 - DNA, 4043 bp, Cannabis indica
aattattttttattaattattatttagaccaataatgactcaatacgtgtctgtcaaatttaaaactaacgaacttacaaaatatgtaaccttgagaactattattgttatttttcgaagttggagattaatctgcatcataaactttttaagaacttttatcgcaaatttccctaactaaaaagtacatcccgtccaagatagatttacttgtactaaaaccccccatttaaccaaaaataaataaacaaataataacataaaataaaattgaaacagattttaaaaccatttttccatcttaatatcacaagggaaagaaaagaactagtataaatgtaacgggttaaggttacctaatcacaagaaagttttgtacatatcaagtaaatttgtcaagacaaggcaaaacatgataattacagaaaataaagtaagaacatgaagactttcaaaaacagaagatgtgatcagacagcatgccttaaaaggaatatatttacttataaacactgctctttctttcttctcctccaagacattggctccatattatagtcctagctaaagattgcgtaattatcattccgtctggacttatcggcctgaaaaagcaatacaaacacatcaaacaagcctcaagaatcaagatacttataaattgcacaaatacaatgacaaaacacaacgaagtgtcattcgttagctttacatgaaaatttctgacttagtgtacaatccataaatttctacctgttttgtttcattttctactattagcttggtttaaatcagaaacactaaagcagttatagatagtagctgctaatcatttatctatataggacttaaaaaagcatgtctagcagtatctgtgaccctgtaaaaacaagcaaaatcacacattggatgatgaggaaatacccggtgaatgatcttttcaaatgcatcaggtccattctcttcaatgtatttctcggcagcggtgagaatatcatctggtttactgaagacgtccttctttcgtgggacataccagatgttaatagtgtgagggttaacaaagaaaggtctaacaaaatgttcataaacatatgctgccccactgaagtacggtatgaccaaccaacaggtgacaataagcttagcgtatgaccagatcggtatcctgccataaacaacaaaaaagtttaaataggatcaaaacccagcaaagatgaactcttttgcataaatgttgatactacttatggctatgaggccattcacgagcacagacaaatacgaaataatacaaaatttacaaatccatttaggcactcaacttttcaaatatgataaatataaatatatatataaatgcagcacaatcaaatagctaataaaacgagaaaggtaaagcaaagattaaccattcaataactttggcaaaggtgagctcagttagggtaatcaaggaataaagaacccaataagtaagccattgttgatcatcaattggggatttggtctcaattgccctgactgaggcatatctgcatcacaaagaatcccagatcaagataagaatcaaaaagtacatccacaaacattgtaaacaaaccagcaaaaaaaaaaaaaggtaaaaggagctagatttcgacttacagaggataaacaagactaaccacaggcctgaaaagcacaaatcaaattagcaaaaacaaaatgtaaaataaacaattaactgtaaaactaaatgcattaagcttaattacaaggaaaattagaagaaacaaaatttatcaatacccggcaagaacatcgaagtttttgagaatcactttgaggaaacttccagccccagatcccatctccggtttctcaatgcgtatcttagtctgtgtctggtcaactgattctgatcgaatgctccagaagaagctagagcaagggtttcgcttcttattgtgagctcagatgtgattcggtaacgttactctatcaaaagagatagagagagaaaagcgtgtctgtttaaaagcagaacaaacaaaggtccaaaaagcagaagcattaaactactgttgaaatttaaaaaggagatggggaagtgatcccctaccaccgggagtaccatgctccctcattggagagtcgtttgtagtctcacattagtttgacttgtgttgttacgattgactatggtgggtaagatccggtgaccaaactcatctcaagaactatagtccaaatgagtcattattagtggtgatggggtaggcaccaaagtgtctaatattattgggtttagaattttactgaaataaaattgttaaacttttattttagtttagattaactttaattggtttttattaaaacttgaattaattggatagttgtttgttgtattatctcatattgttagtgatcaatagttaatgagcttagcatctgtgtttataaagagtagactcagtctaactaggtttatgtagctaagtctcctccctaactctataaatatatattgtctcatcacagttatatactttttgataattagatagaaattaaaactgtttttaatttagatatctagagaagaagacttagctgatagtattgcactatcaaattattataattgttattgatcaatcaagtatgtattcataattattatctaatctaattattatatacatgttatagtatttttattatatataaattctatatcttgggattataaatttttctaacaagtgatatcaaattacttattctatatgattcaggactcataatttatttaacaattgattgatatatgttaatttttttaaattacacattaatttcgttattattttattttaaaatttttatgtattgatattaaaactttaggagttttgttccttatcaaattttctttttaatgatatattatatggataaaattattgaatatattttaaaaaatttgatctatcttaactatgtaggctctacgagtattcttactttcacatctttttttgaatgagaagagaaaacttcattaagatagaatagtcaaatcggcaattacagctttgttaataacagtagggacattactatcaacaaaaatataatatcaccaataacaagcaccgtgagcagcacaatgggtggcgttgtttgcagatcgtttaacataacaaacttaagcatggaccatagatttgattagtttaagacaattagcaatagtagaaccaaaaacagattgcatttcaacattgctttcaagtgcttgaaccaccacaagtgaatccgtttcaacaatagtgtgctgccattctttctttttaacccaacttaaagcctctttgacacgaatagcctccaccatgtttggatgaacacagacagctttgtgcaagcaaaaggcctcaatcaaacgaccatcagctccacgggcaaggccacccacaccaaatgactaagatgctacaagcaaggctccatctacattcacattaacaaaaccaatatctggtgtagtccattgctcaccactgctgtagttacgcaataatgcaggcagcggctcaaaacgattcgatcgagcaaaaatctattggctaaggacagaatgtgtagatgcaacaacatcaactgcaacattaattttcttgttccataaaaagttgtttctagtcttccaaatggaccaagaaaccattaaagcttcctcaaacattgtaggttgaccacgacttaacacctctagcaaccagtcaccaaaattagtgacagaaaccatgccaagtgttacaccagatctattccaacaggaacaggaaaactgttaagaaaccatcacatggaagattaattcttcttccttggaacataaaacacagtgcaattgcacaggaacatgcttagaataaagttgtgtctgagtagggagacaaccagtaatggctttctaagaaaaatgaatgacttttggggggactttagctttcactaaaaagcgccacaaatctgactccatactccta

SEQ ID NO: 228021 - DNA, 2164 bp, Cannabis indica
ctttataataaatttattagttagatatattctcttataaataaatttaaaattagattattttttttttgataagccttatttgattaaataataaacaatattagacctcctagtcattacaaaatagttcagtaaaaatagttatatctggaacaagaacaactctaaagttttggtgggcaaaagctcacctagccacattagattaaattttatgcattcaaacattataattaaatagaattacattaaatttaattttatcattattatttaaattaataattaaataattattttaaacacataaatgtttgaggacaacgttccctaaatatgactgagctttgtctcctgtcctgtccaatatgattattagtattagtaacctaatattccggaattgattaactctaagcctataaagttcttttttcttcataattttattttttgggatgtagttataattctttatagcaagaatctaataataataagggcacgcccgagttgtatttttttctccatttgaaattgtgattggtcaaacaaaataccctttcatatagcacaaaaagttggagtttcttaattcttatgtagagatgtccatatataggtggtaaaaattatgaacattattataaagatttatgaatacgtttattcaaattaggctaaagaaaaaagggaaggaaaaaaaaacattttagtaattggtcatgttttggcaagccaaaagttataacattggttaaaaggttgaagagagtttttgtatgtttaaattaaagtcataattccttcaccaccatatagttaattaactattatttgaatgaaagagtaaatgatttggttcccaaacaaccaaagaaattagaaagtgtttgatcatatcatatggtgtttagatagagaatcttataacaagaatgatttgttgagttgaattaacaaagtttacaaaaagataagctcttcatttgcaactggtaaagcttatgatcataattagcttagtaagctaattgggtatgatttatttttttgtgactaacaataggagagagaaagagaatggagttgtaggtattacttttatataagggcatgtgtggagggtattaaattatggtgtatggatgagggctttaattttatttttgcctttatcatgtggccaagatgcttttaatgattagtgtgagaaatataaagctctgacaagttatggtagctagtatggtagaaggaacagaatgttgtcaattttgggtcataaagaggttgcaaatgcaaggtactcagccccttggctcctataataagtatagtatatagtatagtattagtctatactcagcttttgagtattcaccaagttaaaaggacaaggttagacaacaacccataaagaaaaagagaaataaattagtaaaaagaatgttcacactttgaggcagcttctgataaaagtatgaagtagtgtctcaatcaattcaatgccaaacagtccctatagttctatcttgtccattacacttatttttttttttttaccttttcagaatccttcaattaattacggaaggtgaatcttagttttgatactagtcccactgagcaagccttgcaatcttttactgtgcattgttactttttttttttttttctgtgaaattttattttgtaataaaatgttaatattattgatagtaggtacaacgtacatcttacaaagacgtttcataaaggaatatattttgggtagcaaacataatattacggaaaaattatgggcatacattgtcgaaagtgattgtcgtgtttaaccttttaatagttcattgtgatggcataagtttaggatcgtatttcttttttattgatttaatataattatatatacaaacaaccaagcttgtacgacaaaattaaaaatcaagccataatgctaggaaataatgttaggaaataaaaatatatgcctatatatagattatcctataatcactactacaaaattgggctttagaggcggtttttaaggggttttggcgtcggttttggcgaaattcgctaccgacgctgttccaggtgacgctatagggtttaaaacaaccgacgccaaagggtccctatggcgtcggttttt

SEQ ID NO: 228022 - DNA, 3190 bp, Cannabis indica
gaatgccgaaagcattagtggcatagaattttacatatatcaatataaatgtttggtttacattatttgaaaaacgtgggtaaaatggatgagtcttatatattatataatttaaaagttacagtgaacaaaatagtaagcagtacagtgagtaactgcattgtgtattaaaggaatggaagggagaggttatgttgtcatcaataaacccgagctgtgttatatcatcataacatcatacatacatatatatataatagataatctctactctgtagctagttgtgttttataatatcatcactaaaagtaaaaatggcagccaccagcaatgctttgaagggtaagattgagattgatgttgatatcaaggcatctcctacaaagttctaccacatgttccggaaaactgctcacatcgttcctcactgcgccggtagccatattcaaggagttgatgtccatgaaggtgactgggagagccatggctctatcaagttttggaaatatacagttggtaagcctacctacctactatacacgtatccattccttgttatatatatatgtattattttgtgtgtgtaaattaattaattgtactgtacatatatatgtagacggaaaagaggagacgttcaaggagaaggtggaattagatgatgagaacaataaggtgagtctaattggaattgaaggtgatgtgttcaagcactacaagtgcttcaatgttatataccaggcggttcccaatcccaagggcgagggttccttggccaaactcagcatcgaatatgagaagctcgacccttctgttccaactccaaacaagtacctcaatctcatgattaacatcaccaaagatatcgattctcactttgagaaggctgcacctcaaactaagaccgttgtttggtgaaaaatgaattaatgaaaaacaaataaaaggggtccatatatatcgtttatattatatgtgtgtgaagaaattaataaggataatttattttatccatattcagtcactcgagcttccgctgtctctactacttgcatgtactactatacaacaagctatatatattggtcactatttaatttcatgtaaagctaaaatgctctatctgatgtcattattagttgatttttcatttggtgagacctgagagacccatatgtatgtttcgtcatgacgtacgttattaccgttattatataaaaaatatttgttgtgtgtttcacataaatatatatttaatattgaaaaaatttatgtttttcaagatttttgaaaacagatttaatatatgtgaaagttaaagagattgatcaaagataaagaaaataataataaagattttattacgtaattgtggcgttaatgagtcttaatccacaggtcaatattattactataaacctagaaaaaatctaaggtttttaagaatgtttgaactctaaaccttgcttataagcaattgagaaatgagtttttaaccctttgcatgaagggttcttcgtgtattagtttatagtgtttatatggttcttgagtattagtctttgcccactaatagggtaattacaagtaatatattgacatggacttatctagtgaagcctggcctatgggcacaccatgtatgtcgatgtggatgccacattatgttaacagttgtcaaaagatatgtcatatttttgtaaataataatgagacacatattaaatgtttgattgtcaattactatcttcctatatttaggaagataaggtctttgaatgagatccttaggagttaattcttgatatggtgggatttaataattaataaatgggaaacagtattagacgtctacagaatgctcgctgatcattacttctcccacccgctgtctaatgtcttccggacgcataccatattgctagacggatatctcgcctggacgaatcttctactcatcattcgaaaggattaactttgcttgtggacccgatttaatatcttatttgggcctgttagtggtcctaaaataactaaattgtattcgctgttggaattccacttgtccccatccggaaacacatataacatttaccctaagcttctagaactctaggccttgcgaaaacttgcactcttgctcgcgaatggacaggtagaggctaaaggtggatcccttaggaattccatactgatcttgtttgtggttgacaacttttcactttttgaaatagagcaacatgtcgcattgtataattagttcgaggaggttgttagttttgtggtactaaatcaggtatgcagcaacataataaattttgattattatcgtaccatattcttgagatcaccacatgaacatatattaaatctgaaataaatagattaaaagaaaatttacctcttgaagcctatcatggtatccttatttttttttttttttttttgtaagttgtatccttggatgatgacgaagaactcacactgtagtcttttgaatcttccaccacatacaaggactagtatgggcttgaaggatataatgtacatggagttcttagtttaattctcaacacataagtaagaactctttttgtagtgatgatggaaaagagattaatctgattaattcttttaggcttcccaaaaattaatacgtttttagttcatacagtttattttaattaaaatcatttaaagttttattgaattaaatattttaaattcgaatcaattattcaatcacatttgatcgtttgaataaatatttataaccgattctattatagaactttatttcctatatccgattgagaaattttgtcaactacatgagagaatgtctcaactatttggagaacaatttgaggtaagaccttaaatatctataactatttttcaaattcaaatatttttttttgtattaattattcaacccaaaaaccaaatccagtggggacatccctacaatagaggcgcttgtcactgtgtcctaacacagtgcaggtcgtggtccctatgtcttaacaagacattggatgtatcttttgtccaggctaattttgtcttttccctaatttatttaataaataaatttaaaaattatttattaattacaaataaataattactaacaattcaaaatagatttttttttcgaacttccatatacaacttctatctctaccc

SEQ ID NO: 228023 - DNA, 2183 bp, Cannabis indica
ctgagagtatacaagaatgtcatcgataaacactataacctagctatcgaggaaatccttgaacaccctgttcataagatccataaaagcttcgggagcatttgtcattccaaatgacatcaccaataactcatttatagaatatggtgtcttagaaaagacaaatgtaatccactacgatgacatcactataaatgtgatagttatatgatctagatttaatagaatttaaatattaaacgtataatcacatacaaaaagggtgaactaagcaattgattacattataaatgattttttcattttctttattcaattaacaaatgagattacatagaacaagttttatttagagcataaaatctaacaatttcaagtagccacaatattcttcttgagtcaaaactaagtttctcatcaccaaatgcatgtccatcaagaaagagagcacttgtgctcgggtgttcacttgggcattacctaagcataaggccacttgagcaccccccatccatgtataacttgaaatcctttttaatgcttaaatacttgtgttgacatccatttgaaggtgcttgagtgtacaagcaccaaaccctagacatggttcacctaggcgcccattggctgagaggagctcacctaggtgttggtttttttgtagaggcctcacttgggcacttgttacaaggacatcactctaaattttgtttcttagttacataattatattcacattgagaaccaagcctagaaatcataatgataagaaaatagcccaagaaatgcggagttcgcctaggtgcttagtaagttgtaggatgctcacctaatcttgaataaaatatggtatgaatttaagcacgatacaaaaataaaggtcctacactttcaaaatattagcatgatatattatgatctatattttaaaaagcatgaaaatattacttattttcaatcaatacaagtaaaaatgttttgtaatgacttgatggtctaaactctatttatatatgaaagctttttgaaaaaaagaaaaagaaaaaagactcaaacatgaaagctaagaatgtatatacttatatctatagcaaaaatgaatacataatacaacatagtattttgagtttgttgggaattatagatcttcaatagaaataatgatatgaacaatattacaactctatgatcaaaaactatagtaatgatttaataatgttcaaattatattgcaaacatatttgtaaaatgaaaaatatgaaggacgaagtaaagaatcacaacttaagataatatgcaacaagtaaataataaaaaacaaattgcacaaaatataaaaaagataccagagtaatctcaacaccaaaaattacaagtaacaagtaggagaattgtcaaacttgaacaaggtcttacgtctttgtccaaaaatttatttattttcccctatcataaacacttaaagaagaaaagaagtgggaataattttctaaatttattaagcataaaatatttctacaagtactctcttaataaaaactaagttgtacaaaatgaattccatagatgtttatttatagtgttttagtaactacaaatttaatttcaacacacatcattacatggatgatgtcaacacataaatgagtgttttactaggttatggaagatggactcaaacgagtgtagtaacatccttttgattcccatattaatttgtataatatatcacctaattaattgcacacttaaaattgtgataaaaagttacaaattggttattgattgtactcctattcttttgctgctttgaacatattaaactatataatatgtagtttattcaccatacatataatatatatatatatattaatctgacattaatatatgtgtcacaaattttatattttaatttacattaaattatttattttatattattatgtctaatattaattagtttttttttattatttaatgcactataaattttatttttttctttaagaaaaaaaccacattttaatctttacaaaaaaaaaaaacgacaggtactatactccacccttgttccatccatgtgtcgtctttgtgtctcataccataacacatgtcttgtcacatcaccagacatgtttttcttattatttttgtcataatattattgttattaaacaatt

SEQ ID NO: 228024 - DNA, 2283 bp, Cannabis indica
aacaaacgtacaataataaaaactacatacaaaagatctatcttttctagtaaataaaaacttaaaacttataaaaatatttaaaattccatacaaccatatttttataattccttttttttacatttttacgaactattattttttcaatttttttttcagaaaaaaaccaatgtttattttagaacaaccaaacaataatagtctgtattttggtaaaaaaaaatatagatccgtgtaaacttttgtcagagtttatgaaataatctcattaatctaactatgtaattgatcataactgtgatttttatcacacttattaagagtatatactaatttcatgaaccaactacccttaagttgaaacttttaaatatgaaatgtaagtacataagtgcatttatatatatagtagacatacagttgagttatgtggcaaagtgagccatttttgaaagaacaatcacatttgataaaagggttgaaagtgagaacattgaaatcagtagagtcaatggctgctccactacatggatcctcacttgtattccattcaccctttattttccattgcttaaacatactattcaaagctctcactgcatatgtaatccaaatataaaaatcatcacaacataatatattatatatatacaataaaggcttcaactttgcataatatatataccttcagagggatgagttgttggttgagttgcattattattctgggcacttattctaaaaggagcaagaacaaagatacaagagactattacaaagaaattagtaagagtagatgatgatgaagctcttgacatgatatcaacttaattactttttcttctttctaaacttaagctaaagttaataatgcctgaaaattttgaatggtatatagagtctaatgtttttcaggcataaattaatagtagtagtaataataataataataataataagttttggatccatttttgaatggttgactggccagggcaagttgacaacaagattcaaagtttattgtatataaataggaaaatttacatcaaaaaaataataaagaaattaattacttatttgtcatatgaagtttaatattatacctaaattttaataataaataacataaataacaaatatttataatttattctcaacctaattatactcatgttaattaatatacttcttttaaaaatataatatacatttcttctttattattagataaagaaagtgttaaaatttattaattgaacgtaaacaattactaataatttttttggttactaattgatatttctatttttttgttatcttgtttttagctatgaaaaaatcttaaaagttatcaaaatatctttttttcttcataattagctagtattattccacacagtacacttttgttgtatagtgatatgtattgaacattattcaataatgcatgctggtttttacagtcatccaaaatagtttgtcatgatatgaaattttttattattataaagagtgatatgatattttataagggtgcgtttggaagtaactgtgtaattactaggtagggtaattattagggtggtaattacacagtgtagtaattacactatattttaaaatgcaatgtgtgtttggatatgaggtggtaattacatatgaattcctaatattttgtttgacaaattagttagtaattacataggaaaataatatattttagtagctaatatttaatatgaaaaggttttagtaattacacagtgtaattacatttaattctcatggggggctatgagaattggagagtgtaattgcattacttccaattacacagttacagtgtaattacatggtcagacaaacatgctaaattatgtaattacctccaattacacacaaatctaattacattatgtctttccaaacgcaccctaatatcatatggtattttataataattaattggtatccacaaaaaataaccctattatttttttttctgagaaaaaattctactaattagtatctaaatatttggtttaattagtaattgttattcaaaaataactataaattagtatctaaacgtttagtttagctactgattgttacatatctaatcgtaatctttcttttttaacataatgtagcgtttgtattaattataagttaggaacagtattatcaaaattatatatataagaaaaattgtggttgttaagttatacataataataaattttataaatgagtatattatttattttatttttt

SEQ ID NO: 228025 - DNA, 2528 bp, Cannabis indica
acctagagcaatcatcaacaatagtaatgaaataccagcctcaacagtttgagtgttatatggcccccaaatatcaatatgaagtaattcaaaacaatgctgagaaatgttgcgattgctaacaaaaggtaacttcctttgtttggcaaaatgacaaatagagcaatgaaaattagggcaagaacaatattgaaattgtaaagctttattcaatgaatgattctttacacatgaagcatggccaagtccataatgccataaattttcatcacttattttggaatctgaaatggaactaacaataggaagtttaggttcagaaagatagataagattcccaattctttcacccatcccaatcacttgattcttggtaaaatcctggatcaaacatttgttaggaagaaacaaaaatgagtaatttgttgaattggataaagcacaaaccgatattaaattgtgttgaaaatcaggaacacaaaggacattttcaagaattatattagacactttaatagttccaacaaaagaaactctagtgctaacaccattaggcaaaccaacgaattttattttgctattttcctggacaggatcaaacaaagatgaatcggagcacacatggtgtgtagctccagtattaagtatccatttagatttagggacaaaggaggtcataccagaaatattggatacaatggttgttctggttgttgaggttgcacctggttttcttccagattctgtgctaacatagccattaatttgtgacatttagcagccaaatcttgatgatcatgaacattctcattactgtcatgccctttagtacaattacctgaagatctagcttgctgatttccttgttttccaggtgtctcacgtggaaatctgccatataacttgtgtccaagaggatacccgtgaattctatagcacttagcgatggtgtgtccaggaacaccacaatgggagcaaatgggacgattgtcacctttgttatcaggtcgattatttccacgattagctttggtattcccagcaaattgacctgtgttatcactgacttgctggttattctcagattgaggtataacaatgcctctttgtttgtcctcctgaaatatgctagcataggctttattcacattaggaagtggatcttgaagcagaatttgagatctagcatttaggtaagactcattcagaccaatgagaaactcaagcaccttatcctcttcttcgtattcttgaataatcttcaaggctccacaagtgcacactggttgtggtctgtattattgtatcagatcccgtagccgtttgagtttagtgtaatatgaagtaacatcactagaaccgtgggttaatgtctgcatagacctttttacttcgaaaattctgggggcatttttctaatgaaacctttcttgcaattcagaccatatacaagaggcatcttccatatacattatactatctgcaatactaggagaaacagagttcaagatccacgatattaccagacaattacattgaatccaggaatcgtagttctcattgtcttcctcaggagctgggagtctaccatcaatgaactttatcttgtatcttgctgataatgcaaccatcatcgatcttcgccatgagctaaattgtctgcaccagtaagaatctttggtaccaaggatgaagatgcactgtcagcgctggagagaaaataagggctccgaggatcattagctggatatttattgttttcttcaagaactgcaaattgatttgattcttcagcagtttcattgttcctggttcgagtctacgttcttcctcctcgcgccatgaaaactagagagatccaaagaagaacaagaaagaaaaacgaaggagaagaagaacaggtacaagcggaagcaaaaggagctcaactaattgttggctctgataccattttagttgtaaaacagaggaaaaatggagtagtaaaaggaatgaatcttcattcatcaaaggggttcagtacaataagtctgtctttatatagaacacaccagaagcaagaatacaacagtagaaaataacagaactaacaaactctaacttcttaactaattcaatacactacaccttaatagaatcttgatacacttagaatcaacgtgtcctagcttatatagactagtcaacaatcacagctaataataaggattatttaggacaacagaccattgttgtaatgttgttatagataattaagctagtaattattttattattgtctatatatattcataccttttgttgcggcatagagagtaccagctggaaaagccactgttgccccaatagatgaaatgaagacaatgcttccgtttccagaggcttttaaaagaggataacttagttgtgagaaatggaacgcagactcgaaattggttctcatttgaatctcatagtcttcagcagagtattctgtaggagccctcactattgctaccccagcattatttacctgaagctcatcatta

SEQ ID NO: 228026 - DNA, 1216 bp, Cannabis indica
agttccaccatggtgtttaggatctggaccgctcggaacagtatgttttcggccccatcttagaccaactctttttgactcagatatttgtctaaaactctgagcatcactttcgcgagcttccaaagaagacacgaacaaaagagtgattgctatcgtgaccaaatagatcttaaaataagaatccatttttgtttttctcttctattatgtttacacacaattgctttttttcacttcttataatgttgattggaaaacatgtgtatttataggtagtgagctatgttgatagaggtccaaaaaaaaaaaaaattacaagagtattaatatttataatatatttctcgttttgtgattttaaaaaatctaccatagtaaaaataataatgaaaaacaaatgtttttgctattctttctatataattaatgagatagcatgcattagattttttatttttagaaaaaggatatgcatagattttgaatgtactaatatgataggttttttttcttttaataagtacacttttttttttcactttgctaaaaaaaataagtataactttttttttttcatgaaaaaaatgagacctagtaattatctctcaaatgtatcaacatttccatatgttaatggcacttttttttcctttaaacatttctctcctttgtaattaatgaaaattttacaaaaaaattatgtttttccatttgtgttttacttagaataatgttttttaagttttttttcttttttaagtattttttttttaagttttattatatttctaaatataattacttgtttgtatctctcttttcttacaagactcttttccaatttatttattttttccactttcacatttattattattattattattattattattattattattattattatttaaaatatttacagtaaaactacttaaaagttaaaactataatatttaaataattagttttttacggcaaatattgttttacttttattacccaaataattttttgcaaattattaaaaatgtattttaatttataaaaatcattaatatataatagcctaaattgtgtattagtttatattttagggaaacttacaaaaatactgaagtttgggttaacttttacaaaaatactgttacacagaaattttttcaaaaatactgtgtttttataaaacactagtaaaacacaaagcata

SEQ ID NO: 228027 - DNA, 2993 bp, Cannabis indica
aaagtggcaaaccaaaaatgccatatttttctaactttgttatgaaatcccatatttcatgtaattttcacttcattttactactctttaatttatacccacttttataagttatattcccattatgtgcattaggaagtctaattttaatacggtttgtgaggttatgtttggtactttgattataaaagagggtatttatcaattaaaattattttagagttatatttagttaatgtgtaataaaaaagggtagttttcaacttatccaaatttttgtttcggatctcaaaagcccaaacccaagcccaagtacgtttctttcacgctctctattttatgaattaaaatttcgtccatttctaacgatctcccgttaatgtctatgaatcagtttattttattttttataatttcttatcaggaatatatattcgttgagcaatttgtttaatttctatcaataagtaatttagggagaggacaatcgtggttagcgctatagttgtcaaccctcgtcgctgaagtcaccatacctgatgcctcggcgttggattcgatttctttttccgaactaagaattggagagacgacagtgtgaatcgttggcacatttttagtcagagggtctcgatcatcttcagatcaagcctggtatacttatactgtttataaatttttttgttcagatataatttacgtaaccttgtgcagctaaaacatttgaacacctaattggattttatgtaaacttttgttgattgatgaactccgttttactttcttcctcatggaacaattcatataatattttaatatcgattgggaacactttctctaaattagatctttttttgtagtaactactgttttcttactctttgtagtacttaattaataagagtgtttctaggcaggcaggggttctgtaaattttatatgcgttatttcatcaaatagtcattcttaactaccaaaactttctatattccaagcgagtattgagtagtcactggacattcttattgttattgttattctacttgagtagccagtagtagccaccacccaccagacattccgtattagtgcttgggccaacatgtactgcttgctaatatcttaatgttttgtaatcttagcaatgctgcacttgttcatgtaccaactctcagtctctcagggacattctaagtttggaaaaaaggaattcctttttattagtttttcttgtttcaatcaagcattcatagtggcaaatgagtacctttccatgtgaacagaaacttgaaaactttggagtatttgcttctgttttgaacgatttagggcctgtttgtcatggctttgaaagtgcttttttagtttcttctaaaaagctttgcgtgcaatttaaaatatatagttgtgaagtgctgccaactcttcataaatcgtgactctcttaaacattctataccattctctaccatgtctgctagttaaaacaacgctttgtaaatttgggaacttttcggttaaaaagaaaaaaaaaaaaaacttaaacgaaagattatgttctcttaagaggagaagtatgttctgttaggtgacaacaaacagcaagttctgttagataaatatatatatatatatatatatatataaatatacatataatgggtaagatacattgattgatatttgaataatggcaaactatttatggctgttcaaacatgtagctagctggtattgattgatgttgagcaagcttataataatatatggttgcactgccatcgagctctcactttccaccgcttttaagcttccccatatcagtgtttcaaaaaaaaaacgtttccccatatcaggtattttcttctattatttctaatttgctaagttaatattaatttcttttagcctgtttttgtatctcttcttcagccaattttattggactaaactcatcggtatttttccatttatcaattttacagatcttgaaaaactagtatttggagtcatggtgtacttgttgcttgatatttgttttatacattttagtttattgttttattgttaaatagaagttatccaagatagatttctctgttatctgaaaaatataacacaggtaaacatggttcttttgattatatatatgtgtgtgttggttgtgaaattaatagaataatattaaatgcgtatttgttattcttgtctgaaacatagatggttaggtagttttaggctttgttggtgtgtatgattttctatatcgtgtgctgtcgatgtatacagtggctgcttagtttttctcttaggttgttagtttgggtcaattcaaatcccattaaacaagggattgagcacacttttcagggacttttgtatgtgaccatgagctatcttattcttgttcaaaaaaagagctatcggatcactttgagccaaacataattatttagttttttcttccttcatgtttgcatatatagagattgtgcaagatcttatctatttatttgttctttaccgatttttttagtgtagtaaatgaatgaagaacaaaagatgcttgcaatgatatgaaatgaataaaagatgtagtgagcagatttgttttatctattcaatttataactgtagaaataaaaatagacataccgctgcagtttaatgttattttgatttttccattctagttgttatttctttaattttgttgggtgacatttttcgatgatgagtgcttataatttcttggtttaatttctttaatagctgtggacgagacaaacattgtggtgtatatgattgcaagacatacgtatttagaagaatattaataggcatttgctgaacaaccatggattgtgagtgctttgaaaagcatggatgagggcaccaaaatggagtttctcatgacccttcacacacagtgctcatagttagatcaatagatagcttcaatccagtccttacaacgtgcatgtgtaagctat

SEQ ID NO: 228028 - DNA, 2687 bp, Cannabis indica
attattaattacatgaaaagtgaaataacatattacgtacgatagttaatactaagaattgatatttataattatcttttaacatttttcgactagataagattattttgagatttctgaactgcattcaattcacaatttgatgatcaccacagaaaataaaaaggaaaaaatattcgtttcaataattcaattacagattaataacatgcaatcatacatatagtaggtgagaaaattttgcgtgaaaggaattaaatttcgatctgcatgatgatattgtgaaaatcaatatataaatatatatttatattttaatatatatatatatataaatgtatatgcaatgcatgcttggttgaagatcattggaatttcatttatcaaaaccatgctatagttttttctaaaaaaattattaggtaaagatcataaaactctcgttagtttgtttggtgaaatttaatcatttgataaagatgtgtgttaatcacattgccatgctatattatatgatttgcaattcattcattaattatcccataattattaattaatatacaacaaaaatttaattaattaattgctaacaaaatatctagactacctaccagccatacccaataatctaatatgtgtacgtatacgtttagttaagttagctattaatcaatttcacaataattgtaatagcttaattatatatattgtacatatatgctctaatatttattatgtgcaagaaacaataatatatataaattattacaaggaaaatattggttcaaaattttaaaagctatttttaaatagctagcatgtgcactgcaaaagcaattaattaatataaaattaaacagggcatgcatccaataagggcagcaaaaacaattatatgatcatcgtcatatataaaatgtaaaaagatgttatataattaattatatagtgttgatctaatttatataatttctattattttgtttatagtgtattgatcatatgtgaattttatactttggatttaatctaatagctttaaaaaaattaattgaattgattattttttaatattaaattatatatttaatatttattaaaaaaaaatcacataagtaacaataaaataaattaaagtattatatataaatatgtataaagaaatgtttaatttttttagattatatatattttctttataaataagaatgagttatgtatttggtttattaagttttgaaatatatttgtatcatatgaattagattagattacttatgaaaaccctaagtatgtatatataatatgcatgtgatcgtgatcatgacctttttgcttttgggttatgtaacatttctgtcaggttcatggactttgtacatgatctctccagtcacttaataatgagaagtgatatagatcgatgtatatatatatatatatatttatagacattatgatgtatcagtttcatttattttctttgttcaactaaaattatgggtgtagcatttgcccacgccataatgcatgagaagttataaataatccccataatatctctatatgtgaccatattttccttctacaccatcatgtgctttaaataatattctctatccccaacccaacactactccattctcttccaattcccatattcaaacgaatttacaggcacattatatttatatatatatagatatatatatatatatatgttgaagtcggcaactattgtttttttttcatgagataattttgtatatatatatatatgcatgcgttaacctagctagctagaatatcattattcgttttgtttatcaaattattattttgaaatatttttaaattcataacaccctacttaaatgttttattatattgtttttgggcaaattaatattaaatcttctatatttttatttagtatattttaaattgctactcacccttaaaatatatgtataattatagtcacacaagcacaactataatatacatgccctcataattataacaaaaatattatacaactacttctacaaatgaattaataaacatacaagtactataatattgttaatgatcaaccacattcgatgagatatatcatccataacattttataataatgatatgtactatatattagctgttaataaataaaaatagtagatttaattagtagccaaaaagtacgtaaaacaaattaatttaaagttacacgcattattatattgacatgtatatattcctactaaaattaaagaaaatgtttgcattttatatatcattataagattaataaagtgtgtaatattttgaagcaaactgcttagtgtgtctgtgttcggatgatatgtttcgtctcttctttgtttggataatcattatcggttcttagggtacatgttctttcttgggttttagcctcataatttttaatcagcgtgatttgctatcatttgattatcgggatttgtgcgactttgttttcgcttggcttgtaaagttctgctcccgtggtgctagcctcctatgtgtcaatattgttttggtccaactaattatcaagtcttatataatttaatataataatttttaaaaatatcgctagccaagcgcaatgcaacatgtcgagaagttgacagacaccacttggtgcctaatagcaatgctca

SEQ ID NO: 228029 - DNA, 1836 bp, Cannabis indica
cctaagattaaaagtagcataatatatctcgacactgctgtcgagatgtgaaatgtgttatacaatcatttcaatcaagataatagacctcgaacattcaagctcaatgaaactctaacatatcttcatcaaggagatgattcattgagttcttatttcacaaaactcactgtaatgtgagacaaaatcaaccaattaagactcaagataccatgtacttgtgttgtagcaactcaacatcaagatcatctcaaccatgatcaagttatccagtttctcaaagagctcaatgaatcctatcacactgtccgtgctcaaactattcttcttgatccttgtccacctctcaacaaagtcttctccatggctcgccaagaatgccaaagaactttagggaatcattttatctccacctttgctactgcaagctcttccacactagcaccctcactccctaaccctaccgctcccttagcaaatcaaaattcaagaactaacaaacctcatcccatgtgttcacattaccaaaattttggccattacaaagacaagtgttactttctacatggattccctcctagttatagtaacataaaagtctactaatttaagcactaacaatcgcaaaccagatcactccaacacacagattccaccccaaattgtacaagtctccaatcccaatattgatgccaaacaatctcagcgcaccccagctcaatgtcaacagatcatttctatgttaacacaacagttgcaacctgcaacatatgcctttacattacatgatacaccaagtgtcaacaacttttctagtaatattaatcctctctcctttaattcttggattattgatagtggtgctattcaccatgtttgctgtaacatgaaatattttaacactttcacacacactccaagtcataaacctataactttaccaaatggcaccttagttaaaataaaaaaaaaattggcactgtcatacttaattctcatttggtcatcataaatgttctatatgtaccaaccttcaatttcaatttgttatctattagtgctttattacataacagctccaacaccatgttcaaatctaatgactgttatatccagggactttctcgaatcttaaagattgggacaactaagagatatgacaatctttattacttacaacaagagatacattctacttccatttcttgtaatatttatttagataaaaaccaataacataatcgccttggtcatccatctatacttattactaataaaatcaataaacatgcagatacattttcctaatgatacatctggaacttccatttcgttatccaatttttcatttggccaaacaaaagaaattatattttccatctaatcaaaagatttctaatgttgttttttatcttattcatttagacatatatatatggggaccatgtcccatatcctcaatagaaggatacagatacttccttactatagtagatgaccattctcaatacacatggatctacttgcttcgtgctaaatctgatgccccaactatcatacaaaatttctttacatttgttaatattcaatttaaaacaaacattaaagtagttagaatgacaatgcaaaagaattgacacttactaacttctacaccagaaaaggcactacacattacaattcttgtgtaggaagactgtaacaaaatgcagttgtagaacgcaaacaccaatacatcctcaatgtagctgggccttggcatttcaatccaacattcctctttcctattggagtcagggccggtcctgagcataggagggctaggcctgtgcctag

SEQ ID NO: 228030 - DNA, 2768 bp, Cannabis indica
gtgtgctccaatggtgtagctaaaaagtgatgtaaatttggcacatagcaaatattgtgccaaatttgctatgatgtaaaatttataccacaataaatactacttatttttttatttacatttatgtcatttctattattttattagtgtatttaactatcacattaaatatgaaacatttagattatttttttagctttacatattaaaataataataaaattgattataaagttattagattttattctttttaataaaacattaattagatattaaattttatattaaaattttacaattgtgcattggagtataatgctaaaatttggtgtaaatttatcacaaaattactttttgtgctaaatatagtacaatttttatatctccaattagagatggtctaataaaactgttatttttcatttaaaaaaacgaagtgtgaactggaaaaaaaagatttgtctcattttgaaaagatgtatgtatgtatgttatttttttttttttttgaaaagaaaaaatatgtaagttgattaatattataaaataaatttggagattttttttttttaagagaaactaattttttttttttcaatgctattacttttttaaattgaaaaaaaaaaagaatattagaagaaaatggtaaaatatattggtggcatttaaattgagttgtaattttttcattggtttgggacagtgagacagggtagaaatgggacagaagatttaggtctgagttatgcattgtgtgaatgtgtagaataaatgtaagagaagacagcaaatattcgtactagtcagtctaatatggtatggagcaattattgtgaaaggaataatggtggccgaaaaaaccacttctccgggcgggaatatcgcaattacgatttgaaaacaacgaaaacgacaaccaaatctcttaaaaaaatacacaaaaatggataaataaataaaaaagaaatggtctggctgaatatattattattacattacacatccaaatccaggaggtccctactattactcgtagaagtagctacctctaccctttcctcttatatccccttttcttcttattattatttatctatctttattattatgaatatagtacatataaacgacaatctctagactcttactcccctcattctctctgacacttgtcaaatctcttcttcttcttcttcttcttcttcacttgtactctaataattcaccatactattattaaaattagttagttatctttctctctctctcactctctttctttctgatctaactgcataaatgcagatgtaaaaaggtacttgattctctcttgttttctttggtaatttaatgtggatatatacatacatatacatatatatacacgctttgaagtagtggtgggtctgatattctgaaaatgattttatgtcaatttcaccattctctctctcatgtggtcctctttctctcccatatttttctctatcttatcggatggactaactatggcgtaaaattggggaaaatactagtaggtagtaggcctgtcatcaagtattgtttttcaagacatcaccaacaaccattacaaaccttcattttcattttgggttgttaaggttgaattttagtttgtggactcactatgtgaagtctacgccaagctttcagaattaagattagacaaaacagattccattagtttcttagacttaaaacagatttgatttggttattattacttactttttttaagctgttatgcaaatctcagatggtactctgataatgtcgttggaggccctctgaaagggctgccattgccaagatggaccgaaaaagttggctgtggcggaggaaatcttctgagaagagtccaggcgagactgagagtacgggatccttatcttctcattctgaaagattctccgatgatcaggtatattcactttgctccatttatcgtcatcttttcaattttgttgatacccaatactcttcctgttaccgagtattatgctagaaatcataatcttgctacttttgttaggttattggctttgttgcaaagttttgaatttacgccttttctgtactttttacctttcttatatgagaaatgagatagcttgaattgtagaaatgatgatgtatgtatgcccatagcttcaattcaacatatttggtgtaatttgtgttaattatgctcagcagattgtttagtcttttcaatcacaaaattgttttgtatgtgtaatccaatattataccagcaattatatagtgtaaagtctatattgcaaataaatagctctagcgatttctagttataggggaaatttcttcagattttcattctaattttagaattcgtggtcaatagctggtttagaggaaaaagagaagaatactagcgtaaaagcattgttacacgtaatagatatttatgactcgcataaaaatttcgatagaagggtatattttatatcttcaatgtgctttatcaatttgtcggaaaacaagtgtagtttttatcaataaaatctgaaatttcttaaaaaagagtacatagtttatatacgaaatttggctataacccactgggagacatacctatgactatgtaaataggacctcaaagtaacggttgaaatcccagaaatggcagtaaaaagaaatgcctttctaacatgtatatgacctaaattgaatgaagtctgctagtgtatatgccttgaagatagttgctaagttcactt

SEQ ID NO: 228031 - DNA, 1868 bp, Cannabis indica
aaatcaacgcagaatccttatgtagcatctggggacccatgtggctcaagtagtggatcagcaatttcagtagcttcaaacatggttagtgtgtcaattgggagcgagacccatggatcaattctctgcccagctgaccacaactccgtggtagggttcaaacctactgttggactcaccagccgtgctggggtcattcctgttttgcctccccatgacaccgttgggtaaacacaattctattctatttggcattacaaaacttctaatgtcaatattaagagacccttcactttcagtgtaggttttaaatggtcaggacactaagcaggacagtttctgatgcagtttatgtacttgatgctatagtgggttatgatcaaagagatcatgaagcaacaaaagaagctactaaattcattcctttaggtggttataaacagtttctcaaactagatgggctcaatggaaagattcttggggtcgttaggaagccatttgtggaccccataaaaaatccttcactggctgaagcttttgaaagtcatttgaacatattaaggtatgaattcacaacatgactaaaccttcttagttttccctagaaaactagttaatttgttgattttgtttggtcaaaatgttttaaaaactagacaagggggtgcaactattgtggacaatcttgaaatagagaacataaaaacagtgatgaatcctggtaaaagtggggagctcacatcaatgttggccgagttcaagcttgccattaatgactatttaaaagaacttgttgtttccccagtaaggtcgcttgctgacattattgcctttaatgaagaacaccctgatttggtaagaatctcatctcaaagtgattctaagaaaagaagattacttcttgtttgagtttggtttctttttcccaattcaggagaagatcaaagaatacggtcaagccacttttattaaatcagaaaagacaaatggaattggtgacaaggaaatgaaggcagctgagttgatgaaaaatctctcacgtgatgggtttgagaaactgatgatagaaaatgaattggatgctctggtaacacctggtactggagctatttctgtattggcattaggtggttatcctggaattactgtaccagctggttacgatgacaaaggcatgccttttggtctctgttttggagggttgaaaggaactgaaagaaagctaattcaggctgcttatgcttttgaacaggcgacattgatccggaggcctccatttcccagatcaaatccgttaccattagtagaaaatgaaggtctttttaaaagttggtagtagtgattgttaccctttatttttttttattaaaaaaaaaactactcattcaaattttaatatttcagaagactgtctttttgttattgttttgcatggttgataattgtttgatctgtttatatttacatatcttctagcataaattgatcactaacatatcaattatgtatatgacacatatggttatcaaaaaaaaaaaatgtatatgacacatataatgaatagatgtatacgtcattatgctgagtgaatcactaatccatacagcaagtaagcaagctagatagcttccagttagcactatttagtaaataacaggcggttaattaacagtctccgagcataattttacattcgatttggatatgttaaatgttggaaaatttaattctttatttagtcttaattaattcacaataaattaaataatagaaaaaaaattattagcagaagcgtactagaatctataaaatcgattttagaatggtatgatcttttaatttttagcggtgaaatctttctttggaac

SEQ ID NO: 228032 - DNA, 968 bp, Cannabis indica
ctaaaggatccaacacaatacttaaaattgataacacaactatatttgcccatttttgtaaaaccaatttctatgattgtaaaagtgtcaatctctcttgtttcagttaggaaactgtgtggaaattggacttcctatgctgctgttggtcattggattatcacaagtaagtgatttgtcttgtaattaccttctattgtctaaatgattttcatctcagaccaatgtgaatgtgctaattaaaatgcagtatttaaagcatgtgagaccatttagagatgtcccagtcttcgaacgatttccggtattgatctgtattacaattgtctggatatatgcccttatattgactgctagtggggcctacagaggaaagtccaatagaactcaagtcagctgtagaactgacagggcaaatctcatatctaccgccccatggtaatttcaaggatacataaacttatgtcaatgttctattctatgctttacctggctctaaaagcctacaatgtaatatgctattccaggtttaagttcccatatcctctgcagtggggccctcctacattttcagcaggtcattcatttgcaatgatgtcagcagttcttgtttccatggttgaggtatgcatgtcactactggtttcttaggtgcaatacgttttggctaaaacttaaaagtatcagttttttatatcaccatctttttcatgcttcagtcaacgggtgcatacaaggcagcatctaggctggccattgcaactcctcctccagctttacgttttgagtcggggtattggctggcaggtgagctaccacaacactagtggtttattctagcaaaaccaaaatatatgcatattcctttgatgttaacacgacaagtcttatctcaatcttttagttttatttttctcataatttgaagagttgagcagtcctttcatttatttccataatatgtatct

SEQ ID NO: 228033 - DNA, 2527 bp, Cannabis indica
aaaaaaaaaaaaactacttttgtgtatttaagatccatgttatattattatgttatatgaataatagaaactcattttttttttaatgtgaggtttaagatgaatgttacattattgtgtggacttaaagagtatacaaaaaagtatatggtttgactttgtatataaggatacggctaattaggatttttgacttcacatgtactaaattatacacctaaacttttaaggtcgttaaaaatgtcttctgaattattgagattgttggatttgaggattttgttccaattttagtaaaaaagtctaacatgatgaaagtccggaagctatgatttagtacatatcaaagttcaagggccatgatttagtatatatatcaaagtctggggagcatgatttagtatataaacaatcactgaaatagtaaaattgaataaaattagagaaaattccttaaatttaacaatctcaatagttcagggggcatttttaatgatcttaaaagttcagaaggcatgatttaattaatgtcaaaattcaggagtaaaaatcctaattaacttatggatatatagtactgccttacgcttttgcgcctctacgttctgctaaaataatttataaaaatgataatcattaattttcaacaagttgccacctatgacattaaaaacttaccattttcatcatcaccacaaatcaatgtattgatactcttcttatatataattacaaaagaaataacaaaacaaatcattgtttgttatatactggtaaagaggccagtttcattaatgggttatgttgctttagctgaaatcatattcataatggatacttgttgcaccataagttaggtcttttacaccagtatgaatgattatgagtttgtttggcacagaaaaattaaactgatttttgaaaaaatggtgtgataaaaaagtatttaataaataattaaaaaacaatttatagtaaagaatttatagagaatttacagttaaaaaagctaaagcatgatctaacttttagaaaaaaaaaactattttattaaaaaagcagaaataaatttacatggcttcttcatttttacatttcaaaacagtttttttttttgcatttttatagttctacattgaaacccctattgcaactagcgtagcaacctaaaatgcaacaaaaaatcatataaaaccactattgcaactagcgctgcaactactttaaaaacccaaaccgtaaatttgaaaaaattaagctaaaaaaaaatattatatggggtaattctcctaaatttatttatattaaaattatatttacttatttattgtatattacaaaaaataaaaaatatttaaaataaatatgttataataaaattatataatatttaaatctttttttattattattatattttcagaaaatattttgtattttgtatttttatttcttacattaacaaactacagcaacctcacatatgacatgttatatatttattattataataaattaaatcataacactatcattatcagtacaataaaatgttaatacactacaagaaagaaggcttttgtcggcccaaatttgtgtcggtaaccttttgctggagcataaatatgtatgcttttatttctggccaataaaacaattttcatcagtgcaattggtaaatgcaccgacaaaaaggggttacgcccgacaatttcttcaccaccaaaaatgagctcgtcgacgttaagtatcgactaaatcatccattatgcgggtcaaataatttttgttagcgcaattatgcgttgatgaatgttgcaccttttttcaattagcggataaattttaccgacgcaaatatgtgccgacattattgttacctgcgcaataaataaggcgggcaacaatattatcggtgcacatttacaccagagatactcttaccctccatattttattgtaggtgtaagttttttggtgtatttttgcggcgataattagaaagctgttatttcaaaaaaaaatattttgataatttgtaataagtattataattaattttaaatataaattatattttaaaaaaatagtatttaataaaaaaaacactactaacatatataattaaatagtattccgattaaattactataaaaagatatttgagttgcaaggttagcaactaaacaaaagtgctaaagtaaaatattaaaagatgttacgaaaaaaaaaaaagtcaagttctattgttaattataaaatatctatggttctacagaaggataatgtcattgttgtcgctattctaagtgtcaggacgatgtgatgacggtccaacactaggaggagcggagaatggtatttcatattgctgattcgaatactgagtatcctgttgttcctcctacatctgtcgttgtaaggtgttaggctatttttagcctacgttttgggtcactttttatagttgttttccttctttgttattctttttggaatagaattacgcttgttttctttggtttca

SEQ ID NO: 228034 - DNA, 3959 bp, Cannabis indica
accaataaaaaaaaatgacaagtggataatgactccaattacctacgaaaaatttagaaatataacttaggtattattacggctaaaaattaaacttagtattaaatatttacgccataaattactcataataaaatttaaagtctaataaggcaaaactaaaataatcgatataggtgttatatcgaagttctacatgtattcataagctacatgcgacatcgtcaaggacgatgcattagcgccaacatcgttcaactatgtcgatgacagtgtaaattatcgacaacaattaaaggcttaacccaaggaagaagtgtttactatggtgggactaggttgcacggagatttgagttttacatctagatttcaaatttaatgaccatattttctgattagattccaaatcctatatattgttggatttgattggttgtatatgttggatgtattttaattttaattctattaaattttaaattcatacaatattttaagtccaaattagttagattggattcaaggtaagtcttgaaattttgtgagacataagaaaaaaaaaatattttggtccctcatttgaaaaatagtattttttaagtctgtaataaaaaaatattttttttaaaagaagaataaatttttttagacccttaaattaagtgggttctaggtacaaagcatgagaccagacttaattggactgaatccatccaatgttttaattcaattcaaaaagaaaatatattataatcctaatttatgtataaatatctaatgacactacatttaattactcttccaaaccatattataaaaatacttacaattaatttaattatatattagattatatttaattaatttttagacatctcatccaacaattaatactatctaattggatgttaaaacttctaattcgatacaattataattaaatactaactattaatttaacagctaaatatgattggatcggttagttataattagatcaaatcattttatgcatcacaaccgtactcactagacattttgttgattcaatgtaaaaatgttactaaaacattaatttttttttaaaaaaaaaatggattaaattaaattattgtttattgtggtccatttttctcttattaatttttttatcacaaaaagtcttagaagataagatgacattatttcaaacactattctttgataactgtcaacaaatagatatggtgtccaacccttctatgtggtcattaaatagaatagtcaaaaatcatttgtcaacttcatcatccccacacaatattaaacaaaaataaaaatcaataaccatagaagttttgatccacaatttgaatacataaattttgatccacaattcacatccatatccacttattggatagactgtattgttttttttctaataataataatataaaacataatatactatatagatatataagaatagacactactctattatacgagaccttctaagaaagtggtataactcaaaaagctaataatatttcccaatgtagtattaattcacttatgtttttgtttaatatagtattaaggtcgcgtatatatatacatattttataatatagttttataagtttttttttaatttttcctttttataatttaaattatatctcaacacaacaagctgattgaacagatccactgaattcacagggcacaattatattttccaacttccccttttgtccttgtttcaattccaccataaagaaaccatgggccccaccctgataatctgagcccatcactagggcccgataatccaggcccacccaacacgttccaatccgaaccgccgagtctaactcggcccaattagaaaacttcccttccttctctttccaaacacccacgcgtcctctaggacactccccttcagcccacacactctccacgcgcctccattccccattagcaaaactataaacctccgcgcttgactcaaacgcgccctgactgtcggtgccgtacccactcacaacccaaaactcaccgtttaacaccacgccttcgcactcgtcacggcactgactcatctgagccaactcgctccactcgtccagactcacatcgtaaacccaagccgaattcaacgcgttcttattctcatcgtgcccacccgcaacatagatccgacccgaataagacccgaccgcaaaaaacgacctcttacccggcatggccttggcttcgctccaccgattcttagcgaaatcgaaaacgaaaacatccgaaacgggtccgtagcttttcggatcccaaccgcccattacaaccagcttaccttcacaacccgccacgtggcagaacataggcaacccgtccgcgtatttcggaaccggatcgatccggcgccaggtcgaatcggtggtatcgaacgcgacgagtccgaaactcggtgagtcggtgcgtttcggggaagcgagttgaggattggtttgagcttgtactaagcaagctagtttgtgagtgaaaccttttgattttctgtatcgatgaaattcggaggtttggatgagatctcgccatcgatggcaaactcgggaggcgacacagtgagtcgtgtactgaagacgagttaagcactcgtaaccgagttcgtcgggtagacccggaatgagttgagagaactcgttatcgttagagtgagaattttccatttttttttttcaattaaagaaagcttctagaagaaccttatcctctgtggcggtttgagaagtgagatcgttgtgaggtgtatgggtatttatacagtgtgtttcagtgataaaatgaagctgcaataacgtgtaatatactgccacgtgtataagaagtacactctaaactattctcactagtcttggagtacattttatttttaaaactgtaaactattagaattttctaaaaatttataagcagttttaaataactacaacgtatgcaagccggatcttgggctatgtccgtgcttagagccacccaaactaaaggctcaaaatttttgttcaatatattaatatattaatgtgtagaagaaaaaatagtaatttcgtaaaattttgttaaatataagctcaaaatcaataattatcgagaaaattacattgtatattcactttttagtttttaatttaatttttacccttttttttatcactctttaatttataccaattttataggttatacctctattatctgtgttaggaattctaattttgataagttatgtgaggttatatttgatagtttaatcataaatagagtacttatcaattaaaattattttatagttatatttacttaatatgtaataaaaaatagtaattcttaacttatctcacaattatctctatactttaaatacaacaaaaaatcttaagcccaatttttgtcagggccagaacatatgtgattattaaaaaaaaaaagaatattagcagctaaactatctgaactttacgttttgtaacacttatccacaaaaattaaaattttggtggcaaaacctactgaactcccattgtgttttgctctatacctattcgtctaaaaatcacagttaagtgctacggtggactgtcctcgtgtacacacttgtacacgtggcaaatttttagtggtgcacgtaatattcttattttttgtaactttgtaaactgaaaattatttttaaaaaataaggccaaataaatttaattgttttcaaaaaacaattttttgtttttaaaatcaaaaaataatttttgtttttaaaatcaaaaatttattttttagttatgaagtcaaacatgcactgatatttttttttttttttttttagttaaaaattcccttaaaaaaaattaaactatagaaaaatactcttaaatgtcaaaatcgatcgattaggaattaagaggaccaaattgtatt

SEQ ID NO: 228035 - DNA, 1377 bp, Cannabis indica
taacatattatattttatatttagctcacatactcgaatcttagacccgaaactatacccgaacctagacccaaatgacttaatgtcatggtatgatgccaaaatattgatttttatttgtaagaaaaaatctaaaaacagtttttaaaaatttgtgccaaacactattaaatttttaaaataacaaaaaattattttctattctcacttttaaaaacacaattttaaaaactaaaaacacagccaaccaaactcatagtttttctaagtatgctaaaatatagcaatacaccatatttttaacactctatcatatattctcttatactatactagtatactgtactataaatacatgtaatacggcagtggagaaaatttttttgctgggacatacagcagtgaagaattgggaaaagagtaaagacgatgggcaaaattgtatatgctaattattggaagaggtctgtgatgcttgagaatctcattcgatcatacttacccaccaaagataaagttgtctcaatcaaattttatgaatcataaccaggaactgcagggtcacaaacttgtaataataaactatatcaagccaacccaagacaagtgccttggaccacaagctattctctctctctctcttcctctttctctcacacacacatatatgaaagaatgaaagaaacatgattcactttggaatgaaagagagagagagagagagagagagaacgtgtattttctcctacaatgttttgccaacttgccatgataatatattatcagacaaaaagtaaatagtactctaatatgtaatacatttcttcactggaatatatcacatcctcgcatcaaatattctttgtttttaaactactgtatccagcctttcaaaacaattgtatataaaacatatttaatgctataaacaattgtataaatatactaggcacaacataatcattacacattaaaacacaagatgtgtttagattttaagtaacaattacgaattattatttttgtgttaataataatgttagacaaaaacgttagtgtattttgaaagtccatgtgtacaatttgcgaaaaaaaatgataagttttgtgtcttaatcatacaataattatgtagttggacagaattgattccaaatatgtccttcgtaattacccatagaaataatattatctataatatcaattatataattttatgaagaaagttttaatttctatacaaaaactacaaggtgattctacaatgcaccccttaaaagagatgtaccgatgcacccttaacttgtttcggcatttagaaaaattttttagtttaaaatttttttatattcatgtacgttataactatttaagata

SEQ ID NO: 228036 - DNA, 1671 bp, Cannabis indica
  modified_base (1453)..(1453): a, c, t, g, unknown or other
aataaactccatagtaattttctaaaaattatagaaaagacactataatattaaataattaatttttagaatcattcatgaattaaaaagaaagtaaaaaattttattgaactcaaatatataattcaataaaaattattatctatacaacaagccaccaacaacaagttacttatttatttatattttttaaaagaataaattatttattattatttaatatttttattcataatattagataacgattataaacaaatcactacaaatagtgattaattttgatcactactatacaaagactcgtacatatataaatatttgatgaatgcaaaagtcgaaaaagatattgcaaacaatgtattataatcttgttcaatttacttgttttcttttttattgtatttttcgacaagtaatgttgtctgggagtttatttctgtaacaatgaaggatttgatagtgaagttaatcttttattttaataataataataataataataataataataaaatttattcattatttttttaaaaaaaaaattatcaaaagaaaaaaaaaataaagcaagttcttaaagttaataataaaaaaaattgtaatgtgaaaaaatttaaaatgtgttaagaataaattttagaaaataaattagtttaacattttctaatgaatggagcgcatttatacattgattacttatgacttttgtcctcaaattattaccacttaaattatgttccttgaattttttttatgattctcatgaactataattcacaatgctaaaatatattatttttattaaattttatcttatgtgtctaacaaaatattgatgtgattgatagcattgatacatatgcgtcatgtgtataatttaaataaaaattctttaataatttaagatatatattttcatatcagcgataaataaaataattagtttattatgacaatgacatattactcatatcattatattttgttagtcacataggttaaaacttaacaaaatatctatatttcttcattgagaataattcgtgagaaatttttaacaagtgaaaaaatttagaaaaaacaatttaataattataatagctcgggagtaagaatacaatagccttatatattgtatttatagggtgtaaatagaattactctatttttttttataaattctataaaggcaccctataaatgggaaccataataaaattatcttattcattaaaatatatattccataaatattatacatttaattataacatatcatacattaacttttagaaattttaaattattgagtattgtgaatacgaaaatatattattttgaagtctaatttttgcatacttaaaacaagttactttgaagtgatatatacccagaaatttagagaactcgctcgtatatatagacgagatgaaagtgagatgtaactatntaaaaaaaaaagagaacaacacaagaattatagtagttcactccttatgtcgcgacagtaatggatctacattcacttcaagtttttattctcacgcgattaattcaagaaaataaccaagtctgcaaactcaattttctaaaagtagagaaaactagagagagagaggtcttgaccttatgggtactttcgtgaatgagtaaaaatgaaactagagg

SEQ ID NO: 228037 - DNA, 3587 bp, Cannabis indica
tttttttttttttgagtaaatttgatctaatgatctttaattataagaaattaaagtatatatatcaaattaaatttataataaataatgaaatgtattttattttgtctatatataaaaataaacaaaattcattgcctaacaaaatattattacttttcatcctactttttatttttaatgtgaaaatttatgaatcatgttttctctttctaataaatttgattatggatgcatgtagattactttttcatttcattacttatgagaaaaggagaataataattgtgctattggcacctaaagcttatctctctcttcataatatacttcacattgtatttttttttttcaaatttccatagacttattatttctttcaaatatgttcttcacatttcttgaagtactgtataaacagtttgagctaacataagatatagattttggtattttgaactttaagaaggtaaccatttcaaaaaaaaaaaaacttttaagaaggtaatctctcttttgatttttagttttaaaatattttccttttgaattaaaaaaaaaagctacttacaaaaatatgggaaaaaagaaaagttttaaaatatatgacatgcaaatttaatacactaaatatggtatttttttaaaaaaaaaaaaaaacttaaaattattatacgtaaggaaaatactataaaaaaactttaaaatcataactaatttttttttttctaaaatttaaacgctaaaataaaaaataataatctaaaaaaatacaagtaaagaaaaccagtgaaattattgatttacacgacgcagtaagtacaaaagctaatgtttttcatttgaaaaaaaaaacctaattgaaataatactaaaagtaactttattaaagtaataaattaagataccaattacttatataaaattaaaatcaatttgtttttaataagaaccagttttatgaataccaaaactcctacatgatgcttgtattctaattactctatggaatattcaacaaatccaacacaataccaaaactaaaactgtaatgatctcttagctttattttaagaattagtagatagatagggtttattttaagaaatagacttattatgattatttttataattatggagatatatttaaattctaattgtattagctatagtttacatatttttttaaatttttatgcttaataacagtagaatatgatgtttggcctatagagtcacgtaaatatagtaaagtttcttggttttagcaaggtaatatagttagacattgagaatattaagattattcaggagtatgggtttggaccatattacctttaagttttaatttacttcatggtaaaaaaaaataggtaatttaataattttatcatatagcttatcgagtataggctgatattatgatcaatagtattgtcatatcaatgttatagattcagtacacatgggaggcgagataggattatgattgggtgtatgagcgcctagttataattttgtttatatttatgttatgattatgcttttttactaagtttgtcgactcattattattgtttacatgtgtaggtaagggcaaagctaatcctgagcagcagtgagtgcaagcagataaagattgtacatatcgagacaattatacctggagtgttcgatcttcagggtagcaggctttattttagtagtcgctaggtgataacctttgtagttatatataagggtgttcgcagtgcaagtggtgcagttttttaccatcttttcaaatcaacccgcacacgcagtttttttaattttccaaactgcacccgcactgtgaaactaaaaaactgcaaaaattgcaccaaaaaatggtgtggtgcagtttttgcgatttctgcggtttggactatgactaataattaaactatcacaaatacaacaaagtttgagcaacacttgtcaaaaataccatacggttcaaaaataaatatgaaaggaaaatttaagtttcaataacacaataattagtgtgctttgggctgaacattcacatattggacctaaataaatataaaaattggtctttttataatgtgcggtgtagtttgaactgcatattaacaattttaaaccgcaaactgcaccgcactgcatgcggtttaggaaaaattcaaaccgtgaccgcaccgtaaataatttcaaacgatatttttttacggtttgagcggtttgatgaaaacccctaattatatattttgtaaaattattgtaacttttaaagacaatatcttagattatgtaaagtttgtttattcaaagttgaaaggttaattatcaaaagttttatttaaatacgattttcaataaatttgttagttagcaacggattgcacagtcaatatttaaatcacactaacacgcttaatctagtagggtgttacaatttagtatcagagccaccaaattatctttcaaaaattgtcatgatgtgtataatcctcatctgagataagctcgacttacagtttagtaagcctctaatgctttagtagtttagtttattagtatgttaaaagaaacgtttgataggaagcatgttagtagcctaatagtttaaaggtgcatgttttattttttttcaagtaagcaataattagaatttaatcttgatcgcgatctgatcaagccaactcactatttcgtaggatgttctattagaatggacgccaggtagaacacgagaagccatgctacttcggttggatctagtggcggtcagggagttcaattttccctatatattcgtggtcgaggtagaggcctaaaaggtagtgcaagcagttggggtgatgttaacccaccgcaggatgcccgtaaaaatgcaagccaagatcaatgaacaagacaaagaaatttagcgtttaagacagtagggtgctcccgtaatgcttgctcctgaggtgcaagttgctcctactcctgctatgcaggtggggccagttgttgtcaatcgaatgtaaccattatatgaaaagttatgtaagtaggcacctccggtctttttgggaggcccagatgtcatgaaggctgagtaatgtcgaattgttattaatagaattttgaactttatgggagtcactggcaatgatagagtgacatgtgctacctttcatttccaagaggatgccctagtttggtggaacatggtatctctcacccaggacgttaccagaattacctggcaagagtttcaagagttatttaatgcaaagtactacaacgaagcgatccgtagtacaaaaagaaaggagttcacacaattgacccaaaaaagagaacatgccagttatagaatatacaacacaatttgacagactggctaggtaggcttcaggaatagtgccaactgactttagcaagaaagaaaaatatttgaatggattgaatcccaagattaaacatgacttgatgatcccaacatatggcgcaactactgttaggttatttttagtattaattttaggtttagtatagttttaattgagttttaattatgtttggagcatttttacgcttttatctttt

SEQ ID NO: 228038 - DNA, 2301 bp, Cannabis indica
aaaaactcaaaataaaaattaagctttcagcttagctgtctcttttcttttctgacatagtatggaaagcaaaatagaatatacaagtaataagattcatggttccaatctcattgttaagtggagtttataaataaatgagaaacagtgttctcaatttatgatgaatatactgtagaaagagagctgaaagaaaggataattaacttttatcaatcggttgagcttgccaaaaaatctgagtctcatctttccttgctgcatttgctcgtatggttacccgagacttttgaacgaaccctgccccgtcacactcaggacatctgcacacacatacaacacaatatggatccttattaggcttgctatgttgagtcttaacgttgtgaatttgagcaaggaaaacaattgtatagtaaagagctatgaaataaaaagagcaaagggtaacttttcataggtatcttttcgggagaagaggatagggaaagcagttccaagtagagccacagcagctgctccagcaatcaaggaagctgtgccatcggctgatacatctccgaccacaattagaggtcttgtcttcagtcttgttctcgcttaggttccaagaaagagctgtggaccttgctggtggtgttgttgatggactgcagacaccatacagagaagaagagcttcttggttttgcttgaaagataatctgcgtagaagacattgaaaatgaaaatgaaaatgcaaaaagtgatcaatttctcttgaaagaaaaaagcttcaattcaatgaataatagagaataatgatctctttttgaataaaaatcttcccagttagatttttgcatcagctctgcatccagatatttataattataattagcaagtgaatgcaccattttcaatgtttgagttcctctcatcacgagtgacacttgtttattgaaaattagcatgtcataaacagcaactaacactcaacattaagtttaagaacagaaaacataccagtttatggggtccaaaaatcgcaaatctgcatgttttgtcaatgtaagctgaatagtatcccattctgcaagctcaaaatattcgtaaattgatcatattctagaaaagtatgccttagtgctgctaaaagagaagatcagaccatccacaaccgcataatgtttgaggaactagcttattggaaaccaaagatacaataacaagggtacatttagacaatattcttacactatttatgcatgacaagttgtaaaaagcactctaataattagaaaactacacattgataatttctcatcgaaatcccgagagaaagcaggtgatggaactttttaatagaaaaacgtaatacaagtactaagataatggttacatccctctagtatatctttctaatttgctgccagtgcagaatgtcctatccttcaacagaatcacagtgtatgctatgcacagcaaataaaataaacaatacaattacaatatacaaaaaaaaaatgaataacttaagaaatgcactacaaatacaacaatcttatcttagtaagaaagtgagcctacaaattgagaagtaaaaatgcactcttcccccctatctcaacttggtttcaaagaaggaaaagaggaactaaaacactcctcattagctatccaatgtccagcgtcggctgcgacttgttctactgaaaatggtactagaaagactccttcgagtcggattcggttcagcaccagaccgagaggatgaccttctgagcctcccaaaaaatgagaaaaaattgtgaaatgctcgtcccactcggcccctctccctcgacatacttccactagactgaaatgcaatcctcattggagcaccagaggtattgaaaccaccatccatttcagtgtaaacgacaggaagctcgcgctccgcggctcgcctaccacctgtaaacctcccaacagcaaatccaccacccggaagcctccatattgttaaaccaatagtttcttcatcctcaaccccatcagcagactctggggagtttctgcgacacccatgcacatcagtgggcagttgatagcgacacacagggcaagaattacgaagcgaaagccacggaaggatacagtccgtgtggtagatgtgcttgcagggcatctctcgagcttctgaattgagttcaaattcctccttgcaaacagcacagtgtagttctgtggaaacgtggttagccacaatctttataatgggcatggaatcaatggccgctttggacgctggaggatgatccattctcccaaccccatt

SEQ ID NO: 228039 - DNA, 4332 bp, Cannabis indica
gtaatcagtttcaattaaatacgcttttcaattaaattaaataataaaaataaaagtaattattttacgtggggactagttgattgaatgtgttccattaactgatacgactgagtaatcagtttcagttaaacacgtttcttaattaaaaagatatattcttcctatcagttcaattgcattatttagatgaatggattgaaataatataataagttctaaatcgtggggactagttgattgaatgtgtcccattaactgataggactaagtaataaattttaattaaacacgtttctcaattaaattaaataataataataaaaacaattattttacatgaggaatagttgattgaatgtgtcacattaactgattcggttgagtaatcagttttatttaaacacttttctcaattaaattaaataataaaaataaaaataattattttacgtgtgtgctaggtcaagtgtgtgagttctcaactacttgcataaaactaccccttggggcccaaactcaagtgccaaaattgcaccttatatacctttgtaaacaaggattaaaattccatgtgggactctttccacttcacacacactaggacacttccatattttattaaaatatttattaaagtttcaacagagtcattcctagagtagtcaaatgatatggacacttccaaattttaggggtaaaaattcatcctaaattttactcctgaaaatgaatattaacgtctttacaaatctctgcattacaaatatcttcattcttcatagagtctcccattatccattgtaactccatattggttgatcttagtgattggaatcttgagcatgtccacaaataattgggaaatgaaattatctccattacccatagtaactccatattggctgatcttggtgattagaatctttgagcttgtccacaaacaattaggaaataaaattatgtgttgctctggggtcaatgagaaccaccacatcatatttaccaatttgcctcttaagttttagtcttattagaggataaatcaaccactgattgtaaagaaacctctactactcccttaagctctgtcgaatcaagtttagctccatctacattatcctgatatccttgtttcatcgtcaatttcagcaggaaacatccagacattcagttcttttgtttgcaacgattacccgacgaccatttgccatcacatcgggaacacaagcccttttccctcttgtgttggatctagttttcagtcaatcttttgacctcacccattgttttagtgtaggtgggtttatttagtgtattcccttgtgaggcgcttgtaaagttcaccatgggcggattgaagttggatcttcgttggtgatattgagcggttttttgcaacattacttctatgtcctgggtaatttccattgcttcgtccacattctttggtctctgcactcttaactcagccctaatcgatagtatcaatccattcaagaatgtgcctgattgaatttcgagtgctatgttgtcatatggagctaaaaatctgatgaaattcttcttgtaatctcacacaaaaattggtcatagagtgttgaaatggttagccattgatgaacaagaactagaaacagagaaggtaaaaacagagagagagaaaagagaaaggaaatgaaagagtagcaaagattgtggaaagattacttcattacaggaaagtgttacagcctttatactagcaatacaacagtaaagaaataacaaaatctcaacagattcttacaactaactcaacaacatttaacacgtggtataataagctccaactaactctaacaacctaacagacttaactgtcttcaacatagagggaccacttcatttcttcccaacacagaatttttcttttctagttttcatatttgtaccaaaggagagcatcaccaaaaaattgaaataaaggatgcctctatcttctcttcctcaacataattatgacaagtgaagaacctttcagcttgcataatccacccatttggattgtcccgtctaaagttagaattttcaatttttttaatcgtttctcatgtttgaaatgtgagcccagctgtcctctatccgaagaacgaccctcgaaaacactattttctcaaacttcttctgctggtggcacttgagtagttttagtggcctgttccagccgttgtccattgcttcttgcgcccataaaaggcctggaaccttagttgcagtcgttcttggttgctagacatgggaaactcagttatagttggttcttggatgaatcttgaatggacttcgaccaaacttgatggttcttggaccgttctttcttgttcttgagcctctaaaagatgttgaggctgttgttaaatcaatttcatctagcgccccatctcgagaatagactcattgactgagtctttaatagaattcacaatgttcagtacctccatcttcaatgccacaacttcttcgtcaaggttgaatccgaactgctcgtcttcgggtttcttcaacatataactcactacaccaaattgatagacttttcttaagttagaaataatgtagcaaaggaattgagacacaaatgtttaaatccatccagaatgcttttattaatcacgaaattacacaaaatagctcttgaagaggctttctctcctattctaagctttcaagaggggtagatctctcccaaagagatttctctcaattttaaactctttccaacatagctaaaagtgagttctaattttctatttatagagaataaaacttaccacttcagcaacttaattcaaaaatgctaacccaaaataattagaacaactcagaaaaagacaattaaaacaaataataaaattttaaagggctcgtttggtacgccttattgtaatgtattgtattgtattgtgttggattgtgttgtattgtattgtattgtattgtattagtattatttaatacaatacaaagtttggtattgacttgtattaattgattgtgtaaagttataatatatttttaatacactcgatcccaacactaactacgggtccgggtctcgggtaccgggtccgggtcggagtctgagtcccgggtccaggtcccgagtctgggtcctggtccgagtccaggactgggtccgggtccggggtccaggaccaggttcgagtctgggtccaggtccgggtctggggttcgcggtccgagtctggggtccgggtttggggtacggggtccaggtccaggacggcgtccggatccgggccagggtccaggttgggatcctggggccggggtttgaggtcgaggtccgagtccgggtccgggtcggagattggtgttgacccccaaattatttataaatattataatacaagctaatacggactatttattatgtattaaataatacaacatacattgtattaaaaaatttagtcgtaataattaatacaatacattgcttaatccaaacatagtattatttattatttaatacaatacgacccttatacgacgtaccaaacgagtcctaataatatgttgtcataaaactcatgcttttcctcacattagaccccaggagcttatcaataacactaaccttaatatccttgtccaaattattcacatttattacaccaacaatatcaactcatcaacatcacaaacacaatcaactacatatatacattagtccagtactccaacaattatatatatatatatatgggtgcacttttaatgggtattacctatgaatgggtaaaattagaaaattttgagtttttatgcttaatttttctatctaattaaaaaaatctctcatttttatatcatatgggctgagattgttccatcggtaaaaaaaattaaaaaaaaaaaagttttttagcaagaaaaataagaaaagaaaaagttgagtttgagttaaatatttttgtatttttaacatatgtttgatatagtgtaaaaataaatatttttttatattttttttaattaagatagaaattcaaatttgtgatttcattattcgttattagatcaaaattcaatggtttgatatttttaaaattaatatttatagttaaatttatttagtaactattcatggtaatacccattaagaagtattccatatatatatatatcttttgttacatagtaacttatttgaacaaaggatcatgacattttgttcatgcaatatggttttagagacttgagtggaaacaaactcactggttcagttccaagcgacctcattgaaaaatctgacagtggcttata

SEQ ID NO: 228040 - DNA, 2142 bp, Cannabis indica
aaaataaattccaacatttttgctgaaccaaattggaaacagcctaagttgacaaaatgtcaacctaggtgttgggcacaactccaggcgtcaacctgggtgctaggaccaagtttttcccctttaaaagttccctttggtccctagaaatagttgattctcaatattttttgaagtaaaaaacgatgtttgaaagaatttttgtaaaaccccttttttatggcccaagttggaaaattgtcaacgtgggtgtagggctagccctaggtgctgggccctgttatttatgcccaagaattgttgttattcctctatatgcccaggttgtattctgggttgcaggtttgtgaaattttagctcccacaccttaggttacattgctccatatattcattgtacaaaatacttattgtagtatgttgaattcaagttatttaagtttaaacttccatcattgagatctcaaagtcaacttgggcgtagggctatgatccctcccaagttgactgctatgagttgggtctactcaactctgtgatgtcataattcatgccatgtgtcaaacattaatgtctacggggaaagtttctaggttaacatttgccaccaagtcaatttcacacttgtgtgggagttgacttgatgacatgaaccaagctcgttacactcaaaactacttgatgggcatcaattttaacattcataagcacatgtatctgttcttcaagcattcccagctgaattagaactttgaacacttttatagtccttgggaatttttaaaatccattaacaaagataaagaggaaaaaatcgtatctttttttttcatttaccttttatctctttctttgaaaatttgaaattttcctattttttgttatgccattagtattaatttgtttggaatcctaatacttgttgaacatgcaattcaaaattatagagagaaaggaagacgagaaaagacttttgccttttttcttatcgtttatctttttcctttcgtttcttaaatctctccttagttccaatcgcatgaggaatttttgttcccttttaaatttgtattcctattccttgtttgatagtaattcaaaattggtttgaaaaaagagaatggaaaagatataatatatctttaacttatcatttacctcttccttaggaagctttaaatttaaaagactacaattagctttaggattaggaaattggactcaactataaataagtgagttgaaaaaaaaaaatttcactattccttcttccctccacatgcctatagtatttagtgagcgcctcaagatttcatcttcatcgagccttcaagccttcttcacttcaaggtagaaaaataatttttttccttgacaccaaatttatttatttattttttatgattttttcttcttctattcttttattgaccttattccaaggaatcataaactccaaaaagcctttgaaataatttttccaaacctctcaaaaatccaaaatacctttcttgtgccgtgaattgttattccaagcaacttagactttttccaaccaaatttcactttccttgagttgtaagaaacttcatttgttgaaattgagatggctaggatgaagagaagtagaaagtcacctgatgaatatgatccccatgttgctcaattcaatagagctaagttggcaatgcctaagtctaagaacatagacaaagtgttttatgatctgagagattgagcctttaagctcttgcgtctagtacacttactaagcttcaagctcaaacaatttaggataattattgtctcctaaaacattcattcgaaagcctcaatatggtgctcggaagggttcccagaatacatgttgtagtacctagtcaagattccacatgaatgggggtgcttacttgcccttgcatccattgtttatatccatagctgacttctttagaggatagagttgatcatgttatgccaaagagtgtatgctgatttagttttgtatgatgaatcttggaccatgccactcgagtaatgtgatgaagattaggattgtttcggagaaggatggggaatcaacaggttgctgacactccatgttatgatcctaacttgttgacttatttctttttgttatac

SEQ ID NO: 228041 - DNA, 2016 bp, Cannabis indica
aaaaagtttaaagattacttttataaataaaaaaataaataaagtagcttttttacactatattattcatctgaaataaaaataatattttttagaaataaattatctgaacaccatatatataatataatataagtaaataaacttaaatatataaatgatatattagttgaactataaaatttttattagtagagtaagacattaatcaatcactgtaaaaataaattaaaactaatattaagttacattaaagttagaaaataagatttttatttataaacttcatgaacaatacctaaagtatttttaaataatatgtaattttttaataaattagtaaaaaaatgatataatttttctctttagtgacagcttaaagctctcaaaaattaaaaatacaataaaaaaaatataagatataacttttaaaatctcctttatataaaatatatatagattgattataagtttaggagacattaatataacaaaaaaaatttcacccatgccataaattctattcacccaccaatttttttttctttctttctttatttatttattaaaaagacttacccatcaatcaaataaaaatgtccaaagagaatactaaatgtaacctcagtttaggtagtgagttttataacaaacaaacaacactgtcttggactgttgttgacactatcctgacacctccttgggcattatgccttatggcccttccccactcattcatgtcttgtcctatattgaaaatggctgtacaatcacaaaagttgttctgaacactattttcatttctatctaattttttgtgtagttcagcaatccaacatccctaaacatcttcactttcattataatctcttttgaaaactcagcatacttgtcacttgaaaacttttcaatgggtaaagagaaaagaagggtcaagttttgaatttgtttatagtacaatacaaatccattgtttttaacttgctataggcctaatttacctaaacttatctaaaaaaaaataataaaagaagagaaagacttacattgctctttactcttgttgagatgaaacttaaaagcaaaagtaaaatagagttttgtggttaggcagagtttagagcatggtccatgaccatgttactcttaataaatggctcttgaaagtacaccttttatttttttccttttcaaataatttgatgctaattactaaagatattgttgatcaaaactttttaactcgttgatttgatgttttacaaatatcttgagaatacctttcttgcattccccaaccaccaatatgatgctttagtaatctattgtatacttgcattccctcccaccaatgtatgagtgggtagggattatttgatttgaatataaggtttaaaatcaattttatttttgaatttattggaagtgataaaatgtttattgaattttattggcaatgaaatcttctgatttgaaatatttaataatcattatgagttattatcaagtttgtaacaatcttttcataattttggacaaattcataaaagatacttatggcaataatgttaattttatggttgaaatcttaagagcttcttaattcatcatcaagggaaccaagattagtcattccaaaaaacatcacctattccttaggaatagagtccaactctaaattccccatcgttaagtgatatttacataaaatatgaatgttaagaattctttttccaattttcgatgaaacatatatgtgttaataaataatgagcatcaaaacaaaaggaaaaattaacattaacaattatgctcaatctaaaacaatacaaaatcatcttatttaaggcatcaaagatatataataaaaggcactcttaccttgaagtaatggccatgaattcttatgttcacttgtgctcttcccattcatttaatgttcacatcaaagaaagacaaagtgtgcaagagtttgatgaacactactcttacattctctcaatacactagccacac

SEQ ID NO: 228042 - DNA, 1680 bp, Cannabis indica
tttatatgtgtttaattccattgttttagagagttcatatttaaggtgttaaacaacatacatgttagtaattctaaatcttggtaaaataatctccaacaatataaacttaactgataagttaacttatcagtttatatataataatgatattatacaataaataaaaactttattatataataaataaaaacttaattgataaaagttatttcaccatttcttaatcactaagaaatttttacttttaggacactaggtgaaatcccaaatacttctacttatcccaatacttacactatcaacttatcataatattcctatcaaattcactaattaaacttattatgatatttttggccccaatcgagtctccaagatcgccaaacgtaaaatatttttattccactaataactcatattatattcacacgcgctatataaatttccataattaataaattatgcttatttatccacttacaacaaaattaaaatttatgctgaagtagattagtaggatcataattccacttattacctaattagcccataatatatataaaccctaattatttaccattaggcttatcaatatactacactggtagtctccaagaaactaagaccttattttcaagctcaaactatttaggaactgacgaattacactcccagttactggccataagaagaagataagatggctgaagtcctaatctccctcaattgagtattcggtagtaaaacaactacctgggtacacacgacatctggacaaggtctcataggtcttgggatgtctcacgtcaccttcaaggaaaatgtcccacatggcacccctctgacaaaatcccaccaaatcagtggaatgtctcgcttgtcttgtttaaggagagggtttttgctaaaatatacgatcaatctagaaattgaaacgaccactactttgacactgtcgtgttcccatgcaccaaagggccatgcatatctggacatgtcaactctcaacagtatcttcaaataatgtgtcacacctaccacttttggtattagaccttaagcccaaggcccaatctcataacaatatgtaaataccccaccaatggctttaaacttagaataatcccacagtccgggtcatcccatcctgttttgcatgactgcctataaataagacagtatcttcaccattaaaggtgtaaaaaaaacccttgtatttacagagagaaaactttgctcaaaagtgtggaaaaacaccactaatactactactgattcgtgaacaaagactcatcaatgccaagccacgtaaaaatcttttgtttatatatatatattttttagcttttaattcttttttttttttttttttttttatctagtttttgaaaaacttagtaaacacttatattttataatatttaatagaatttaaggtattaaatacaagtcttattggtagatgttaaacaaaataaactttaaatgtaaaaaaataaaaatattcttgatgagttttgatactaaagttataattatgttaataagtattagggctgtacatcggtcggtttgagcggtttatcctatatattttctaacccaatctaaagtttgggttgttaaaatttaagtgtaacccgcccaatttttttttaaaaaaatctgtaaaccgac

SEQ ID NO: 228043 - DNA, 1599 bp, Cannabis indica
caggatacagaacatgaatcaggattactaagggagcaagaggattcacggagggagagtatacgactaaaatttgcacaactgatggaagcaaaacaattcagggaggcgcaactatctgcaactgctgttgcgagaggtacgactgttatcccccctgttttaagatctggtagtataattcgcaacatagaaccatgtttttatggttcatcttccaagcacaaagttaagattaccagagaagacatacaggaagaagttgatttttggactccatctattatttgttatgtgcttggggctaatcccccaatgtctattttagatggttttgttagaagggtctagaaggacaaaattgataaggtgggaatgatctcatatggggtattctttgtgcggtttaacacaattgaagatcgagatcaggtcctatctagaggatacatatttttcaacaaacgccctgtgattatgaaggcatgggacccaaacaagaatttttaaaaagaagatatccattcagtgcctatttgggtacaattgcagggattggaattgaaatatttgggtgagcaagttctgttcaggattataagccaaataggagtaccggttatgttggattcattcactaaagctaaggaaaagttgaattaccctagaatacttatagaagtttccttgcaacaagaattcccaaagcatatagaatttgaagacgagcatggcgatgatatttcactctatgtgaattatcaatggaagcctacaacttgtgctcattgcaaaggagtaggtcactctactatcgattgcaggaagaaagagggaagcaaagctgaataggtggttaaaaaaccagcagtggagtctcaggcaaagacaacaagtgatggggatgggttttactaccaaagaaagtgtggaaagagaagaatactgagaaacaagaagcttctgctgtggtagtagcaaattcttttggtagtcttcaacaggttactgaaaatcaacaagagaatgctgatgggaatatagaaggtgaaaatgatactttgcttgttcatgagataggcatagagaccattggggacacaagaggagggggagaacctcctcttcccaatgaataaaatcgttagttggaatgttcaaggattcaacaaccaacaaaagcaacaaatggtgaagcaatttcttaatacacagaaggttggtttggttggtctcctcgaaactagagttaaggcatcaaaacttggggccttatactcgagtgtttttagcggatggtgcttcacttcaaataacccttggcatcctggtgggagaattgtagttagttggaaaccaactaactataatgttaatattctaaattgttcaagtcaattggttcatttggaggtatcaactgtggatatgaaggagtcattttatgtcactttcatatatgccttaatgatgaagaaggaaggaagaagttatggcaagaccttcaaaatctatctacattgaagccatggatagtaatgggggatttcaatgatatttgtcaaaggaagagagaattggcaagcgagtgaggtactc

SEQ ID NO: 228044 - DNA, 2225 bp, Cannabis indica
ctaggaatgacactagatattccacaatcagataaatcaagatatgaaatatttgattgtgttttgagccaagtgggaaattgtggacctaagaaacaagatctcaaaccaatgtattggagttgaaaagaaggaacccatttgtttgacaatttcaaagttaaattggcattagaagataggtcaatgtggtccaacttggagagattctcaaggtgtgtttcatagataactcctgtaaaagagttgttagaaacatccaataacttgagagtggaaagcttggcaatactttttggtaaatttccattcaactcattgttggagatatctaactctttaagagacatgggaaaatgttcaacattctttggaaatgttccttgaagtttatttgagcccaaatttagaatttccaatgaggaattgtgtttacaatgattaaggatatttatgatatcatcaagggtggaattgaatgtgtttccaaacataactaattctctaacattgcaaagactccccattgattttggtactttcccttcaaaatgattcaaggacaagtaacaagtcctaagatatttcaaattttcaaatgaacctaaaataggacctttgacattgaagttgctaagcaaagtgagatcaagtaaattgctactcaaattaagcaagcgagaaacggttgtagacccaaatgtggaagcatagacacgaatcgttgtgattgaattcgaagaatttgtggtacgagaaaaagattctaaatctggaaatcgacaatcatataggtacaagcttgacaaggagggagctgtttttgaatgtatgaaaccaatccatagatttagtgaaatttgtacttctcaacttgaaaactcttagataagagagatgagaaagccattcaaaactattacttgtcaaatggctaaaaagaccattaagatcaagaatatgcaacttagtgagatttccaagttgtgaaggaatttcaccaaacaaagggttctttgaaaaattgagatattcaaggtttgtgaaagaacctatgaattttggaattttagtgaaagaattgtaactaagatccaaatgctccaaatattggagttgaaccaaagatggactaatttcaccagtaattggattccaacccaaaccagaagaataataggtaatattaggacgaagatcaagcatgataatatgattagttaaattattgcaccttattcctttccatttgcaacaatctttgctgttatttgtccaagatgataagagattctcagaatcatgaaggccttgtttgaaggtcagaagagcttgtctctctccttctatgcatgagtgattcacttcatcatcataagaaactccatgacttgctaggaagaacacacttagcgcattacaataactacaatattgatcataatttaaagtgattaataattataagtgagcattgaatgcaatctatgcacatccatctaactatatatagatactagatagagagaaattcttttgcaaaaaattttacttttagtcacactaaaatttgtaactataagtaaaaaagttgtgactaattataaatcaacattcttactttgtgactaaaaagtcagtgtctaaaggtattagtcacaaaaatcataaatatatttttggtcaccatatttattgtaacaaaactaaattagagacaactagtatttaaatactatgtcatatttattatttcatatatctttctaagaaatttgttaataatttaacatcagtaaagtttttttgtatatatatgaattattccaacttcattaataagatgacagtgactactcacactattacaaaaaagactaatttttgtgagttttaacttcaaataatataatctaacttctttttttttttttttgagtggcacatgaaattgtaatatccacgccatatgccatatattttaggtagtaaaaactaattattaaaaaaaaattatgatacaaattatattaagcttctaaaatgcagaaaaataaagatgatgataatacttattaaactaaatataatatttcttacaaaactaataagaaataaaataaaaaagaacaagaagaaatttccatccttttgttttgattttaatcaagcttttgttttactccaaagactttgactagccattttccattccttttttttag

SEQ ID NO: 228045 - DNA, 1886 bp, Cannabis indica
aatcaataacttttacaaaatataaatttcaaaataatatttaaccattcaataatcaaaatgaataatgttatatttagtgttttctaacaaaattaaaataaaaaagtattcgacattgaaaatgggtaaaaatttaatatcatttgcaatactattggatactccactcatgaaacgattgattctattttttttttttttattttttgagataaaataacaattgattctatttgaagcattaaaataattttctttttatttttacaaatgtaccgaaaaagaagttaaaatgggcctgacatagatgggcctcacatatgagggcccacttttgggatttagaattatgatgagcactacttaatgaaaatggagtgtaaactactgctctgctccatgacaaaaacgttcgagtatctttacttttgtcattctttttaatatctttatcaccaacaatcattctatatatcttaatttaaaccatagtaattaataacttctcaatttctagttcatattcttattcaataaatcagctttttatcttacgaaaaccactatatataaatttatcttacttttcttattgatcacatggagtatattttagaaattgtactgcttttgtttaattaataaacattttagtaaacaaaaaacgtcgttgagagatgacatatttcttttctgaaggggaccctccatataggcaaaattgaaatttaatcaataaaagatgcatatgtcactatatataaatctctttggtattcacaattaattgcatgagtgaaactctttttatcctttttttttattggtcaataaaataaactcctttttctttgttttgttgtcaaaagaaattaaatgtaatacttcacaaaagtttatcattatgcattagacaaagaaattaaatccaagttataattgggatattgatatatcagtatgaattaagaaaaaattgtagtaatgaaggataagtgagagacttttccttatttattttattttttaaaatggagggagctttagatttaatgagaaatgagagaataaattgttgattttttatttataattattttgaggaaacacattatttaggtaaataataataataagttttattgacacaaattataataagcaattaataaaataagatagtgttttagtgtagagtgatcagtctcacatgaaatatgtctttatttatgacaaaaattatattgtatatctattttaatttcttttaaaaaaatttaccttttttcattattatttaatttatttatacccagctttataagttatttcctgtgtgtttaattttaataagttatgtaaggttatatctagtactttgattataaaataaagtatttatcaattaaattattttacattttgttaatatagaataaaaaataataattttcaacttaatttcttatttataaaggtatataagatgcaattatagcacttgaaatagaacctaaaaaaatacctaattttgtgccaatggatgaagacacacgcatacaacaaaaacacatattttttgagaactcgtattatcaagaaaaatatatacagtacaattcctttaccaaaaaaaaaaagagaaaggaataatacaattattaattctattattctattctaaagccaaatacatttatttatttttttggcaagaatagtacgtttattaattattatcgattttcaacaaaacaaacaattcactaatattatataactactctttcaaaaagagaatatatttattcatattaaattataatataaaactcaatctgttgtgacacattgatactgatacatagccttaattagatata

SEQ ID NO: 228046 - DNA, 1256 bp, Cannabis indica
aacttgcttccccaacatgttaaggcaaatctaaacaaagtgggattagcaggccatagtcgtggtgggaaaacctcttttgcacttgctttaagtaaagagataaacactacccttaagctttctgcactaataggagttgacccagttgatggaatggacaaaggaaaacaaacccctccaccagttcttacttatgttcctcattcttttgatcttgatatgcctgtaatggtcattggttctggtttaggtgaagttaaaaggaatcctctgttccctccttgtgctcctaagggtgttaaccatgtggacttctttgaggaatgcaaagaacctgcttgttactttgtggttaaggattatggtcatcttgatatgttggatgatgaaactaagggaattagaggcaaattatcccactgtttgtgtaaaaatggcaagtctagagaacccatgagaaagtttgttggaggaattatggttgccttcatgaaagcttatctaggaggtgatagcagcagcttagttgctatagagaacaagagtgagactcttccagttgaacttgaaactgttgagtttcatttatgaaaaatagctcaatcaatggtttggttatggctgctgagtattggagtagtagtgctattatgcatgtcttctatatatacataagaaaatagaatttatatttatgtgtataatgatccaaatgtacaacttcattttcagattccaatgaagcacttgatggtgaaaatcgtaacttacaaagattgcataagttgtttttacaaagattacaatgcactgatttagtggaacgatctactattactcagaccgaatcatacaaacttatgttcaaaataattaaaccacaaaactcatggtaatgtcctcctatttcacttaggaagggttatattatagttacaaagtgtttacgaattcgggaattcgaaatctattttttaaaacatgcataaaatttataatatcaaaagtgtcgccaagcaacaaacataataaacttgtcatgtctcgaagatcgtaaccctccaaatctaactatttggatatgtatattcttcaataagctcatcactcactatctttcggttttagctttgcctttatcaatacatagaaatacatatgtgagtcgacagactctataagaaaaatataaaacatacaacatatatttgacctgtaattaggcgcccatacacccaattaccataagtcta

SEQ ID NO: 228047 - DNA, 835 bp, Cannabis indica
agctccaaagtggtaacttctccttccaaagccattaagttgtaataatatataagagtattttgaaaattgagtagagagagattgattttgaaaattgaggtagaagagagaaaattgagtagggaaagggtgagtgaagatggtatttaaaaggctagaaatttaacaaagttagtagatgatgggtttcaccacagcttcctatagcttggttacgatagagttaggaaccaacactttagtgcccacttgatgaactgtgggggactactataatttttattaataactacatatatatccattaacgaaaaccacttttgtttttatttacgtttatttattatttataataaatgatatataatatgatgatcaattaaaatttcaattattattagtgtggagggtccaacttccaagcctccaattgcacgtttcctgactataccttctggtttatttatttaagctatcttaaatctgtcatgtaaaaagtaaacccacttgtaatatatataatattaatatattataattgtagctgaattcccacatgcttatttgatttatcaaatatatatattcttgttgaaaaattggacactatacggtattaaaataatgtgataagactttaactgttttatatgaataaattcatcaaacaataattaattattttaattaaaataagaataagtgacaacttcaaattaataacatatattagttattatttcaaaatgactttttcatttggccgctgtagcaaaagttgagcaggagcctcacttaacaaatcccactgtcattcgcatgcattactcat

SEQ ID NO: 228048 - DNA, 1848 bp, Cannabis indica
ggactataaagattcaaattatgttgttcgatagtatgaatgataatatatatatatatactagttatatattagttgtagaattgtaattacttagtttctaatttcttcctagttacctatttagtctccctagttttgtacatatatacttgttattctattgaataaaatacactttttgatccaccatttacaacatggtatcagagcacaattcgaaattcaaaattaggggtttttcaaaaaattgagatttacaattagggtttgttcttcctcttccttaaagttatttctcggaaaacatacttaaagagcacgtgaactctcaccacgggtacccatagactgcccagctgtcgatttgcatatccatgaagtttggtggtcggaatcctcgtgcttgagaagctttattccgactccttttccatctttctgaccttgtgttgcattcatttcgaccattatttcttcttttgcgatcgttgaggtttgttcgtcatttattggtgtgattcttcgtttctttgttcttgctttgatgtgtgaggcataagtcagccattgtgacgaatatggtgccggtaatgtctaaacttactgaccataaactcaatggttcaaactatttggattggagcaagaatatttgcctctatctacggaatattgacaatgatgatcacttgactaatgatcatccaaagtcggattcaaaggagaaaactgatctgacatggcttagggaggatgctcgcttattcattaagattcgcaattctattgaaaatgagggaattggtaataaatcactgaattttttaaagaactaatggattatttggaatttttgtaatccgaaaaagaaaatctctctcgcatgtatgatgcgtggcaaagcattttttcgtgtggaaaaacaagatcaattcctcataaactattttatgacattcaagaagacatataaggaacttaatatgttggtgccttttagtcctgatgtgaaggttcaacaatgtcagcgggagcagatggctatcattagctttctggcgggactctcttctgaatttgattctgcgaaaacacaagttctttctggatttgacatcttatctttgcaagatgtctttagacgtgttcttcgtactgaaactactccatctgctccgcttactagtgctttggtaagtcgcaataataataatccacctgggagatcttctacctcaagtggaaaaaaagggggatatccacaaaggtctgaaaaatttgagtgtagaaagttttaaaaattagcaaaggcagtttgctaatgttgcaagcactagtgatgcatctgaaaaatcggtcgttacttctgcggatggatttgacaagttctcgaggtttcaggaatcactcaagtcttcatctctttttgtcagtgtaattgttgattcaggtgaatctaatgcatgccttctttccacatcctcaaagtgggtcattaattctggtgccacagatcacatgacaagtaattccagtcttttttcactcttcagtcttatagtcccacttcttttgttaccttagctgatgtatcaccatcttctattcttgtgtctgacactgttacttctatttgcttactttgtcatcagtcttacatttacataatttattttttaatttgctttctgttagtcaactcactcgtaatctaaattgttgcatctcattctttcctgatcattgtttgtttcaggatcttatgacgaagaagattattggtaaaggacatgaatctggtggcttgtatgttcttgacccacttccgccaacctctattgcttg

SEQ ID NO: 228049 - DNA, 1690 bp, Cannabis indica
gcaaaggatacttattccttaccattaattcatttaactcacagtggtcaatacgcactcataaggtttcatccttcttcttcacaaacaaaatcgacgtaccccaagataaggtactcggtctagcaatttcaagcgtaacatcccctataactaaatttcaactctccaattaccatccaatatagaactttaagtgtaaattttgctcccattatcagttcaattcaaaatcaacctttcgcttcggtagtaacactggtagcttctctagaaatgcatctagaaactcttagaccacgagattgagtctcggtcccactaatgttcctttcttaatattcaccacactaactaaaagttgttacatcaatcccataacatatctctcgctttaagtgttgagatcaatggtatctaggattcttacaccttgcccacaaacacaaatgggtcctcaccctctggttcaaaagttaccatatttcttttacaattgatggtcacattatactttgtaagtcagtccatccccagtataacatcaaaatcctctagatttaagtcaatcaaatcagctgacaattcccttccttccaccagcactaaaaaggatctaacccacttgctggagataactaattctccaataggcagcaaagtactgaaaccacgctagaaaacatcactatgtatatccaagttcccaagcactctacttaaaatataggaatgcacgcaccgaaattaatcaaaaatggtcaaataaagtgccaacaatataaaacagatctgtcacagtgaaagaaccagcatcggcctcttctaggtcaaggcaaatacccgggcaggaacaagagtatcatctttcttttgttcctgtcgtagtaactgagggaaatttcttttctgatgacctactaccccacactagaaacaacccctagtttgacacttgcctagatggcgtctcttacaccttggacattctggataagtctgccaattctcgtttccaccacgttggaaaccttcgttaccataaattatcttactaggactcataactggtgggtcattagctctttttcttgggatcattagggtcagcacccttccaaatccaacattagatgtttacttccttaaatctcttctcatggtatttctctttgcgaattcaatctttcgcaccctcagcagcaagggtcaactcaatcacttgagcatagattcgaacgaacctaggttatttagaaattaaaaccacaccacgcgcgatatgttcttccaaacatcgaatgaatttaactttcctaacgaccttagcagccacttcattaaaggcaactgccaatcggtccaacttggtatctcactctgtcaccacgctgacatgagttaaccgtgtaaatccttctatctttacaacccagatggtctcttacatcacaacatatggtgatggaggattcacactcacatcgctaactccgagcctagtaagctcacaattatccttactagattgccttgggtacaccttccaatacacttgcgaccattctttccatcattaaaatatttcgaactagaatcaatgataataagcattactgcacatgcatatacatatttaataattttatatcaaaacgtatcatgctctctaacagcttacacatttcaa

SEQ ID NO: 228050 - DNA, 1739 bp, Cannabis indica
ctatatgtaagtagcttgattcctgtttattattatgatctatcttttcaatttttttaagctttcactcttgttattcctttttcatcttactttacatttatgtttatcctctcctacatgctcaaccataatcaacaatgttttttgttcaagagagacacaaagtgttacactaccaatcctggcctccaaaagtagccgacaaactcatttttattggtattaccacgtgatttgtggcctcaacctagtcatgcaccattttacttggttcctttctttttttttttttaagttttatgtaaatgctcttcgaattgaaaattttgtgataataacaagtttaaagcaccaatcgagattttctaaaatgacattctttttcctaattaggaagcattcccttttttaggcttctgtatataggtcttgtaaagccctttaattactatttagtagtgctggcccttcataattttgtttttgttcatcacaatgccgatattattaattaataaattaattatttcgaaactcactttatgtcatgcttcacactgtgctccacagattcatgacaaacatgattataaatttataatatctatgcctccgtcttaattaaacatgaatattattttattttatttatggcataatcatatcaattataccctaaaaagtctggagcaagattatgtcactaattgactcaaaaagtataactactaatctatagaaagatgagtccagcttgaatccagcagtaaatgaattagattctataaccacatcatatgtttttcaatttataagaaagatttcatttcttctttttcaactattatagcttctcaaccagtgctttgaaaaataatcttatatttatagatcagggaattgcatgactttctaacttttattcgatcaacttctccacgtactgtgaacctttatatatgtgacgcatgatatattgacaaggattgaatatattaacttgcatgatttataagagagaaaagttcctaaacgaaataagagattaaattattgatctacttttttttgaagaataattaagtaggagatcatttgatagtttcactattctttttttttttttactattttctttaaaataaaaacaataataatatgtttggtaataatcaattttctttaatacatattttatatatatatatatatatgcatagataaatgtgtttttgtgtgttgatgatttctcaaactcctacacatggacttgatgggtccaatccaggttgaaagcttgaatggtaagaggtatatttttgtgtgtgttgatgatttctcttggttttcatgggtagaatttttaagagaaaacattgatacttttgatgtttttaagtatctttgcttgaaattaaaagttcaaaaagattgcaacattggtaagatagttcgtggtaagagtaatcatggaaaagattttgaaaatactgtgtttagtaaattctgtaaatcttatagtatttttcataatctttctgctcctaaaaccccacaataaaatggaacggttaaggattcccaccttcttgatcatgttttagcgaggctttgtatggcttgaaacaagcaccccgtgcttggtatgagcgtctatctgagttttttacactctcatggttatagaaaaggaaatgttattaaaacacagttcattacacacattcaatttgata

SEQ ID NO: 228051 - DNA, 843 bp, Cannabis indica
tttagctggatgatcaagataatgttgggtctattatttggatttgtgtttggtatttgtttttatgtgtgttttaggtgaaagattgggagttctctgtttttgtttattttggtgtttttcgagtccttttatgatgaaaagggtcaattattgaaaaagagaagttcgggactcaaagtcatattcagttgcagttctcgacactaaaatatattcaaagttcataattttaagctccaaaagttgtggttcaaagtgagacttcccagaagaaaaatgaaggaatggtagaaattagaaaactacagtgaaagttgcggcatagcagagaatgcagcggcactccctcattcaccaaaaaaaataaaaataaggaaattaaatcacgattttgggaaacaaaagaaatgtcgcgacattacaccttatgctgtagcatttgcggtttttgggaaactttaccgtttttggtttataaaaaggagaaatgctaaaaggcactaatggtgtcaaacaccctcctacgtgtcaatatcgctattggtgtaatttagtattgggtcccatatagtttaatataatagcttttaatgagtattgctagccaatcgtaaagcgatgcatcttaagggtgttaggtaccactggtacccaatatagcaatgctctataaaaaggtgtggagctcggttttcaattaattcaaacttggagacgaaattggagcagaggagaacgattggaagcagaagatacttttggagttttccaattagtgttctttctcatctgtatctatcttttatgttttttaatttaatctttgttgttttagaatga

SEQ ID NO: 228052 - DNA, 1359 bp, Cannabis indica
ggcacaaatctcaaaaagaggagagagaagagagcatatcatgtgcttttacaaactattgttgcaggaagaggaatgttgtgatgatgaaactgcacccttgagaaagtagtgatttcactttcattgatttaaaatcttaaaatttcatttgttttcaggcttttgtacacgatcctctcatcaattggcgtcttttcaacttcaatgaagttccacaaatgtcaatgcttgcaagtactcatgtccctgccgttgtgaatagcgaagaatctcctgcaaatggagatatgcctcaacggggcgttcgggaaagagaacttcttcaggtacattagaatctgagtgtgtcaagtagttttgcatcttttattttgctgcttatttattatgttccatatgcttttaggctgtcaaccaacttggtgatgcaaatgaggtcttaaacgaacgtgctgtggttgttatggctcggatgagtaataaacttaccggacgtgacttttccacttgctcgtcagtatcatcaaccaatgctgttcaactttcagtagaccacaataccttgatctccggagatactcgtgaagtagaacacggtttatctgttaagctgcaagttcaaaagttgattatccaagcaacatcccatgaaaacttatgtcaaaattatgttgggtatgtgccaattgaacccgcttcttttcaccaagtgttaattttggtcatttattgattccatcttcccataggactaaaaatgtaggtgatatttacataaaaatggtattgcatgactaataatgaaattgctttggttctttcaggtggtgtccattttggtaaattccatcacaacaactgtatatattgtacatatgttgtacataactttaaagcctaaaaaacaaccgtaagaaacttggcatttgatgatgtgtatatagcgcatgtatgtacagcttctcatgtaatttatgctctcttttagagttcttaccttttattattattattattattattttaatttttcaaccacgtgtttgtatgatgccattgtatatttaatttatgcatatcttatgaatggcgagtaatattcatttttatttacagttgtcttgcattcaattattttaaaaattaaaaagtaaaacgatagctgttattaaaaacgactggattatttatttatgggaaatttgcggcaaaagtccccaaaaggttcacgttgatgctgattagtgcccaaggttcgaaaatagcggcaatagtcctcaaggtcacactttttatttgtccattggtctccaagttaacagatatgttaaatccaattcaaatgtcacgtgtcga

SEQ ID NO: 228053 - DNA, 937 bp, Cannabis indica
gccatgtaataattagaataagctagtatagcccaagaatgccaactcataaacttattgttattcctcgggcaaatgtatatattgccaactcaagttcatgtgtatatcgaagaaaaaacttgtagatttcgataattagagtttctgtaaactcatcaacttttgccaaatatctttgttaaatttcgactatgaaaccaaaccccattgaatctttttattgaacacatagagatcaatctgttgaataagaaattcaactataattttataacgttggagctagtgttcacttcttggtgaaaggctgacagatttgaatccaaaaaggccacctgcagccactaaccatcctatagaaacaaagaaagcaagtgattgaaattatacacaacacaaatctaaacagaaaaacctaagctttataactatgcatcttcagaaatttaataaatacaagaaaaggtggaaatgagtattgggtaatactttaaggagtagcagataattttcgtatttacactgataatgtaaacaagtggtatctacatcaaaaggtgagcatgaaaaagctgctactttttctgtttagcgttattttcttagcaatttgttccagttccctttcagataacgcatgaaaatcctttccttcaatgattgtaggatgagtagcatcttccattgaattaagtatcccacgctccaaagtaattgccttagctgtttgaagattgtctcctgtaactatgcgtacctagagagcgacaaacatatgattgcccatttacattaatactcaaatcataaatttgtgtaatagcattggaataaatctctttagtaatttatttacatgtccagtattcttatttagatcaagtaatcaataaaaaaaatgacacaatacgtacatatatcattaaagttggcg

SEQ ID NO: 228054 - DNA, 2818 bp, Cannabis indica
tgtgggggctgaaaattgaaattcgacgtgagctattgatgtcgactcctacggatttggccgatgctatggccaaagcacaattgtatgaagaccggaatgaagatttgttctctcttctcgtaatggaactccacggccaggatgggtcccgaaatcaagtcccatgagtcccgtaacacctccaagatcaggtacagcagtttcttctgctcctctttcacattctacaacagcaactttacagaaaacaggtgttactcctttacctgttaaacgtttaactccggctgaaatgcgggacaaaagggagcgtggtatttgctttacttgtgatgagaaatatagctttggtcataaatgtaaaaacagagtaacggtgctttgcggtacggaggatgatgatgttgatgatgagttacagccaaccgaaggggggaatctcaggttttagaggataattcagtggatgaagtcagcctgaatgcgttgtccaattcctctaatccgcagatttttcgaattatggtcaaccatggagcagagcaattagaagtgctcatcgatacgggaagtaacaacaatttcattcaagagtctctagctacccaactaaaattacttcaggaagacaccaagtgttttaaggtgtatatgggtaatggcaattatttactatgttccaagatttgtaaacaagtggagttgatcttgcaaggccacactttcattgttgatttgtatatccttcccatatatggtttggatgtagtgttgggaatgcaatggctgcaaatgttgggtctgtgtgttcatgatcataaagcgttgactatgagttcacttggcaaggtagcgtggttaaacttgcgggatctcaggataccgctcctcatcaactctcttactcgcaatttactacgctgttgcgagagatggacaaataagagggttgtttcgacaaactgcggttatggaggagcatggggttgatgctttgattccctcatcgcacaaacaacctataccggtggaaggccagcaagttttacaagagtttgtggacgtttttgaagagccaaagcagctacctccttatagggaagtcgatcatcgtatttttttgcaaccaggatcggcttcggtgaacgtgcgaccgtatagatacccctattttcagaaagatgtcatggagcagatggttagtgaaatgaggcaaatggggatttgtcggcctagtattcatgtattcatcgcccgtcttgttagtaaaaaagaaagatggtacatggcgtttttgtgtggattaccgtgcattgaacaacatcatgatcaaagaccgatttcctattcctactattgacgagttgttggatgagttaggcaatgcagtggtattttcaaagttggatgtaagggccggttatcatcagattcggatgcatcccaccgacattcacaaaatagcttttcgaactcatgacggacactacgagttcttggttatgacattcggtctcaccaatgccccctctacttttcaggcagccatgaagaaggtatttcggcctctacttcgagtttgtgtcattgttttttttttatatatcatattttggtgtacagctccaccaaagaagcacatgtggatcatcttcgacaagttctccaactaccgccaacacaaattctttgtcaaagaatccaaatgtcaattttttcaacactctgttgattatttgggccatcttgtctctgcctaaggagtgcaagcagaccccacaaaaattgaagccatgcttaattggccccaaccaaagaacttgaagcagttgcggggttttcttggcttaacaggatactaccggcggtttgtagctcactatgccactattgcagcccctcttacagaactactcaaacgagacaattttaattggtctccacaagcagcccacgcatttgaagaactaaagggcgccatgacaagaactcccgtgctacggttaccgaacttttcaaaggaatttgtggtggaaacagacgcttctaatgtggggattggcggggtacttatgcaagaaggacacccacttgcctactttagtaagaaattgggcccaaggtttgtgggagcttccacttatatacgggaaatgcgagctattgttgaagcggtttctaaatggcgccaatacttattgggacgccatttcattattcgcactgatcataagagtttgcgtgaactcttgacacaagtcatccaaactcccgaacagcaacactttgtccgtaagttgctaggatttcatttcaccattgagtacaaggcaggtacattaaactcagcagcggatgctctctccaggaagtccgaaagctccttttctgttcttcaaatggccatgagttcagcttcttttgattttttggaggagttgaaacaagaaaacattacttgtccggatctccgactcattcatgaacagctacaaaggggggaactgatgaattctccttattcacaagctgacgggttgctttactatcatcgtcggctagtcatcagtgaacactctaatctcaaacaacagcttctcactgaatttcattcctccccagtgggcggccacgcaggtgttgatagaaccttgatgcgcattagtgccaatttcttctgggttgggttacgggcggatgttcgcaagtttgtctcggcttgtaccatttgccagaccattaaatattcacctacagccccatatggattattacaacctttggagatgccagaacgggtttgggaggatttatc

SEQ ID NO: 228055 - DNA, 2937 bp, Cannabis indica
atttagaagcaatacattttttaaattcactatgaaataaaataaaataaaaactaaaaaaaattattactaatttatgttgctactaaaattaaataaattaattttacaacataaatattattttcctatttaattaaatctctaagataaatatcaaatatttcagtgtctagaacaaaatcaacttaaatattaattttgtaatttaattaaatatatctagaaaaataccaaaagtctgcctggaaaatatctatctagataattcataaactaattactaattttctagtttaaaatataatatattttaatctattttttcaataaatcattaataaaaaattacttgatttaagttgatctaaaattaattaaatataactaaaaattaaaaaaaaaaaatttaaggtgtggcgtaagagtcttcccctacttctcccatggcgaagaagaagagggtcggccggaagcctgcaattgctaccatgacagacattggagttgatctcccttcaatccatgaagaggaagttgaaccagagatgatcgaggagtttcacgatactatcgaaaacctgataatggagaatgggattgaactcgttgacgcagaggctgatcgagggtcttcgaaaccaggtaactgggcagatgaagtcgaactggctgatttccaagctgatgctagggatttatggagtaggttcaaatcgaatcaggtaccatctccctctactaaacttacttatacggaactagttacagttggagatcaaattgtggctaaacttgacctagaagagatataggtagaggcctctttctggaaaaattcaatagtctgctttttattgggagccaaccctccttttaaagtgtttgagagctttgttaagagaatttgagggaattttggcatagagaaagtggttagaatgcattctggttgtaccttggttaatttcagagatgaggctacctggatcttattctggaggctggggtattcattttgataaaaagccagttgttcttaggccttggactactgatcttgactcgatgaggatgattaactctgtaccggcttggattgggtttacaatattggggcaataataatctaagtgcattagttagcactattgttaaaccaatcatgattgataaggtgactcaagaacgttcaatggtgaaatttgctaaaatccttgtggaaatcgagatttcggatgctcctcctaaaaccatttctttcattaatgaaacgaaacaattggtggagcaaacaattgaatatgaatggctcccttcaagtgttcagcttgtgccaatctaggccatacggttgctaattgcaataaagagaagagagtagtttggaagaagaaaccaactgccggaaaagagactaaggtgactatgaataaagatcatcttactgtggacaacccaggaagtattcagagcaggaaaatagggctgatgatgaaaccgtagctgctgatcaggtgttacaggcaggttcgaaggagaaaatggagagggggacaacagataatattgctggtggtagctggattacacctaaaagaatagctttgagacaggtgaaatctaaagcgaccaaggatgatccaaaggtgaagaaaacttgtaatgggtatgttgttttgcttgctgccatagatgaagaggtattgtgtcctaactcagaaatagtgattgatggaagcaaataatataagtgggtggaatgttagaggcatgaataagaaggacaaataaaaagttattcttgatgtttgtaaattgaataaaataggctttggtgctttgtttgagactaacgttaaacatgagagaattaatgaaatgatgctagataatttttcgaattggaattgttattctagcaatgttatttctggtaggatcttgattattttgcaggataagcttgtttgggtggatataataagtgaaaatgctcagatggtgcatttcaaagtgaagttttgtgggcagaaacaaggctttatgatcatggctgtctatggtagtaactcaatggaggatcataaaagtctttgggaaaatcttactagcattgggacgttgaatgaaccgtggatcatttttggtgatttaatgcaatgtttagttttcatgacaaatgcggtggaagacctatccggaataatgacattgtggatgctcaatcttggcttgccttgggtcaagttgaggaatttaaaagctcgggctcgttctacacttggactaacaagcatgaggtgggggatagattatattctaaattagatagagtttttattaataatatctggttgaataattttcctaactaagatgcttgttttaagtgggaggtcatctcggatcactgtctttgcctaatccaaaatgaagtgcaatgtaatataggggttaaactctttcgattagggaatcattggcttcttacaatgtctatgttaacactgtaatggaacaatggaacaaaaaggcagttggttgtggtcttgatagtttgatgcagagacttttagagtgaaacatgctttaaatatttttaatagacatgaagtgggggatgctactttagagtacaggaaggcgaaagaggattattgtgaaatccaggaagaggctgccttgaatcctaatgacagatagctgcaacttgcagtttcggctaagcagcagatttttcttgctgctaaggacagatttgagcagaaccttagacatcaaagcaaggttaattggattaaatttagtgatgagaatactagttactttcaagctgttatgaggaaaagaagacttgaaaacaggatcattactttcatggaatgggacactatcattgatgattttgaggaagtggttaaacactttgtcaag

SEQ ID NO: 228056 - DNA, 978 bp, Cannabis indica
acacgtataaaaaaataattttttaaacattattttatataatgtaaaattattttaaatttttcaaaatttataaaataaattatactaaaataattttgtaaatgtggaaagagaaactcatgtgggtatattgtagaagcacttaataatttatttattttcttttctttctttcctaaccaaacgaataaaatgaaaattaaaaagaaaaaatgaaagaccattaattatagctgtgaagtgtctgactggttagcttgaagtgactaattttggtgattgttaatctccaaccaaatctctaatactatggctttatgtcttattaattgataattaatgattatttttgtttggaaataaaaaataaattaataattatccttctttttttttttcttttgaaaattgggagtaaattgattatcctaagcatttaatttaattacgcggttttatttttttgtctatatcaaaggaaaattcaaaatctttttttttttttgtaccaattgatgatttctttcttgagaaaaaaaattgcttaacttataattattaaacattttttaaaatgaaaaacattaattttagctgtgaagtgattggttagcttgaagtggagatttttggtgatagttaatctccaaccaattttctaatgtatgctttatgtcttattaattgagaattaattattatttttgtttgcaattcaataaaaaatatattaattatgcttcttttatttttcttcttttgaaaatgggaataaattaattatcttaattcttaagtatataattatgagtttttaaatgaattctttatttattttgtcaacatattaaatgaaaataaaaactaaataaaattaaccaattgatggtttaatttcttagggaaaaagaataaatattgcttcccctaacctataattattaaacatttgtatatagttattctcaataaata

SEQ ID NO: 228057 - DNA, 1614 bp, Cannabis indica
gcttcacaacagagtggtatgaacactaatgaacccagtacttccacgggtaattcaggtatcatactagcacattgttctaattctcctatacatgattcttggattgtggatactggagccactagacacatttgttctaatatgaaactttttcaatacatgtgtaagataccctctattaaacttattctacctaaccatgactgtttaattgtgaaccaaagtggatctgtcaaactagaaaatgaaatggtgctaaccgatgtattgtatgctcccacgttcaaatacaatattatatcagtaagctatctcaccaacaagtctgcaatttctgttctttttacctctgatgggttcactatgcaggaaaagggcagcaagaagatgattggaagcggcagtaatgtcaatgacctgtacgttcttgacaatacaccaaactccagtcaaattctatctgtcgatgctgagacttggcactctcgtcttgggcatttgtctcacaaacgattgaatctcctcaaagacactttgaattgtaaaatttctgatttacataaagaaatgccatgctatgtttgtcccattgccaaacagagaaaacttccatttcaaaacagtaatactgtttctaataaagcttttgatattgttcattgtgatatttggggaccataccacattgtttcacacacaaatcacagatatttccttactttggtagatgatttttctagattcacatggatatttcttttacagcataaatcggatgttagctttgttatacctcaatttttgaactacatacaaactcaattcaatcaaagttgcaaggtatttcgttctgataatgcaccagagcttgcatttaaggaattgttttcaaagcacggaattttgcatgaatattcatgcgttgaaacaccagagcaaaatgcaatcgctgaacgaaagcatcagcacttgctgaatgttgctcgatccctgctattccaatccaaagttcccataaagttttggagtgaatgcatattgactgctgcgtacttaataaataggatcccaactccgctgctaaagaacaaaacaccttatgaattactattcaaaaggctaccagactaccaacatttgcgcaattttggatgtttggtttttgcatccactctatctgctcatagaagcaaattctccccaagggcacgcacatgtgtctttttgggatatccccaaggaattaaaggatataagctattcgacatcaataacaaacaagtgtttgtttctcgaaatgtggtttttcatgaaaggatttttcctttccaaaaacttaacaccgaggacgccaacatagacccttttatccaaactgtgattccaaattctatgatttctaacacacatatttctgagtatcctgcagacaatagtgctattataagcacacctactccagaaaaacatactgctgtcaacgaagaacacatacagcaggaaaacacaaacacagatgcaccagaagcacctgaaactcaccctcaacagccatctcaagaaggcccaagaagatcaaatcggcaacccaaaccaccaagctacctaaga

SEQ ID NO: 228058 - DNA, 1437 bp, Cannabis indica
cgaacttttttagagtttttgtatcgtgaaatatgtctatggtggatgcctgcctatcgacatttcagttttttttctttttagttttgtctatctgttggcttatttactgttggcatctgtagttgaagaggcatgaggaagcaattcaactgtgtgaaaagagtttatcttttgccgaaaagaatttttcttcaggagtgtcattggtagcaaatctatatggttctgttggtgaacatcattcatttgagagaatatggcggtggtgcttgatatctaagtcttacttttatttgggaaggctcgaggctgctcttcctatacttgataaactgaagcaaatcggatctgtagaggacgagtaagtattttaagtttatataagccatcaatttatcattttttctaacaattagaataataaaaatgtttatcttttttattgaaaaatgtcgatgttgattaataatttcaaatttttaggtctgcaaaaaaggagctggagtcatcaaccctgctggcagctactatacgtgaccttttacaccagaaggtaacctttttgttttgaaaaaatatttttctatcggatttgagatctaatattcattgagtttacaagtcgtagcggagaatttagtctagtgctgctcacctctcaagtaatttatttttaagatgatctgagttcgatgatggttagaatttttggggtcgagtttactcagctaggtcaaagttgccttctctttattctaggaagtatgatatgtcagtatgtttgagagagggaaaagccggaggattttgatatgtatggatgtttagttggaggggttatgtaagggaatggatagggacgggattgataacgccaattaaactgcattgtgtcctaggagatgatagaaaattaatcatgtgttatttgtatattatagaatgcaggtaatgaagcgtttaaatcaggaaaatattcagaagcagtggagcattacactatcgccctttctagcaatgttgaatcacggcgatttgcagctatctgtttttgcaatcgtgctgcagcacaccaagctctgggtcagattgctgatgccattgctgactgtagtttggccatagcattagatggaaattatgcaaaggtatgccacatgactttattaaaatctttatcctatagaagattcttttgttaaaatctttaatgattagctttccttattttccccttaacactacataataactgcaaatatttagtaaatgcccgatcgtggtggcggaactttctccttgttcaaatagaattatattctttttacacgattaaagaaacttatttagttgtttcctctaccagcaactttggcccgacacgagattccttaatataattttgtgctcaagtataattttccatggttacag

SEQ ID NO: 228059 - DNA, 2497 bp, Cannabis indica
agaaattaattttttgaaaaaacaataatatagtagtaaatttattctacctacgatagcatataacatttttttaatactgttgactaataattttttatttctactttcccctatctcacgtgaaataattttttttagcaagattttcagattttccttaagcgacataaacaaaatgttgtaatatattaaaatactaggaaattaagctacgcttcgctccaacttctgtaatctttatgtatatttacttattcagtgatataaaatataatatctagatgtgtgtattataaacaaattagtaatattattgaaattaaaaactaatttattatttttaaaatatataaaaagatagtgatattgtgacaaatatagaaaatgatataattaacaaaaaaattttgattttaaaataaaaaaattaaatgataacagtttttcgctttaataaattggacttgtaattgatgatgcaattatttttcaaagactattgacaatattttttttcttcaataaaaaaaatattttaactactctttatgaaagtttttacattttgctttgtggtttcgtttgaatatcttcaccacaaaagtaaatgtagttggatgataactgtaaaagggattgcaaaatattatttatttttataaacttaaataagggatttatataaatgtaaatatcaatttttcttagagcgtctgcccatgttcatgctctgtggcagttttcaacggtttatttgtatttgtgcggtttctgctcatgttcttcgtggtttaggggtctttcttcctgcttgattacattagatttgataagttttatccttttctttcaatctcatggatccttttatacataagatgaagggggctatctctttaactgaaaaagaaagtgatgttcttgctattactgatgatagcacagacattggggagtctcaagaatttattctggttgctcggatccttacgaacaagaaagtgtggctacatacttttcaaaaccagatggccgagcattgggatggtcgatttaaggtaaatattaaggaacaccattcgggtctatttcttctctgttttggctgtgaaggagatcaattacgtgcgctggaaaaggaaccatggcattttcagaatcatcatattgtgcttcttcaaccaactctgttactgaatgttaccccagatattatgatctatactcctttttgggtgcaagcatacaggctgcctttcttaagcaaatcgaaagcactggccaaggctttggcctctattctgggtgaatttgtggcagtacatgaggactctttgaatgaaggatggggtccttttttgagatttagagttcgacttgatattaccaggcccctcttgagaggtagaatggttactctacctagaattaaggatgagttttgggtggaatttcgctatgaacgattgccggattattgtatggaatgtggtatcattggtcatctctatcagaaatgcccaatctttttggaaaaacttgatttaggggtggaaccggaattggcttatggtccatctttgaagggttctcgacttccaacatcatcctatgaccgttacagaacggattttgccaaaggaaatgcatggccattacttacgagacttgcaaggagatcgatgactgatactatcccaaaattgaagacacaaagtctgcctcaaccttcagttttgttaacgggagaatcatctaaacagggccaacaaagcataactgcttctcaattcaatttgcaacattctgtatatcttgatgtctctactccaccactgacttactctcacaacaatgttccacttggacctgctttgaattttaatccaccagttcttaatgatgtttcctttccacaaggggtccataataaatcaattccacaactaaagattgataatggctcatttgattctcatcattcaaagggaaagaaagcgttaggagtttctgaggcaaaggaaggaatttttgcaacatatccgcccttaatttctccaatttctgcgggatatccacaccagtcggtcacttcgaatttgaaccccttctcatattcctccactgttgattcaaccaactgctcaataaaaagatcgtttctcactactgatttgaatgagactcaaatcaatattccgaaaaaggcaccctcaaacaaagatgtaggtgatactcttcagagtatgcagtctactgtccaatctccaattactctgatggctgctggttcttcttccagagttaacactcctctgcatgacatgacagtcagtttaaattcattaaagactacttcaatcactggaccggttgctggtatgagttctttgaagactttttctgctcctggggtgtctgttggtgtgaaaagggagaaggataatatatctccttcagtcaaggaaaatgctaatcctaatcgtgttttcaa

SEQ ID NO: 228060 - DNA, 1295 bp, Cannabis indica
agccaaatcaatgcctttcgttcagtggtagatgcatgtaaattatgtcaaattccttttgagggacaacgatggacttggacaaataaaaaccagggcagtgggaatgtcaaagaatgacttgattatgggttcactaatcactattgggatgctactttccttgcactatctttgaaacacttggacttttataagtcagatcacagaggccttaaaacgactgttactgcacttatggatcgagtggatgtacctgagttcagatctcgttttagatttgaaaaaatatggttaaaggaagatgcttgtactgaaataatcagtgccaactggattcgggataatagcagccctttagttcaactcacaactaatatctccaattgtgccactagcttacagagatggcactactcgaattttggtaacctgaaaagagatattaaagaatctcatgagcatgttgcagcgcttcagaactcctcttctactgatcctcaacattttgctgcactaaaaaattctgaacagattcttgatgagttgttggctaaggaagaggattattggcaccaacgagctcgaatttcttggatgcaatccggtgattccaatacaaagtttttccatcagcgtgctaatgctagatcaaccaataatcgcattaagaaactcaccgatgcagcgggcaatacacaaaccagtgaggctgctaaacttgatattatctcgacctatttccagtcaatttttagcagccaaggaatagatgataatgccattgcttctatattggaagttgtccctacagtacttgatgctaattccagagaaataatatcagccccctactcagcagatgatgttctcaatgccctcaactcaatgagtgatgataagagtcctggcttggatggtatgtcagtcatgttcttcactaattactggcatatagtggggccacttgttacagaatcagtcttagatgttcttaataatggtgcaaatcctgctcttctgaatagaactattatcacactaattcccaaggtcaagaagccccaactcatcactcagtatcggcccattagcttgtgcaccgtcctttataaattggtttccaagtcgatcgtactaaggcttcagcctttcttgccattagtgatctctgagtaccaaagtgctttcctgtccaaacggttgattactgataatatactcattgcttttgagttgttgcactctttaaagactcgaaaaagaggctcgcaaggatatgctgcaattaaatt

SEQ ID NO: 228061 - DNA, 1039 bp, Cannabis indica
ttttggaggaagagaagagagaggaaaaatagcacagatatatcgatgatgaacttgtggagtaatatcttgtgtctaatacttgccttggcaatcatcccagccatccattcaatcatgatcagattcaaatccagttcctacaaccttcccccgggaccaaaaccattaccagtcatcggaaacctccaccaactcggtgacaaaccccacaagtccctgtctgagtttgccaagctccatggccccttaatgagcctcaagcttggtcaagtcacaaccattgtggtttcttcctctgctgtggccaaacaagtccttcaaacacacgaccaatacttgtccagccgaactattccagatgcgttctatgttcacggtcatgatagcaatggtcttccatggattccggtctctgacctgtggagaagccttaggaagatttgcaatactcaactgtttgcagtcaaagttttggatacaaaccaaaaactaaggcggaggaaagtgaatgaccttgttgaggaagtgaaaaagagtagcttgagtggtgcagctgtggatattggtagcgtagctttcactacgtcacttaatttgttgtctaacacaattttttctatagatttggctgacatggaatcggaactggctagagattttaaggaaatcacttggaatatcatgaaggagggtggtgcaccaaacttgagtgactacttccctttgcttaagaagattgaccctttgggtataaggcgtcgaatgaagattcacttcagtagaatatttcaacttattgagggaattatcaaccaaaggttgaagcaaagggagtgttcggactctgttaagaatgctgacgtattggatacccttctggacatcatggaaggaaacaacaaccaaatcaatcgaccccagatactacatttgttattggtaatcaagtgttctattttattctctgctgaatgatttggtttctcaaattgagtatatgtttgtttttataatttgtatggtttttttttttttt

SEQ ID NO: 228062 - DNA, 1710 bp, Cannabis indica
ttcgatgcatactccatgcatccaacccaagctttactttaaccaatgctctggagagaacatagcacttatccaaggtgcaagtaaactatgttgtagattgtcatatcagttaaaccctctgtgtactgataaatctaggaatatatatttaatcacataatcttgattactttccactgtgctgaggacacaataaacaagaacataaatgtgataagaatttggatgaatttataaatcaaataaatatataaatcataacatgaactaaaagatacacaaagtgatgaaaatacttttgtttctttattgatattttaaagataaagattacattgaaatggagttttatttagggcataaaacccaacatttatgtatgccaagaatggtgattagatacgatatgcacgctctccatgaaagcaccaaactgttgacctcaaaaaatgattaactaacacttttagttgtattaatactgaggttaatactattcagatcgctatagatgagatctaaaatagcacccttaaggatacaaagaaagaatcgggattgtcaaatctcaagtgcggagaatgcttgtatgggcgtgtgagagaggaagtagagaatagaagagttattcagacttaggcttagagcttggaggcaagtttcaggcttaactgagcttaggctttctaagttagagttaatgcctttatataggaggcctaaaccctagattataacttcaacccctaaatatttgtatatttaattagtaaattataaaagaccaaaatgtcattgaatctagatattattcaactattatgtttggcttttaggcctaatttgcagccaaagtgttgttctccacgtgtagaagtgaatagagaatcatgcacaaccctttgttgccggccaagcacctacagagagcaggctggccagccatggcattgtccagaggctggccggcaatggggccaactaggggaggtcggccagcttctatgaggaagttggtcttgtgttcgatgcctatttgagtgtcgacgtctttgtttgcttaggtacttacttggtcttcttaccagtgagctatattgccacgtggtactaattttctccacgtaagcactaccacatagggaagacaaaattgggataacagatactttcactgtctcccctttaacctctatttgggaccttttagccaatgtgtgctaattttcagtgttaaggtctttgacctatttcaaaatccacaaatttcttgatgtgtacacccaaaaatctcttgatatttggccttgtgggattctttcaaatggtcattcgatcttgtggtctcttaaaagtcattcgttatacccacactttctaagcccaaacgtgagaagggtgtattagagttagtctcacattgcatatatgtggaaataaattgttataaataagatgaatgagctactcctcccatggccaattgtttttgagatggaacatcattaatcttatcccaaattctaacaagttagagttagtcccacattggttatgtgtcgaaataaattgtcatatacaattggttttaagattgaacgttattcatcttatcctaaattctaatatgttattagagtcaaactaaactctaatgagtatccaatttctaaaagagcctcttgtgatccgttgtgagcccaaagt

SEQ ID NO: 228063 - DNA, 3243 bp, Cannabis indica
ccgtactgatacgaagagcctacaaagttgctaattagcaacccgcatccagcatcccgctgggcggctcagacgaagatctagctgggaataattcccaaactctaaacagtcagctgtccaatcctcgatcacaggttccacctgtgggccaagcagtaggtggccagcccttatttcgaaattcatcaggaggggttatacctaataactccacccagactagcggttctggccaagttcttggccaaaccaaccagtcattgagacatcctagtgcatctgtatttaatagactcggaacagctcatgatctcagtgatgatctaaatagaaggagatggttagacaaaaaatatgttccactagccactcagcctaggacccgcgctgaagaaccatctcaaagagatcctgacgtgacattagtcgagcaagaggccgaacaagtttatccattcgtgcaagcatagttggatgaactgaaaaacatgttccaaggtttggccggtcaagcacaatgatctcgagttggatcgagcacgtggatccccttttattccagagatcaatgttctagagctaccccacaagttcaagatatcaacttggaagatgcataccgggaaagaagagcccttctcacatctcaaaattttgaattgtaaatggacttacaaggtgtacgaggagatgtgtgttgtagagtttttcctgccacactctcagaagccgccgaacaatggtacttcaagttgacaccgggaaggttcaactcttggaaggctttctcctcagaattccatgcacaattttcttctcctcacaaactcccattgcatttagaggacctggtcgaagtgaagcaaaggccaggggatcctattgcctaatcttggcaacaagaaagctaaggccttactttcaggctcatcctattcgggtgtatactgaccaaccattacgtcaagtattataaaaattggacgtctctagatggttgctcaaatgggcgatggagttgggtcagtatgaaatcatctttcagccgcgaacaacaattaagagtcaagccttagcagattttttggttgaatgtacaggtaaataagagagcacttcaaaaagtaccccagagccagtacaagtacctcaatcgagcaatagtaaagacaagccaagctggatgctacatgtagataggtcggctactgatcagttgtccagcgcaggaatcgcccttgttgcatctggggggcaacacctacacggtgcagtcaaattcaggtttaaggcatccaacaatgaaactgaatatgaggcccttattgccggcctaagacttgctcaggaattcaaactgaacacattgagatctggagtgactcacagttagtggtaaatcatgtatctagggagtacgaggctcagggggagaagatgatagcgtatctaagcaaaataaatgatctgctcgcaaaattcaaaagctatgctctcaagcaagtcccaagagaagaaaacacgatggatgatgcactagtccaacttgcgagtagcaacataaatcataaagcaaatctgatccctatccaatttcttgaaaaacccagtatcactggcacagaggagatcgaaatgattgatacatccccaaactagatggtgctaataacagcctacctcaacacgggagaactcccagataacaggaatgaagctcaaaaaataaggagaaaggctgcacgatacatcattatagagggatttatgtatagaagatgattctccatgccactactcaggtgtgttacacaagaagaagctgcacgacttttgtgcggcaaccacgcagctaggcagagtttatccaagaaaatcctaaggcaatggtatttttggctgaccatgattgaagattccaaggcctacgttaagaaatgtgataagtgccaaagattttcaaagataactcgtgcacaacccaacaaactaactcagatgcaaagtccttggcctttctccatttggggaatggacctgatcagacagttactcaagggaaaaggcagagtacagtacgcagtggttgtagtttattatttcaccaaatggacggaagctgagccactagcaaccatcacgtccaaaaaaagggcaagacttcattgtgaaaaacaaaatttgtcattttggattaccatacaagatagtctcggacaatggcaaacaatttgatagacagtccttcactgattctgtgcgaaccatgggatcataaatagtttctctgcagtggcacatcaccaagcaaacgatcaagtcgaagcagtcaacaagacactcaaagatatcctaaagaaacgacttgaagatgctaaaggaatctggctggaggatttcctgaagtattatggtcgtaccacacaactgagaaaacaacgaccggacagactccatttgccatgacatatggctatgaagtcatgctgcccatagaactcgaaccgccgtcccacagaacattgacatataaccaagaagttaatcatgcactccttgcagaaccacttgatgaagttgaagaaaaataaaccgcaacaaacttgaaattgatagctcatcaacaaaaggtagctcagtattttaacaaacaagtgagagcacggaaattctttgtgggagatatggtcctaagaagagtattttgaacaccaaagatagtacgacaggtgtgctcggaccaaactgggaaggccatatcaagtggtcgaagttctagaatcaggagcatacaaactgggtaagtatgacgaaaaaatgcaactcgttctagtaccaaggtattggaaaggggaacacttaagaaaatactactagtaagagtaccaagtcagatgattatgttaagtatgaaacaaaagagcatttactcttaagtgaattgccttttgggcggaccacgcccaaaggttcagataaaattacaaagtacttaggacggatgaccacttatgaaagtacaatttttattttatgtaatttgttttgttaatgctaagctaaagatcagattagatcaacataatagcgtcaatgtaagttactacggtaacagacatattttcgaccaataaatgcataaagatgtttatttcaattcaaattgagtcaagttcattaggatgttataaatttatcattaaacgtgaacaaaagttctggtcgtacccaaagccccga

SEQ ID NO: 228064 - DNA, 1070 bp, Cannabis indica
caatattcataccatttaggctgtaaatgaaattgggttccattaatttaaagtcctcaatacgtgctttatgtaaaagctccatttcccaagtcttggtaaggttttgcaccatttcttcaagtgaaccaggaggccataccttcaaatttaattaattaaacttattaatatatatagagagaatgaaattgataataataagaaatatattaatttaattaattaaccttagtctgtccttcttcaaagagcttatttacaatgtcatagttaggaggttgaccaaatctccatacagtgttcttcttttcctcttcatctaaattcctatatttatctccaacacttgaacctgaagatgccatctctctttttctctctgataattattattattaatgttatgattagatatgtttagcaatttagatgtacatcttactatcatatatatatatatatacacatataagtactcactaactcaccaaccatcactaactcaccaaccaaaataatgagtgtttattaatttagtcaaatatatgatatacttttttttttcataactactttgcctaattaatattcaaattggaaacaaatatttaagatggatatagtattagaattcctacttcgctctctctttcatatttttattcagacaataataataataataataataataagagtaatttacggcataaatacttaagtttaactcccacttgcaaataaatacctaagtttaatttttggcggtaataatacctaagttataattctggaacttttgtaggtacctgactcttaattgttaagcaaattgccatgtggcaattcctaattggtccaagtcattaaatttttattttttaatcaaaattaattaaaatataccaataaaaaaatgacccgtggataatgacataatattttaacggttaggtacctacagagttccaaagatataatttaggttttattaccgccaaaattaaacttagttatgggagttaaactgtaatacccggaattaagaaaaggattagcaaaaccct

SEQ ID NO: 228065 - DNA, 1554 bp, Cannabis indica
attaaaaaaattatgtaattttttaaaagacaatattttcgttagttagtggggctatagccccaacattgatactagtgggttcgtcgctgggtataattaagtattggtaaccatgtaatttgatatattaccttttatgaaatatcgctaaccaatcataaaatgtcacttttaaatggtgctagacattagtggtgtcatattaatgctctttcataacaaatgaggaatataagtcattataggcataattcaaccattaaaactaattttacctaagcctgcataagtgaaaaaaaagaacttggtaaaaaagtagtgactggatcttgatccacaaatcttaacatactaatttttgtcttagtcatatatgatgacttataatggctaattaatttgttttatatcagactgagcaggaagcaatcctccagaacagagaaaatccaaactcttcactcacatgggacgaatacaaatcaatgccttttactcttcatgtaagtcttacaatcacaagaagttaatataaacttatttcaataaattaatttttcaactgccttaatgttaacatttcaatcaatttgaggaaacattatacaggttatcaatgaaagtcttaggctgggaaatgttgcaccaggattattacgtagagcaatcaaagatatcccagtaaaaggtttggttgatcatgatatgcctttttttttctttcatgtaataatgtaaatatgtattagctttgtagtagtgtttaatttataataaagattaatgggatcatattggttttataggatttactattccagctgggtggaccattatgctggtcacctctgctcagcagttaagtcccaatacattccaaaatccacttgagtttaatccatggcgttggaaggttttgtttaaatttctcaaataaaaattgattgcagcctttgactagtgaaaactaaaagaagctaatcatgtaattttgtgatacaatttgtgggaaatcaggaactcgattccgaaattatatctaagaatttcatgccttttggaggaggaacgagacaatgtgcaggagcagagtatagtagggtgttcatggcaactttttttcatgtcttgctcactaaatttaggtgcaatttttccctttagtaattctttcttgctttttaatagatttttttttcttcttgagttgcacaaagggttaaaacagatttattatgtttattttagtaatgttatattttttttttttaaataaacttgtgtaggtggacaaaaattaaaggaggaagtatatatcgaaatcccattttaggatttggaaaaggcgttcacattaaattctccaagaagtaaagcaaagatacaccaattttggacttcttttctcagcactcagttagcatagtaggacgtccgtgtgtatggagataggaggggcctgagggtacctctaaaattacatttgaaataattaaaataaaaataaacatttttcttaatacgtccatgtttattttagtgaattgatgt

SEQ ID NO: 228066 - DNA, 2317 bp, Cannabis indica
cttttgattttcctttagtcttccctttggttctctctggagtacccacctaagtacccttgctataataactccttgattttaatcttgagatctttgtactcctccgtaaaattcaaacgtccttgtggaacttgtaatatttgtttgggtctcttctgggcctatctttcttcataggggtggtttcttgaattgttctcttgagctattaaactttgtatagcatgtgtattcacaacattgttgttccatctctttcttgaattttttgcatcgatcatctcccagtgatcgaactctcttctctttagtggcttattagcaagagttgtcttgggatggccacttcttctcacatctaggttatcatgtccatcctccacttggacacacctattggctcttccgtagaagtcttccaaatcgcataattctctcttgagaatgttgttccataaattgcttcttggcttgactccagtctgttcgtctttggagtgtctcacaaccttggccgcttcagcgttgaagtgttgaatgtagctttctaggctttttatctctcctaaatttatgttggccaaacttgtcctaaggatgatgtagtctcacgcgtggtgttgggccaagaattcattagtgaattatgtccacaaggcaatagatttgagagccaacctcttatactacttatacgtcgtgcctctgagcgtcatggcaaagtattgacacctttccttgatcgccaccctcttcattttcatgatctcattaaaggtatctaagaggtattttggatcaataattccctcatagggcagtatgttctactccttgaaatttgtaggtagcgactcatattggatttccctcgagaaaggtgatttatcatcaaattcatccttatcccaattacattccttggagatggcggacgctatcctttgtcgaaggtcttccatctctctatcaagttcttgtcacttcttgttcaactttttttgaaggtctggtgatgtgtgctttggcctttcttcatagcaaggattaatcggcgacagtgctcgcctttcagcaatggcccttcggttgagtttctcccttagatggccaaggattgcctttgacacaattttctttggtcgcgacaaaggttctaggtctttgcgagattgagattttggcagtgaagattctgacgtgttacatgtggagtattttgtcattccttctcctttagttcactcccacctttccttcaggcttctatctctccacgcctaactaggggtgttttagagcgaccttttcgagtattttttactatgtttacaacagtttcttctaatcgtaagttgttcatccttagctcgttcatctcctcatggtgaacatgagttcgtgagcttgaactcattgagtaaacccctttctcctttctgggtcaatggtgtgaggttctgggatctctcgatgccaacgtcgtggggtttcttattagcgatggtactctatgccttgactcaccttcaccctcaagtgtgacggaagcggtcactccatcttcttgtatgtccactaggacctctttaggatggttgtcctcttctctcacctgagtccttccaacattagaaacttcttctcctgtgacaggtgtgggggattacgccttgagatgataagctgatcagtgttgtctagctgaatctccacaccttgaagacaacgagagcatctagacattttgcgatgattatatgtaagggagcaacttagcctgagcttgttgttcccatagacggtgcaaaactattgacagtgaaaagcttatcaaccaaattatagccaaaaaaatcaaaaacttggatgtaagacctaggacaaagatgaagatctagatatataaaaacttaaagaagaaatgtagaataactatggagaaagatagaagtgtatatttctctaggtcaagtgttacaatgattttccaaccccctctctcacttgagaatggggtttttataggctctaatagtctgagatacacttttggtcctcaagggacaagttggccttatgtggctacaagttgccggtacaagagatggtcttgcgccttataccattatcgagtgtcaggtgggtctcgagttataggagtagtggttgtagagtacctattgtcgggacatcaatccactacgtgttctatctcaccaccacgccacgttgaggaagtgattgttactcagtctcgtacctctccttgtgcaagccttgtccttcgattccttacttaacagtctcctct

SEQ ID NO: 228067 - DNA, 1865 bp, Cannabis indica
cgtatcatggatcgccttgagcaccttgaggagaagtagaatgggtatttgtgctatgcttaggtgcgtgatactgcactagctaaatcaccgaagcgaatcgcgccaaggccaatagttgactttccaatgttcccacaagaagtgttcactcggtggactgatccaggaactcaagaagactctaactcttcggatgatgatcctgagggttagacagagagagtgttctttctttaagctttagtatttatatttcagttgtattttctgtttgtgttcttgttatccattgtggttgtcgttgtttgtccatttgttgtgtgttcaggttgtattttgtctttgatagtattgcctaggcggttcaatgacgatgttgttatttaagcttagctacttgaaactgaatgtctttctttgtgagttttaagctacctactttaagacgttggaatgttagttgcccttcgttgttgaaagtgtgcctcttttgattgtgttcatagcttgactaaatggtttgtgtcgctagttagttagagctaaacccttgtgagagtttaagtctctagaattacttagaaattttttccttaaggcgaaatcctaggcatcaccacactaaggaaataatatagccctgtataataagattgatcaagtaaaacaacatgtttgtatataacccaaacttagtttaaaagatgaaacacttcgtaaaaacaaaaagaagtatagaatatcatcctagcataatcatatttacaaggtttttttttttctatatatcacttgagctggcctcgcttaggttacatagaaaatttaccagttatactagtctatttgtcaattattaaattaagagaatattttgagtgtcgtacttataattaactactttgatcacatatcaaatcttgtttaccaactgatattgtagttttttaagcacaaaaattaaagcaatatccatatatatagatcttccatttctttcaaaagaagaaaaaaaaaattgccattcaaacaacacaactaggggatgaagtgtacaaaattagtatggagcctacaaaattaatttgaaagaaaagatgaagctcacctcagaatatgtaagagttttggaccaggtagtggagctccaattttggtgcagatctagatcgccaacgaccatggaatctgttcgatcctttggggttttgtttgtggagatctcatggttcgtttcaactgtcgctcgtcggatgtgtgggtcactgctgccggttgctggatgtgtcgctgtgaatagacgtgggcaggtggactgttaagggatgaggcaagtacgataatggaggagaagaaatagctttaattttttaaataagagtaaattgctgcataaatacttaagttttatgtcaagtaatagataagtacctaagtcgtatttttggcattataaataccttctgttactagtgtggaacttccgtaagtacctgactgttaatgacaggtcagcatctacgtagcagccactaacaggtccatgccttcaatttttatttattatttaaaaaattcattaaaatctaaaatttacttaaaaattattttaaaaagaataatgttaaaataacttaattgaaaaaaacaccctaatatctttctttcttcccaacacataactcttctcccacgccttcttcctcacacacactctctctcttcctttctccttcttcttaggcaagttgcagcctttctccgtcatcggccaatggagctctttcctcgtcgtcggtcgatagagctcttctctcaacgtcaatagtcctgacaagctcaacatcctctctctctctctc

SEQ ID NO: 228068 - DNA, 2373 bp, Cannabis indica
cacttttccaactcttctacaggcccaaagcttcttgcaggatccccaaatcgaggatctttatctgtgttcccactttaggctggacttcattgcccttactaggctcatcttatgggcctttcgttggaatgttctcctttttggccttagatagggccaggttgtaatactaaggagcaaactgttggtctcccctcacacatgccaccccgtgccttgttggaaatttgaggcataggtggtagatggatgtcaccgccttttggtcattgagggccggttggcctatcatggcgttgaaatccaatggaatgtcaatcacgacaaactgtgctattagagttctagtggttggattttctccaactctgagggttaatgtaatatattcgacaagtgcgatgccttggccaaagaatccatacatcacttgattgcagggcgccaggttggtgagctggagccccatctttttcatatattgactagaaaggaatgttggaggaggctccaacgtccaccatccatcttgctacggtcatgttcccgatttatacagttatgaccaaggggtcattgtacggaaagctgacctgaagagcgtcttcttcggtgaaggagatcgtggtatctatatgcttttgttgcttagagctcttgtcttcaacgactaggatatcgcttttaggctcatgatggagtgtccgagcatagggctccctagctttacttgtctctcctacaatgtggggtccaccgatgatgacccctaaatgccttgccagtagtggtggcattggatctccgccttgggcaccttgtgcgtgagattgctcgttttacacacaacaatgaaggtggggattattacgccttataaggtattcaatctccctcttcaaattttgacactcagtggtgtcatggccaaagtcattgtagtatcggcagaactttgacatgtccctcttctccatctcctttttgataggaaaggaattttggtatgggactgttccctaagtggccataaagatggcattaggcttctctgtcaggagggtgaagtaggtgtacttctcctccttactcttctgtggcgtgggagaagtgttaaacattccctttttgctagtgttcctcccggagttattggtgttgcgcttatttctagtgtttttaccactacaagtctaggcagagttgttggtgtctgatgttgccccttgtatgccttgagactgtatgatgtctcccagctgcctgttgacatgccccgtctgggcatgtcatatggcttcttcaagtttgataaagccatcagctctatcaaggaactccttcatgttgttggtagacatctcccatatatctttccagaagtcactcaattggaatatgcccctcagtatggacgtatattggccttcttctgtaaggcctttgactttggtagccttggccatgaacctctcgatgtaatccttcaatggttctccttatcgcttgttgacttcgactaggtgttctagcttcgatgttacaagttttgaggatgaatattaggtgtagaattctcgtgataaatagacccaagagttgaatctccctagggtgagtttgaagtaccattgttgagccatttctgacaaagtgactaaaaaaaagcgatatcatacatcactagtaaccttctggagatcaagttgcatctcaaagtatttgatgggagccaatgggctttctcgcgcgatatacattttccataccggctttttgaacttaggaaagggtagggcattgatgtatgccgagaatggtgacccccttgactgatcaagttcatggtctgaaggctttggaccaactatgccttgaatcatgttcctgagtcagtccaattgtgcctgcatataaggatatgatttgaagagataagggctggccagccataccctatgagagtatggtgaagatcggctagacgtgtgttgatttgtagaccctggctggctattccctggtataggtgttggccttgaccaacaaggcgtacacttggatgctgtccttcgctgggcagaactacatttagcagggcctggcagcccactgctccttcatggctggctagacctgcaaatggtagggtctagccacccagtacttcttcatggctagccagaccttcaaagggcagggtcgtggccgcccgtcgatgctaccatggccagcaagacctactaaaggtagggtcgtggccgaaccaacgaactcctccgatggatggagtgttgactttgtttgtataggagggaggatcacacaatagctggagttagttggagtcgaggtgtcgtgaagtgagtc

SEQ ID NO: 228069 - DNA, 2039 bp, Cannabis indica
atatagctaatagcattgcgatctaatcccttccattaatacattacatcattagtgttaattaattttaatgcaacccattaggaggtttctttatatcatttattttggacctcagcaaaggaacttccgataacaaccgcaccggtcggtaggaataatgcttcttgttcgcttggtaaactactaaaaagtcttctacatgcatgcatgcatgcctaacgaagttacaaacatcaacgaagtttcgaagggacagtcatcattataaaagttgacgttggtaacttcgttggccataagaatccattcagaattgtagatagaaatatcttcaattcttgggagatacattttcctttatgtattgcaagagatcaaagacggaaaatgtatagacgccgagtttgttttgccaacaaaacttgattaaaaagataatttcttatgtcaacaaagacgctcaagtacaacactgcatttttttgattaacatgagacatcctgcatatcataaataaaaattataggtaattttgaaaaagattaatgttattttattatattgggtattaatagtgtttaataccttttaaacgtatcactttgtaattggttatcaacactctttaaaagttattaaattgaattatatgagactcaatacttaattaaactaatattaatattaacacgtaagaaaatgctatagttaaacactactggtacctttttagcattgctctttactatcactacaagaaatatcacttttaccagcacagttcgctattgcgctggtaaaagtaacttttaccagcgcatttcacaaattgcgctggcaaagagatcaaagttttaccagcgtacatttgcagtggctaaaatctaacttttaccagcacatttacgcgctaggaaaagtcttttttgccagcgcttttcattttatgctggcaaaagttccaataccaacattgatttgccaacctcctttcaccaacacatcataggtaaattctattttaccagcgcaatactaatttttgctagcataaaaatgtgctgataaaagtaatatttcttgtagtgtatatatgttatttttttttttttttgtaaaataatttctgactgaatcattgattccataaaattcattgcttgaaataaatattacataaaaaaaattaataacgtacatatagcattgaatatgagtgccaattattaaacatgacttagtacttacattacaagtggctggagaagtacagaattgaaatctcctgtaataaatacaaaattctataacatctactaaatagatatttccaagtctagctgtatggagataatttggattaagattaataagagaattatagcagctatcaaagtttcaatcctataataaattaagttttgatttatatatatatatatattatgtttagtattggggctcttgttcgagatgctacaaaggtaaatgcttttatgttcgagataataattgagtacatccaatcacataaaatggaaactaaagctttatttcatatcttgtatttgactaagttgcaattacctattgtaaattaatgtggagatagaaagcctttacatggtttctaatacgtactttgaagtattgctacttattattttcaaaatttaattaatagttaatgtttatattgattgatgttttcgacaattattaattagagttgtttatagtaatttgttgtttataatcaggtggctaacaatttgcaaattctgtcaattatcccactctagaattggtttaatatggctaattacaatttgcaaatcagtgtaattttgaaataatatataatggaaaaaagggaggcactcaataataaaatgaaaccactatcattttgattacaattttctttttcataaactacttttgtagtttggctttacactttcataattacatggtcggatatggacatcaatttggatattgaaatctaaaaaagtttaataactatgtattt

SEQ ID NO: 228070 - DNA, 1290 bp, Cannabis indica
aaaatccccaacctagcatcaaaatccctaaccctctcccttctcacgaacttcgaccgccacgcaggatgagaagcaccaagatgacccatgaccgacgatgacccacgagaagcatccaagacaacccacaatgacccatgaccccatgatgacccattttcacccacccacgattctcatagtttttggtaagtttattttttttagtgattcttctaatttttagattttgcattggaattttgtattggttttgttgaatatgattgagattaaggaaatttgttcaatttttggtttttatgtgtttgggcttgaattttgtggtggcaatttgatgtaaaaaaattttctccatatttattgacagatagcaatattttgcaatattgtccctaatggcgtctatgttatgtgtagacctcgaaaattggctaattaacatagcggtcatattaaactgatgcttgtcatgtgttacacaattagaactcaaaagtaaatgaaaacaaggacttttatagaggttcgacccccttagttagtgggtaatgtgttagcttttgtgcctaaataaaactaattttaatataatcagatttactaattaataaaagatcaaaactgaagggataaaagatagactgcgagaaaaagagaggcagaagagaattttagtcctacaagcagtcaaggaagacagaaagagcagagtgacagcccagattcattccaccatcaatttctttcttctccttttattttcttttatgttaaattctatttagtgctattatggatatgaatatgaactaaaatctcaatttagggatatgatgcttgttaaatgacatctattcaatttagttaatgtgattattaatttttctcttattgtgtgatttattcatatttgtgcttattacatgtgttcgattatcttccttatgcatgatatatgatctcaatacaaaatttgaaaagtgagtattgagaatgctctaaatgaataaacgtaagttttgatataaaacaagagtatttacatagcttatgtaatttttgattctgaatttaatgcaagctatatgtcaatttacttctgagatgcaagcagatgatatatagcttaggactttaatgatttgagaagcgttagggttattttgactgtttgtcatcacaagtaaagagggagaataaataattaacattaacaattgagaaattgaactaacagaattcatattcctaaatactcatccataattacttacacttttcttt

SEQ ID NO: 228071 - DNA, 1660 bp, Cannabis indica
gaattccgtaaaatacaaaaaaaaaaagttttgaagtatcaaaatgaaaaaaaatatattactaaaaaaatatatacaaaataaatctaaaaaaaaatgttatttttgtatagaaatattatttataaaaaaaaattaattatagaaagctaatatgctttaaaaaaaatataagctacattagtcttccttttctaagtactatttgatttttatttgctaatgaggtgtattagttagttgaatggaacatgcttaatatatgcttcctaataaatatctcttacaattttttttagaaaagacataattaataaacactttttaatttatatcatctacatgttattctataataaatggtttaaattttcaaaagtcaacataatcaatagttaataaaatatcactatcctatagagacaaataaaatgttcctattataaaaatttcctatatatataaacatacaattaatttgatttgataattttggtttaaatattttagttatctacttcatagagattttaagagtatctacttaatgctgcaaggtctcaaactatttttccaaacttcaggtttaacgcctaatctttctaaatctgctttttattgtaataacatgaaagatgcaaatgtccaaagggtgttaaatgcttcggggttccaaagacatgagcttccattcaaatatcttggtgtgcccatttgtcttaagaaaatctcttcgaaagattgtagtgtgcttgtaaagaaaatggtgggtcgaattagaacttggagtactcggattctctcatttcttggtcatgtggtgctcattaactctgttttgatggtgattcattcccactgggtgtcaagttatggtgctgccaaaaaaatagtaagtgaaatcgaagttatttgtcgtggttttctatggaaaggtcattatactttacctggtactactgcagtggcttgaaaaatattatgtcattctaattcttcaggtggaatgggatttagatgcatttcggaatggaatgttgcagtaatgtttaaatatgtgtgggctattgctaaaaagagagatcatatttgtgggtaaaatgagtttataatgtgcatgtgagggatgaagattggtgaaattataaagctatagtccaaattagctggtattggaggaagctagtcacaataaaggaaaactgaagagtttaattgaaacaaatcaattaaatatggcagtagctacaagatagctcaaggctatcaagtgttatttgaaaatctacctagagtagattggagcaacattgtttggagccgattcaacattcccaagcatagcttcattttgtggttagttatgctttaaagaatcaaaaccaaagatagattgcagaaatttagtattattgacaatgcttcttgtctcttatgtaatgatagaaatgaatcgataaacacttattctttgagtgttctttctcgatgaattgtttgaagcaggtattgtaaaggaatggtttcattgggggactgtctccatttctctacatcggatcaccaagtggattggaaaagctaagataagtaagtttaaaaagaaggttatctcggttactttgactgtccttgtatactatatttggactaactgaaa

SEQ ID NO: 228072 - DNA, 1606 bp, Cannabis indica
atttaatttttcgattgatttttaatttattgtcaaaatattctgataattaatgtagtactgatattgattgagtatctcacctataaatagaagatactcgtctccaagttcactactctttctgtgaaacagaataaatctatctaagagagttagagaaagtttggaagccttacacacaccacaagttttgttttcttttgcacatcaaaactcgtgtcagatcgattgaagttcaaagaatcaataattataggtattttgatccttttcattgcatatataagttgatctactttatagttttattccacatcattcataaaaaaaaatataatacatttatattattatagaagtatatgtataccataatattcacaaatttgttgtctttgataaatatcttggagagtcatgtaccaaaataaggtaggagttatttttttgaaaaccacaatattaatattgtaactgacattagaaggagttgctcttgactgctccaggtgacacattgcgtactagtgggcatcatgtcatctcgaaaatgagacggagtttccaaaaacacaaaaaataattttcgtttgaaagtttcaggcgacatatcgcttggtacgtattgggcgacatgtttcctagggcaaaaaaatggaatttttagctttgcgttttaaacatgttttggctccaaatttaattccaagtgtcatatcataatggctgagacctagctagaatgacttctgcactatattgggtttatgagaatgaaaatatgatgataacatattttctctacctctctctagacctcttattctctgctctaacttggttacttattctctccaagaaacttcatcaaaaaatgcttgatttgttgagtttcacaaggcttgtatatcccatttctcactcttactttgagataatagctttaagcatctatgaaggcttaggactaaagattttgaacagagatcattagaatgtgcacgttttgattccctcaaatttgagttacatcttttaaaccctaatcttaatttgtgtattgctttatttaattgtgttcatactttgcttctccttatttttttgatccatacattattgtgatattgtattatacttgtttgtcacttaattaattttgcactccatatatatcttgttttttgattatcaaaattcatgttcatcccatagatgtgaatcttgattcttattttttttttaaagaaaatgttctctaattgttataaattgattatgaaagaccataaatttttaatacttgtacacccacaaatttagttagagctttttttttttagtcattgcaataatcaatacacaatatattctctacgtttcaattctcatcttgattatataggtttattttttttttttttttgttattcatataaatttttcttttctttttttttattttattattattttcgacatatgctcaaatttaattatttggctttgcgtgcatttatgtaatatcatggccagctaatctttaattgttttatttttgtctttaaatatatatctccttttctttaatttggatatttgt

SEQ ID NO: 228073 - DNA, 973 bp, Cannabis indica
atttcttgcttatttttaatatggaaagagagaaaacttaaacaatattgattaagtgatttttaaaaatattatcttgtaataatgtgattataataatgttgtttggatattcttatattttttcttcaaaaaaaaattaagatatttcattttacctttttcttttggaaagaaattagttttaaattcttttctttttcttttttcaaaaaaaaaaatgttgaagattttttaaatggaaagtgatagagggagagaaatcaagttgaaaattgaaatgttcaaagtggtgagtaagagaaagaagagtagtagtaatgacgtagggcttagattggaaaagcagagcagagagattggcggctgagaaaaagtggtgggcccatggcccatatggttgggctcaattgggcccaagtcgttgttgtgatatcattatcacgtgcatatcactactttcctgccaccttgacctcccctattttgacaagtcaaaggtcaatagtgggagaaactcttttgaattattatcttaacttataaaagaaaattgttaaaaaagaaaacacattaaagaagaaaacttttttttattattattaagaaaaaggaaagatttttcttggtatggtatttaatgaatgggtgattcattgtgggttctttttttttctttttgaaaaaaattaattataaagaattgattttttaaaaggaataatcaactttattaacatcaacttcggctactaaataaggtagtaaattaattgaaacagactctaaattaaaacgaaaatcaaggtataacatagcaacttttatgaaattataggccactaaattaatagatcgtttaacaaaaaaaaaaaaaacacttactagcaagtttttatacaatcattaataacgatactaaacaaagatactatagataggggtaggcatcatccaatccaatccattgaac

SEQ ID NO: 228074 - DNA, 1041 bp, Cannabis indica
ttatttattaataataactcaataaaataaaataaaatatttaaactataacacgaaattaaatatttaaaaccaaccgcacaaagggcgactatattgcctagtttaatatacattattaaacaaaatataacctcatatttttgcattttttttttttggctggttaactttttgttttttttttctgaaataatgccaaactattattggtttatattatttgttttttttaacaacaattgctcttcatttttgcatttacatatttgttgttcttaaaaatacgagagaaattatttgctttgcacgtacaggtggttaaaattgcttacacgtctatcaatgactgaaaaaaaaaatagttttatggttgttctacggtttaaatatcaataataaattaatctcctcaatttgtagattccaagtttcttcatcagaacaaaaatctcaggtattaaaatctagaatccaagaaggtaaaaatgatcaaatctataaatatgaataccaaatatatctaagccagcatacatattcttctgaaaataattgagaaaaaaaaaaatcatgcatagcatatatatcaatgacaaaactgcatatcataatatatatatatatatatatatatactccattattttctttgttcttgaaaatgaaaccataaataaataagtactgctcctcctctcaattatggatcgatggtgggtgcctgttaccaatggggttaggtcctgatggaactttgggaccatttcctttaacaagctttctggaattggcctttttttattattatatattttatatagaaatgataagaagaagaaaaattcttgttagtcactttaacatgtgttcatgaattacaaatgtaaatcaattatatatatgcataaaaacttacccaagtaactagcatttgtcgtagagctaaactattttttgctggtgtacttgctccatgtagtttaactaataagtcaaaaacatatcatgatcagtacaaatgttaaccaaaaaaaaaaa

SEQ ID NO: 228075 - DNA, 1767 bp, Cannabis indica
atctttaattaacatgcactactaaaaaaaaaggaatttttcgactgtttaaaatagtcaagtaattgtattgtcgtcggtctttatgattggcgcctattcggctgacacaaaattaggtggaataagcgtcgatggacaataattagtatgcctatttcctaactgtttaaaactatcaataataagtagcactatatagcccacaatttagaacagtcgataatatcctttatcgtcggttctaaattgtcgactatagtaaagtactattattgtaaaaactcaaattttcttaatattatctattgtaatccccattaagagtattgtatttatatataatatatataaataaatgtatatttatatatttttttgttgaaagagaaataaaatataattcaaagtcataaactaaattatacgaacaaatttctcctcaaatgaataaaatccaagaccaattgttatatatcacatgattttgtgtgtataaataaacattaattaaggattagtactcatctctattgtacttgggttactctcaccctttgtaattgcttatcatttttgttgacaagttttttttccttttcttttcttttttaatgtcattgattgttcataacacctgaaaatgccctaactttcaagacaaattgtatttagtatttttataatctcatttagattgacaacttttttcctttctttctttcttaccaaaaagatagtttgaaaattaaacagatggttacagaaaatattctgtgagaatcatcataaactttgaaaacatgggtatatatctttgacaaatatggacattctcaatattatttgactgttaataataagaatttcaaaacagaaatgattattagaaaaagcccaccacaatcaaaaagccaaagtaaaaaataaatattagcacctacaaaatcacaaaaccttctaagctaaaattgctgtatcaaattcatgtcaatgaatagcagcttatattaattttcattttttttaatttgttttattgaaggaaaatataatatagctgtaagaacaaaaaagaatacagcagcgaaaataaaattagaagaaataaaaaaaaaatcacatataggaacgcatcctaggccttgttaaagattgtgctccatcaacaaaaatggtagtgcctgtcatgtaccttgatccatcactgatcaaataaataatggttgaaaccacatcagttttcgggtctagccatctctctagtggtgcaccctctttcacaagcttctctgctctttctttccctactgattttaagtattcatcttcaatgtgtaaacctctggctattgcattcaccctgattttgtatctcccaatctccatagctgatgcctgaaaaataaacaccgaacattgtagcgatggatcgtgtaaaacagatattcgttactaatataaagaaaaagtcatctgattctgtggtaaagttattggattaaaggagtagcaatgtgtctgtcatgtgtttggattcaaaagagtattaaggaattgttaccctgaccaactgttgaagtaaccgaagaattgaagcccatttaaactcgattttggttaagcgtctcagagttatttaaaagaagtaacattgtctgtcatgtgtttgggattcaaaaggtagtagtaagtgggttacttactctagctaactactaaagtaaccaccataaagagcgatgaattgacgcctattaaactcaa

SEQ ID NO: 228076 - DNA, 2362 bp, Cannabis indica
aacaagacaaccaagaggtaataatcgacataaccacaacttccatatttccacaccaactaatctataggtataagttaggctgaacatttgactcgagtttcggcccagacctaaactgtacgaaaccaattattaaaaaaaaaaaatctatatagaacgggcgggtcgggttgaacccgttactaatgaatgaaggggtacatgttagtgttttaaaacacacacgtgacgggtgggacccaaaattacccattcttcctttatatattatgtatatatatcattaataataatataataaacatagataaaaaaaatttaaaaaactaatctatctcactcttctcagatcagatctaatatatcgctcgctttccctctctctatcagacacaaaaaaaactcagcctgacaagcccctttcgttttcaccttcgtatatactccaatcaggcaactcagcactccccaccgttcattttgttcttctctctctttaaagtttggtctcgtgctcgctgcctcgcacaatcgctcgcaacctcgccgtccattgtcaactaattccttctccctcacaatcatctatttcgacaaccaaagagagaaccacggcttgaaaaccaaagagacctatatctagtcaaatcactccctatcgtttctctttctctatgtcgatggacgatgctttggtctagatccaatcatccattgatttgccctctcctagatctatctacttcccaatcctggactcccaccttctctttgtaatataaatattataagtttatgtatatatatataaaattttttaaagaaagtaaatgatttttggtagtttttttattgttattacttgatgaaacttgctacatgttttgggtatagttggtagttgtgaaatatatattctttttaaaaaaagaaaaagtaataagctattttttaaaaaataaaagataataataattacaattaaactactaactcatggatctgaccaccctctcatccgccaactcgtcgatccggccaatctacgggtgctatttttttggtactaaacccgtgaatttaaaacatggccagcccgatcgatgttcgagcctagtattaataaaatgacatttgattaaccaaaaccaattcttaattatcactagagtggcacgtgatccataagattgtttaagcccttgaaggagtggagaagggattggcaccacaccacgtgatcctttttttcagcagcaaagaaaaattgccactagaatggtgaatgatactattgtcaaatttttaggagactcaggatacaaataaacaatatgaattagatagaataatgtaatattaattttcaatgttgcagtttattataaattaaattattttaatatcatgatttaatggttggttactttcatattttagggatttgtcttcaaataaggaattgactggaccactcccagaatcaattaggaatttgaagaaacttaaaaaattgtaatgactacatttgattatgtattttaaaataactcttaacaaaatataagtggtagcaactaataagtctctcacttttgtttcatttctacaagaatcttggtgggatgtagtttcactggacaaattccttacagcataggttctctacaggagttggaaattttgtaagcaattttctttagagtaattagcggtaaactgttgttatgttttaatttatatacacttaatcctcttatattttttgtggtaaaattcccttaagtttactttttttttaaaattttaaagctttagttaaatatcactgttaaataccaaatgaatgaccactgtgtacacttatgtatatgtaaaagtaaaacttcaagaaaaatacagtaataatccaatttatatttaacaatggtattcggctgacacttcaaatttgtaaagaaaagtaaacataaagaaattttgccacaaaaaaaaaagataatggagttaactgtaaaaaataaaaacataaaggaatttagctgcaaataaacattttcataaatatagtatataattttgtatgcttttaatatatatacaaaaaaggactatttaggaaacaaaaaagttttgatatatatggcattcaaacttagttgcaccaaatataacattaaaaaaaaaattcaaaatatgggataaatcatcgtagataagaagaaataccataaaaaaaacttaaaaactacgtatataaatttacttatatataatcaaactagtttcttaatgaaaaatgtaaatttttagtaatacgatatctttggtcttctctggtttattgattcaacaaaag

SEQ ID NO: 228077 - DNA, 2330 bp, Cannabis indica
aaaaaagtatgaattaaaatattttgggatgatcttgaccattgatgatgatctaatgctaaaattgactcttaatgaaaatttttacttttcggagcttgaatcacatctgttggatcatttttgggtaatctgtggaaaaaattacacttgtcttgagaacaaattttttacttgaaatcttcaaaattgcaatatgggtgtgagacatgacttgaaattttttgaaagatatttaaaatacaagttgaatcacatcaatcgaatcaatattgaggtagttatggtcgttttactgaaagttattcagcaccgagcacctgtattctttgatgcctaagtgatatattgacatcacttagacaatttattagttttggtgaagtcactcaccagttctcagagatgtcgtttttttgtgaaattaggtagacttaaaactctctaattttgtcgatattcccccttgccgaaaaggtaaaatatcaaacttgtcacaagtcgtggctctcgtttactacaaaaatagtcaagacagaaccataattagataagcaaaacccaatgcacaaggccacatgtcaacctggacgatgggtgctcctcgggggagttctcggggctcgttttgatacttctaaggcattcgagattgaaaaaaaagtctcctaccccatttttgacaaaaataagaagaatgtctggagaagaatttgtgtttggtgagtgaaagcatgcaaaccaagccatacatcaaccggggcacaaggcccatcgcccatgttaatctgagtgttagggccccgttttggctcccaacggatcttgtttccgagaccacttgtatcttcgttatttctgtaaatagaaaagatgtctggaacacttttttggagaagcacttggaactggcccaggttgataaaatgtaaacctgggcaatgggcactaggcccaagcactaggtccacttaggttctaggtcccagttttgcccaaaacactcgtatctcaattattggtgaaaacaaagaatatacccagaagacttcttaggaaaaatgtttggaaatggcccaggttgacaatatgtcaacttgggcattgggcccagcactaggtcaacatggcactgggtcccagttctgactcccagacggctctatttgtttcctaaaatcacccatatcttaattgttaatgaaaatggagaatatacccagaaaaatttgtctttactgctattggaaatggcctaggctgacattatgtcaacttgggctgggagctagcaccaggtcaccttgggcactgggtcccagttttggtctctaggttgatttgtttatttcctaaaagaacttgattcctagttttggatggaaacaaagaaaatgcttgggataattcttcaatattgtggttaaagctccccaggttgacaatatgggcactaggtacatcaccaagaggcttgagcaccaggtgctccaaacgaaaaatgttctgattctgattctaatacctctaacatgtttgtgataagtcttattcatgtctaagtaaaacttttgagccatttgcactaagacgaacccgaaaactaaaaccctatctcgagatgtgaacttaggcgttgagtgaaaccctaggcgcccgagtcaacttctgggatgccgatttgtctctttttagtttccatgcctcagacttggattcttcttgtctttttggtttaggatactgaaggatggtgagttggaaacaacttggcgggatccaaacacccattccatagttcctgaagtctacttgggtgcagggctaaggacccctcccaggttgacttgtatgacttgagactactcaactctgtaaaatgttttccttctttccatgtgttaaacattgatgtctatgtcatcagggctagttttcatgtaaaaagtttccccccaagtcagctttgcacctatgtgaggcttacttcatgacgtagactaagaccatttcatgtgaaactatcaggtgggcatcaatttcaaaaatcttagaaatttttttctgattgtcttgagtgatttcgtttgatttgtgagacttctaaaatttatcaacactaaaatttcaaaaccaactttgatcttcaactatcttcttagcattggctctcttgtcacactatgcgttaagtagatatagatgtagtctttgttctctcctaggttgtagccttggagttcttattggaaattattttaccatgatctatatttactaacatgcatgttgattataaatctttagtctaacaacctaaatatgaatat

SEQ ID NO: 228078 - DNA, 2972 bp, Cannabis indica
ttatactcctctttcctctcctcaacacttttagcactgtttgactttaacgagtttgaattcccgaaatttccattctgtgaccccttctgcggcctctgcttaattgcaaccttaacaatgcttgaatcttctgatggcaaatttacaggaatgtcagcaaggcgaattataggaactcgacactcggttgttttacgaacaataattctggaaccagagccatcaggtgagctattatctaacaaaaccattgactgaagtgaataatgttgtgccacacggtgtgcagccaaccgtaagtaagaagtaggcagctgctgaaactctagttgctgctgagtaggatcacgtataaacttctccacatcttgctccatccttaaaactgcttagaacaaattaagtactcaattagcatgcttgaagcaaaaacaaccaaagtaataataataataaggaaaataataataataacatatcaaaaagttgaactactggatcacagaggtggtagcatatgatatctaaaatcactttcattgaattgatcatggtgatgacaacaatgctgaaaatagtgaggattacggcgtttcacgtatacacaaccttccgaacaatcatataaacatactactcatcttgccatacacgcaggactcgccaaaaagataatcaatgcccatggccattgaagtaacataaattaacaaatatagcataactgtccacaaaactcaactaataagtaaacgtaaacaactttaatcaaaggcagtgaggttcgattcttgaatacgcccaccagtatatgtatctagaattgtatatatatatttgcatcactcacttgacaggcgctcccgagggttttgtaatgcttcgcgaagaaattgatcaacctgattgagtacatcctccgaaactttctcacccgggcaaccagagaccgccgaagacgaattcgaagacgaaaaacaagaagtagatgaggcatcagtatcatcggcagtcccatgggtgggtctggacgagtccttcttggaggagagaatcaagcgggtcatggactcctccaaatcagcgacctcccatgactcgggggctccgccgagatccttcgccacagagccctccatggcccgattaaagaatatgttgacgcaacaataatacgaagtgaggaagaagcccccaaataatttcgtcgctagggtttgagggggaacagtaaacaaatcatcaaatggagcttgggtgctgtgaaaccctggagagaattaggggccaggatttcatgtgaatttggatgaaagagggattagggtttggagaattagggaagagagaaagaaagactgtgattcaagatccccagagagagagaagagagatagggtttgacgatgttattgttgttttattgggaatagagagagagagatgcgtgtgaacctgatgatattctttgccacgtggctcccgctttgtattactctttccttttattcacgccattcgatattctagatttctatttacggaggatagtctccatcttttcattgttctgcagattggtacaaaaattattctaattttcatatttacagttttttaatggcacatttacaatcacatcctttgttttatgacatattaaaacaaaaatttatattaaaaaaatactacattgttggtataattttcatttttgtttattaagaaaggattttttttttctgaaaataaattcttcactaatagcaacattaaaaatattcaaagcgagtttaccatgcatccataactaatttacaagcaatcatataaaaaacgccttaaagatataattgaaaagcaaactagcaaaatttgagatcttaattcatttaaaaaaaccaatgaacactttgtaattgtaaaattttgtctatttttttataacataattatagcgcatttggaaagacacatgagaattgaattagatgtaattagaagtaattatacaatttgacgtatttgtctagtgacgtaataattatttaattactatgaaattattatcttaaattctcattccccataagaattaagcatcataattacactgtgtaatgacgtaataattatcgtaatgtttgtaaataaaaaaaaactaatatacgaatatatgatatctaattttttttaattaacattatttcttaaagttctcttttaaattatatatttaatagatttattcatgattttacataaaaattgattgatgaaatatttaaaatcattttattattaatttttaatctatataagagtaacaaatactcaaacttccaagtataaaaaaccatacaccgaataactcaacatatatagtcaacatataaaaattattttaaatttgttatgaaatttaatttaattttatgaaaagtttttatttattatttatttttttcaaatgagatttttattattttgaatattatgaatataaaatttattttaaatatttgttacgaaataataattattattatattaaatgttacacaatattaattttttgtgtaattattgacaacaaaaattcatatgtaattattacttgataatccaaacacatattatatttttaaaatataatgtaattatttttgcagttacataataattacacattggcttcctgatacatcctaaatgtataattttgaggtagttgagagacctcaatcacaccttaaggttttgtttgaaagaaggtatgttattaatcaaatcaaatcagctgttacaagagcactaataaatctaggacacgcatctgcccaaacttgaacccctataaaactagtgacagacttaaggttttgtttggcttagttcttatgagttctttttcaatatagaattaaaaaaattccaaagagtatttggatgaaaaattaaaaaaaaaa

SEQ ID NO: 228079 - DNA, 1456 bp, Cannabis indica
taattagactgatatcgataattcttttcaatccccgacaacaatacataaaatttattgagaaatttaagctatgtaagtgcacaactaagtatcgtcctcaaggactaattcatcaattaacagccaatcaactctttagttctatttgatcaaacaatatctagaaattttctaacaaagaaaataaaaacaatttaaatgagattttaataaaaataataatgagaatgaaattaggacaattatgattatctattatcaactcttttagttcctaatgcaacaactcaatcctcttcttcctattcaataaacaagttgcaaagcaattcataatccgattaagatttacaaacttaatctaaatgataactctctagatttctatggcaaagttaaatcataaagaacgcattaaacaagcaaccaaaaaaaattacttaaatactttcgttctaagttgaatctgcattcaaacaattaaagcatatcaaattttacttttcaaatttcaacttaatttgtaaatggcaattataaatagtcaacaaataattgcaacaattacacagattgtaaagaattgaataagagatgaagaagaaaataagttttgtattaatccataaaagagttgcaagaaattcacataataaccctaaagagaaattagcccataatattcattctagcaatattagcccatagtattcattctaacaatcaaagattcaattacaaacatgaaaaaggtaaagattgatgaataaaacacaaaattggatcctccaatggtgttctccaactccagccgtctttcctgtctatttttctccccaaattcgaatctccttccaaaacctacccacctcacctttttgggtcgaaacaggaaattgcctaaaatagcctagcgccgcgatctttgcttagagagtcatgactcttattttttttagaaaaacgaggatttttaattttttccagggccgcgacttccaaataaaggtcgcggctcttattttttttttcaaaaaaactgcttttgtatcttttggtgagccgtgccttgatgggaaagtcgcgacttttgatgttgattcttgaaaacttgttttttcaaatcctccaacatgcttggagttaagaaattcaatctcaagattctttttcgcaaaagtttataatttcatcagcaagaaaccgaaaaaaacaccatgttttcaccaaaaagtgaaactctcattatctcaaacttgaaattaacataaaaacaaaaataagccaaaaaccaaacaataaaaataaacttaaaactagactctaaaataacctaaaaataggcctaacacttcatcttttctgttggttcatgcctaacattttagaattaagacaattacattctctagaatcacccttaaaataacatctttctaattaattattatat

SEQ ID NO: 228080 - DNA, 779 bp, Cannabis indica
caactgctagaaggtatcggcgatgatgctggtcttgcagaagatgatgacgatgaagatgaggaagaagaatgataatggtttctccatgaattttacttccattgcattgttttccctacctgctctcggtttcacccttgtacattttctggatgaactgtacagtttgttttacaaaatttgctatgcttgaattctagaactaactttatttataatccccttaagtcatgactttaaattatgattaattcagttcagacccttgtcagattttcttgcaaactcatctccagtatctgtttttcgagtattgcaacttagagaagatgacacagtgttgataacattggagagatgttttagctttgcacatggttattatttgatgtttaatgcgcgttgtttatttggttgttgaataattattagttttaatgacaagatattaaaattcataaataatttaaaaggataaggtatctaaaatattttacgcattctttactagtgtagatcagaatggtttttataatatatatttgtcttttttgaaagaagcttgttcaatgttaaaggcactaaagccaaagatatctacgggccattcaaataaaactcatcactccagtttttaactattttttttaaattaatctgtacatgtaactttttttaatttttttaaatcgcatccgcactgtaaacttaaaaaaccacagaaactataccgcaaaaattagtacagtgtggtttttacaatttttgtgatttag

SEQ ID NO: 228081 - DNA, 840 bp, Cannabis indica
taaaatatatgtattaaaatatatcattaatcatttatggcaatgaaaaattaatgtttattgtgtgctaaagttggtatatattgtgtcaaatttaggctaatttttagtatgtgtcaaatttagcacaacttataccacactattagagaaactttttatcaaaaagtactaaaaaataacaatacactacctatataacactctattagagatgctcttaggcacattaacgtgtctaatatcatatcaatgagtcgtattgtaattagttaacagttctacatattatttattaaattaaattattctgattcgatattaaaatacaccgataataatacaccattttttcttataatacttgaccttaacgttcctttatagtattttcctattataaatgattttgtagggattatcttgagctaacaatgtcagtatgcataacttgccaatagtttgcaaaagttgatgtttgataattttttgtacaattttaaaaataatgattaaaataaacttgaattacacatatttcttgcacataatcacatgtaactatttgagttacacaattaaaagtgacgccatttcgcgttctgcgaatagtgtagcccatgcactagctaaatctattacttattcgttaggagtttcagtttggacgaatatttgtcctctcgttttattagtgctcctgtaacagttaatttattggtttaataaaattcttacctttaaaaaaaagaaaaagtgatgtcattaagtgttagaaatttaaatatatatctaacattactcaatttctaattattagagtaacgtaactcatgtttc

SEQ ID NO: 228082 - DNA, 1758 bp, Cannabis indica
ctgatcaatgagactgatttacatttatgtatgctaacaagagtttagaaaatgcaactagaaacattagtggcaactggattacagttaatgaacatacagagatattaaagcactacaacaaaccataataaaaacgattaaaagtaggccataagcattaagctcaacctcaaataaatccctcttatcccttttctcaatttttcaaatttagcaacacttgaaacttatttcaatactcatatcctgtagttactagttaccgaaattagtaaagtacgacaactaagtataaacattgagatcaaagttcatatttttcagaataataatagaaaagaagtgttttattacctggtttgaaaaatatagattaacacatttaagctagaacctgaccatctgaggataatgatctttgatctaagatcaagtaagtgatatttacttagaaaagatattacggtaagcttttgatatcttttctactgtaaatatcagtcaagtttgatgcataaccaatacatcatatcttagttttactctagtaatacattacaaaaggtattccacttatccaagtgtaagtaaaatatatctctgattatcacgtcagtgtaaatcctgtgccctgataaatcatgggtcttaatgtttgaagcctatgattattttccattctgtagataacacaataatcatgattatcttaagttttagatttaatagaatttatatattaaaactataattatgaaataatcatgtgaaccaagtaatataaaatttgacttctatatcattctttaatagtcaataagattactttgagatgagttttatttaggacataaaatcttaacaacatgtggttattgtatatacaatttatgtaataaaaatatttttgggtccgtcaaccatggaaacttgatggtttggacaaagatatcacaacggtaatagtttgagaattagttatactgggaagttgtaattggtatgcagctttactcggggtgtttttgaggtaattagttatgaccattttacccctatccttaaagattatttaggaattaagttaatgggcattttagtccttatcacctttgttttctttcctttttgtccttactgaattagacattaagttttatgcagaatattatttgaggataaacattaaaaagtttagaagtatacctctctctagttacggccaagaagaaacccaaggagaacccaattaattttagagtttttcttcctcatttaacaaggattttagttgtttgattcaagtgggatttgaggaattcaaggtgagtttagttatgttgatcttcattgaatgtgtaagaaatattaattttaagtatggattttatagattggattctatatagataggtttgagttagaatctatttctatgtttaattttatgttatttaggtttgatttgggtgattattgttgatgttgggcgagagcttcaaggttgagttcttaaaactcaagcttaaagctgtaattgtaatttttttattttaatgtaattgttgattctgagttcatatagtggtttcacaagtgctacttcaacaagttaagcaacaccagtggtaagataaaaagctaagacatatttggtccgaaaccatgatggtgagaaatttaatgggtggacaattaatgttgaaggttacttataccataagggaatattagtttaatagacatctttgatct

SEQ ID NO: 228083 - DNA, 1694 bp, Cannabis indica
aaaaaatatccactattgtggtcaattttggtttttcctctgcaaaatcagatcaatcattgtttttcaaaagcaaccactacactcacattatatgttcttgtatatgttgatgatatactcatcacaagaaatgataacaatgttgtctcccatctcataaaagctttgaccaatacattttctctaaaagatcttggcaacatgtcatacttcctaggcattcaagccattccaattgacaatgggattctattatctcaacaaaagtgcattcaagatcttctttgcaaagttcaaatgcaaggagtagacttaaagctctcctatgaacagtggcttgaggttatcacattttggaagtgatcatgttgaagaccccactctctacaagtccattgttggggctctacattatgcttgcatcacctgaccaaaattttcctttactgtcaataaggtttgttaattagtttatgcatcaacctcttcaatctcattggattgctgtaaaatgaattctgaggtatttggtaagtaccttagattatggtcttcaaatactaaaggattcttctcttcatatacaagcatattgtgatacaaattgggctatagatccaaatgatcgaagatcgacaactggttactgtttgtttttgggagaaagcttagttgcatgaaaatctaagaaataaaccaccatctcgagatcatcaaccaaagttgaattttgaagtttggctactgttgtcactgagatttcctagctgcaatctttgttgtcttagctccatatgaagacaactattacaccctctatttggtgtgataattggagttccataatgctagcagctaaccctgtattacaagctcgcaaaaaaacatattgagattgacctctactttgttcgagataaagttctcaataaagaaattcaagtttctcatgtccctgtagaacaccaaatagcagactgcctaacaaagctaatttctaacaatcgttttcctcagtttcatgacaaactaaatgtcttgtactcaagcacacttggtttgagggggactactaaggaaactgaagctgagttgtccacttagttagtatttctgttatggttgttatgctttctattgcaactaattgagcttctttcctttcttggtttagtgtataaaagcatgtaacactctgttttttagtaatcaatacaatttttaattctttctctatcttctttcttctctctcttctctcttctccttcattttcgtttacaccaaacaccattatacataacgaatgcaaaagtagttgaacctgtgatccacaaacatttaaataaaataaaatttagaacaaaaatctaacagaaaattgataaaaaattctcaaaaaaccataaatctgtcaagcatcaaactcatatcggaccaatattggaccccatatgataaattccaacaaaaaactattggacataactatcggacccatcgaacatgacatcagacaaggcatataaaacaaaattctaagtggcatcgaacacaatatcggatagaccattgggacactaatagggcattgaactatcccattgggcctatgtaaacatcccttatctcgaatcagatctaaccatcgggccaccatcagacctctttcggaaatcatcaggccagat

SEQ ID NO: 228084 - DNA, 1777 bp, Cannabis indica
attcttttcacctcacataatagtctaaagttcataaatataagtgagaacgtacccatgttgcaaacccttcattcagccacaaatgagtccaccattccatcgttacaagattgccaaaccactgatgcgcgagctcatgagctaccacagttgcaacctttcaaaacagccaaatattcaatttttagagtactaatagcaaaagcattgatgttcagaaaattcacattattaccctttgcttgtttgcagctgctgaatgttgatcatcataaagcaaagctgtttcacgatatgtaaccaaaccataattctccattgccccaaaagcaaagtcaggtatggcaaccatatccaatttaggcaaaggatatggtctaccaaaatatctgtaaatatgttaatatgttaaccaaagaggaaaacaatcaaaatcaaaagcacctataaacggaaatatatatactcagttttgagaaagagaatctactctttgaatagctcaagtgtcttgacagcaacatgtaatgcaaattttccttggtttgtctttcctacttgacagtatactcgaactttgacccctgtgattgagatgtaatataacactatcaatgactgttcaaaggtttgttcacaaaacaatagctataatagaaattggaataaatcaacacgagaaaaaaaataggaaaattgaaattatgattttggtgagatagattttcaaagaataaaattgtcttttatttaaatataataaaagaatccattcttgagtggatgagggaagtagtattctcattctcattctttttcctcttacacactaactttaccctatttttcttcgtaacagttatttacttcatttttttgctgaaattatttacttggctaaatgagaatagatgttgagtattataactttaccatcataggtatgatcttccacataatcaagcaagccaataacaaaggccaccaaatatgtagacataattggtgattcttgatatgataatgtcttgatttgtcctttaacattttcttcaatgattggcatgtttgaaagggctactaggtcggatggaacatccaatgtgatcttaaacgtagcctgtaactccccaagaaaatataacacaacaaaatataacaataatcattatatatatacatatttgttgatttagatagagataaatagagaccttgcaagctggttcatcccaacaaggaaagcactgtcttgcatcagctggttcaaattgtgtgactgccatattcttcttctcaccattatgctcatatgtacttatacaaaagaagagtaataagtcaagcatatacagacacaaaacaatctattaagaacatacaataaaaattcctccaaactatggtacttaagagtcttattcccaaacttttttacttatggttattgtagagttttgtccttccaaccatttttcttcaacggtttgttgatgtagttacatgacacatcaatgccacgtcaatgctacatcagcaaacccttagaaaaatgagaaatgttaagaggcacacatcattatggtgttggacacttcaaggggcctaatagcaatgctctagaaaaatagatgcaatgacaagactctacaaggacatttatgtgaaaaatgtttagatgcaagaaaggctacaatttgaggaaaattaaatactttgtccatttattaataagaaaaacttcaaaacacgtatgcctctgtatggagataag

SEQ ID NO: 228085 - DNA, 1613 bp, Cannabis indica
atttaaatttgttgtcgattgatcaccttcaaaatggtcgattgaggcaaacaccgattgggtcgatacgattgaaatactcgcaggaccgtcaattcttgctatcttccgatctccatcttttagtctccgttcacgtctccattggccccctacaagagaaaacagtcggtgagagagtgcaaaaaaaaattcgtagagaagatagctgtttacaaatcttgatcaagccttgtgtcccaaaaactcacatctccgctagaaggtcagacgaattctttgctgtcagatcaagatcatcatcttcataatcatcatagtcagagcttttttgaatcaaagaaaatatcgaagcgtcctggtagagatcggcctctgggtcatgattctataggggataagatccagaggtacagagggattttgttactcgaatttgtccctttgcttctcgttaaatttattgtttacatgatgcctacagcacttaaatccaaggcttcttataacgttattttttgatgttattagcataggtaggtctattcacgtatttcattttgatggaaactttgatctggtctccattgctggcaatcttgagctatttttacacgtctttctttgttagtatattattgtttgaaaattggaatttatgtttttaaaaaattaatatagtaaatttctcaaatgcaaattaaaccaggactaagtgcatatgctgataatcctcattatgttgcttaatctttgattggtcttcttgataaagtacaagaggcagttccgataaagctgtgttcttccactcctgtttgagttggggtaagttaatgactactaatccataatggaattgagttttcaaaagtatgagaaagattagaaatatgttttccacatttgaatacttattagattttttactgaaatacaggcaactactggcttgagatctttgcccaaagatacgtctgaacgcgtcttgcaagaagtaatttctggtccttagtcttatgtatctgtttatctttattatttgtgtagcttactatgtgtttaatttattttaataatattcatagtaattccttaatattttttataaataaagtcttaattgtggttcttagatgtgattcttaattaatgaaattcggttcagtatttgctaatcgaaggaaaattgacgaattctggaaatctgattctcaaaatagcgatttgtattcgtaggggctgttccgaataaatcaaattttgaaatgattatagcttttcttgcaataacaattgtgagaatggaagattctttaaatacgatagacactccatagtaaggttcttagcttgttctccttccctattttatttttatatattctaaattaattcttttcactatatataatatataaagatatgtatttatatgcgtgagttcgcatctgtttttctactgtaatcgatgtgagtaattctatggtgaaatgggacttgtgaaaatggatatttatagtggattggatggtagaatggagaaggtggttgaggagttcgataagtttttggaaggtgttctttatgaccatagtctctgtgtcaatttt

SEQ ID NO: 228086 - DNA, 698 bp, Cannabis indica
tagtttccactattgaagctctttgaatccaaccaatatttaaagtggagcagatattcaaatttggtgaaaatgcagcacatgtgatatttcgacaactttcccaagtctcacatgtttgtttgtgtgacgttagatataataagtgccttgtttttgttcccattcccaaaatgatctaaaaaaagaaaatatgggttgtatttgaatttgaatgactttaattaatgtgaacgttaaacacaaataagttaattttgtgacttcatccatttcatacataaatacacatgtttcaatggtccaagttcgtatcacgcactgatgatgtcttcaatttatttttttgaatggttttaatttgactcattaatggatacaattgttatgagatgtagaaaagatagacatgcatagggatttggggtggacgcaaagatagaaattattcaattttatacaactcaggatagagtatgaaataatgttttttgttttcttagaaaatatagtggaggcaatagatttgaattatcattacttatttaccaatgcatatctaacgagtgttaaatttattgagcattcctactattacgtattaagagatgtctagcaccactataaaataacacttttaagaataattaatgatattttataaaagattatattaattatgtgaaactcaatactaa

SEQ ID NO: 228087 - DNA, 1955 bp, Cannabis indica
ctcaaatttttgaaaatagaatgaaaaagaaaataaactaaaatgccatctcacctttttcaaacattcttttatatttatatattgattatcaaacatattatatattattctttaattaatatataatatatatcataattttaatctctatatcatattatttaatttataaataatataatatatgagatctgaaaataaattacaccactactaatattacatttaaataatgttgagttacaacttaggtgctttctagtattttcctagaaattgtaccaaactggctagttaaaagttgaatggtgcaaaagataggatcaagaccatgtgtgagtatcaagctttatcttgtgtctattatttaatattacttaaaactaaaccacattttcctttcaaactttaaatcacatgtctaacttcatttcaaatatagattagaagctctaaatattcattttctgcctacctacttggaagagatgaaaagctattttacatctatataattatttttttttaaaaagtaatgaacaaatttattgaaaatataataacattatatagtttaactaaaaatattatacagctcatgttcattaaataaatacttaacatgcctactataattaattttttaaaataaagaaaccataagatcatataatatctttgtcaaaaaaaaaaaactataagatatgaaatcgaaattgatatttgagggggttgtccactatatcttcattttcacttaaatctagtatataatttagattaatctaaggagtctaataaggacgtcatctataaaagtatgtatatcttaaaaaaatgtgaaaaaaattaaaacaagtaaagtaacgttagtatataatataatttcctcttgtatttatagcaattaattttaatatgtaataaataataagtagaaaactatatgggatgcttggaaagtatatatctgggataaaatggggtgggtagtatcactcccgaccctaccccaaacccattttgggtgtataaaattgcacctcatccccgctccattacccatcaaggcgggtaatccgcgccctattttgggtaagtactcgtgggtacttgtccctgcgggtcaaatttccatctctaaatagggctatccaaccttttgcttctaatctaatctaataattccgttaataattagattttaaaaattatattctcatccaatttaattacgcttcaaaatctaatttatctaatctagttaataattaaatttaattaattttttatttatatttcacttcgacgcttgattttaattttaattttaattaataaaacaaatatataaaaactaaactatacatgagtttttagaatttttttaagtatttctttagtaatatgtaataggatccataaaacattaataaacaataagaaaaaattaaatttaaatattattttattatatataaataaatataacatttttgtaatgtatattacatgtaatttgattggatttgattgatttttaaatggatttgaaagcatcattgaataacctatattagttcggtataattgaattagtttaaatgttgtccaacatcttgtatacattttttctttatttgagggataaatatcattttggattctgtatgttgcaaaagttactaattggaccatctattttgttaaatgacaaaatggaccctgtatttttcaaaattgtacaaataggactctaaactgattttttttcaaaataaaacttaataataatccgacctagagatgttatgacaaaactggttatattttctttatctgttcgtgtcaaaaattgtcttaaaattgattatattaaaaaataaaattgttgaaaattaagctcaggatcttatttgtacaatcttggaaaatacatgatttattttgtc

SEQ ID NO: 228088 - DNA, 3480 bp, Cannabis indica
acattccttgttctgatagaaacagtatacgtttcttttgaaatcctaaactgtaccatgtttttcgttggccatgtgcttctttctaggttcctatatgcattgtcaaaattaccaaactaaaaacttaaaagacaacaaataaatactaactttctctcaaaaccaaattcatgttgaaagcaacataaggaacaaaacatgtatacgcatagataacaaaatagccaacaaggctccctcgttaacattttattccaagttatctcagagcttcttaaacatataattccttgtgaaaaaggccaattttcacaataatataatcaagaaaaaaaatcaaatcacagcctttccgtttcttgaaaccgttctatttggttcaaacaaatttaacattccaaacaaagacctataaaatagagaaagaataagaaccttaacatcgctgggttggaaatatatgaagagaaaatacccagcaacgagaccgatagaaatcccaactccaaatccacaaaaacccaacacagtactgaaaaaacccatctcgaatccaacttccaatcctaaaagagcgaagcacaattttaaatcaagttttcttcttcttctttcagaaacgttctgaatgtcccatttttgcgaatccctcgatctctcagatcactggcgagtttaaaaccaaatataaataattaaagataatattaaattaaataacaaataaatatttatcggaaaactacaaaaactagttgttgtcactattgattattggaaagatatatgtggagagagagagagagagtcatgaagacagggacgtattagaaggcaaagaatcgcattaaataaataaataattaattaagaaaattaaacgtaagaaaacgtatttccatttttacaagcttggccacggtgcatgttattctttgtttaattgtttggaacaacaccacccttttcatctttccttcattaattcattaccattaattaattgtttacattaattacttatacccgtaatgaaattaattgtgtgtttcttatacctcggtaaataaataaatgtcattttatgacaaaagtctggtaaatatatctattgatgttgacttacgataccacgaataggtcttggaaaggtgccacgtggcaaatccgagtagaaaccctttttctcttattacagaactgtcatagacattgactgctacttacgtactttcttcaatatttataaaaagatcgttgtgagtggtttctcatattttatactatttttttctttttgttatttatgaaattataatgtgttagattttttttagaagaaaaaatttttttttttttgaaagaacttgtgctttattaaaaaacatagaggctttattaaaaagcatagagcagtacaaagcaaataaagctataagctatatggaaggtaaagaaccattccaaactaactcattatctaatccaagaccaagcttagctaaattatgagcaagaacattactttccctaggaacataagaaataactagcctcggactaaaagataacaagttcttgacattaaccaatacatcatccaacacattattattccaattacaagaattaagcttttctactattgatttacaatccgttagcaagacatctacagggagagaaatcatctgagcccattgaattgcctggaaaatagccttagcttcagcaacagcaggcggcaccaatccagggaaaggagtagaaaacccagctttgactgcattatcagcatctaaaaccaccactctgatactatgcctccgattagctgagtcaatggctccatctgtgaatattctaagccctgtagaaggaggtagctgcacttgagtcgaaggagatgcagattgggaacctgtgacatgatgttgctgtgcatccaaaaacttaaagaaaaaattaagactccaatcatacacttcttttggaggaaaagtgtactgattatgaacaaaactattcctttgattccataaagcccatataaagcaaaacaaaataccaatatcatttttgtccaatgtttgaagaagaccaagaaaaaactcatcaatatccaaatttttaaatgtatcataataagcagcaaacctggaatatcgccaagctttcctgaccctggagcaatctagcaaagcatgcttaatagtctcattgtccatcttacaaacaggacacaaagaagaattaatcacacattttttaaacaaagaagaagctacagggattgccttagacaacaaacgccagacaaaaagttaaaccttaggaggggcagtagaagaccagattcttgtccaaaacttcttagaatcagaaaaagaagaagaagacggaaggtcctgattagagaaagccaaatgataagcagacttaacagtgaaacacccagaactctccttttcccaaatcagcttatcatgaccataacttccaaaaacagggaccgcaaggatatcatggaccatggactcatcaaagcaagactgcaatttacccacatcccaagttcccgaatcagtaataaagaaggacaaagaatgggaagaagggggaggattatttgaagtaaaaaaacttgaatctattattaggaagccaatgatcacccagagtttgaatcccatacccattaaccactttccaaataagtccagaagccatcaggtccctaccccataaaatgcttctccaagaaaacgagggactatgaccagggacagcctcaagaatagaagagtgtggaaagtatcgagctttaaggatcaagctaagcaaggaattagggttttggaaaatacgccaagcctgtttagcaagcatggcttggttgaagtgcacaagagacctaaaccccaaaccacccttaaacttagactgacaaagaaacttccatgatttccaatgaactttcctagtttccccagtagaaccccaccagaatctagccatcgcagcctcaattcccttacaaattttaacaggaagcctaaaacaggccatagcataagcaggaatagcctgaattaccgccttcaaaagaacctccattccagccctagaaaaacacttagaggaccaacttctcagaacagaagcaactttatcacaaagataggtgaaagaatgatatttagatcgggtaagacactgaggaagacctaaatatttacaaccaaaaggccgatcctcaaggttaaaagtttgaaaaaacaaagcacgaatatctggttcagtgttaggagagaaaaggataaatgacttagagaaattaatgacctgtccagatgccttagaataaatattaaacacatcctgaagagctaggcaagaattcctatcagcagtacaaaacaaaagactatcatccacaaaaaataaatgagagatagcaggagcatgtctagagat

SEQ ID NO: 228089 - DNA, 1459 bp, Cannabis indica
ttcggttacgatattgggatttcaggtactgtaacaaacttaacctcttgtatccatacatgtttttttttcttccgtttcttttctttcttttttctacccaatggaacttagactagtttttttacgtagaaattgatttatctaataatttaatcgtggaattttgcaggtggggttacgtcgatgaacccatttttacaaaagtttttcccgtcggtgtaccgtaagaaaaaggcagaagagtccaccaatcagtattgccagtacgatagtcaaactctgaccatgttcacttcttctctgtatctggctgccctgatatcctcactggtggcctccaccgtcaccagaaaattcggtcggaaactgtctatgcttttcggcggtctgctcttctttgccggagccattctcaatggcttcgcccaaaaagtttggatgttgatcgttggtcgtatcttgcttggtttcggtataggtttcgcaaatcaggtaaatctttcgttttaacctttttcttttgagatcttaattttgatatttatattctcccttgtttttatgtcttgttttgttttgaatcaagaagtttttatttttatgtctttgctttctatttttatttaattgtttgtttaaaaaattaaaaagaatgtgctgtcggaataacaagaattttatttattttaatatttctggccatggatttttcttttaatatttttaactatgtcttgtgttctttttcataacatgtctttttgggattgaaattattcttattgtttttattattgtgagaaagatttgttagttgtttgtgtaatgtggttcatgcattttagatctgacaattttgttagaatatgacaaaacaagatttttcacacaaagttgtttatgatccagatataggatttctacctttttgttttgttttgtctttatatttccttcctttttcacgaaagtttatgtgaatttcttctctctttttcattttttctttgccatattttttgtttggttggtgagaaaatgtacccagtgaagaaaactaaactcaaatgaaaattcttactcaccacactcaagtgtgagcgtttactttcaatgagcgagatgggtttgtcctacttgcagtaagcttttatttacttggtcaaactacccagattttctttgcatatgacattgtttgtgcactctttttcctcatggtgactcatgcttatgaacagaatatttctttctgatagctgcttttcattaaaatatcaatttctcaaaaaaaaaaaaaattaataaataatccatagctttcgttgcaatctccaactttgattatgtcacttaagaaattttagcgcttgttttttctttagagacatgacaacttgtcacaactctcatcaatgtggtcctgagaacgactttttttgttatattttttttt

SEQ ID NO: 228090 - DNA, 2540 bp, Cannabis indica
taaaaattaatttaaattttttatcatcatacattggaatggtctttcttctatttaaatggaattttattccacaaatggtggaagccattccattggaataaattttaacactttaatatacaaccaaacaaaataatggaatggagattgtttcctttccattccattttattacctccaaccaaacgccacctaaactctttgtaaatagatgagaatgacctgaccaagaactgaaagtgcaaaaatagatttttttttttttacggaaacccatataataaagaggatacaagtgtcaggtcctcggctatactgcagagcaaatatgaaacggttcctacccaatatgaaaagataggaaaatcaaatagatcccgggtcctgagcgggataatacttgacgatcccgagtcctatgtcacgacaataaaactcggtaaacaacttaaccaaatcctgaaataggacctaaaattaaaatcggataaactctaatcgatacgggtttagaaataacctaaacatcgataaaacaccctaaactaagttcagaaaaaaaaaccccaaacaaataaccaattttgaaaaaaattagagtttcccttgttggctaacaggttaaccagttcttgcagcaaaaatggaaaactctagtttcgaaccaaaatccagccaaatctcctccgaacctaatgaaactatccataacaacttaataccacaaatacaatgtatctcaacactcaaaacttaaaaatacctcaaaattacaaattcaccataattaagtgaatttctgagttattgaactcaattcactcaaattaaacctaacagccatgaaaatatcaatttcaaacttaaacaaccttgaattaaatttagaaatcatgcactaaattcaattaaacctatagccccgatttcatacaaaaacccaaacgaacttaacctataactttagaaatcaaagagaaaagatgaagaacttacctccatgcttgcacagctgctagggttagctaattcagctataaatggattgatttgtgaagaaatttatttggtttcaattggattctagggctgtcgaagggaagaagaaggaaaaagaaggttttgtgactttttcttaatttttgatttacttcatcaattatctaaccttatcatctaatttatcaaataaaacaaattaaattcagcctaataaattctaggttttctaataaaaaaaaagatatagtcttagcaaaagatgattttaccctcctttaaacatataagctaattcataatccaatggtatttcggtcactactagctatcctaactaaactgataactcaacattctaaactagcccagtacaattccaatataactcattctattgtcgtcataacatctttgaccaacccatagagtttccattgtcgccatacccgaaaatgttttatttcaaaaatattatacataagacccaatgtttccgataaaatctccgtaattaataaattacgtttaattatttatttattccacatttactaattaactcataattagctcaagtaagagtataatcctactctaatattcatataattacatatttaataaaatatgtctaatttaacataatcataattttcaagatattacagtacaccccaaacttaattgaagaatacccaaaactagaatttctttctctttctcatgagacctgcatcccagatctgaatgggatcaccaaagctaaagctgaacgagggccatggtgttgatcgttctcgtttttggtctctaactcttcttcttctttgttttttttgcttaccccttgtttagatctagtttttgttgaaattttataccttaaataaaatccaattcagcataattgtatttactttcaataaatatcaaaaattatatcttgatctagtcataaactttgttcacatgttttatatataattacatgtttaatatataagttctattaaattctgaacatatagttattcacaattacagtaatatcataaaagtagaaagtaattatgattatatgcttcaaattatttagtttcatgatttatcaatgcattagatttatgttaacgtgatataaacgatggggtttgcttacactttgataagtggaatgtatttttcaggttattaataaagtatactagcatcgtatgtatcggctatacatcgaactggaccgatattaacaatagaaaagatatcataaacttatcgttatatcttttctgagtcaatatctcttagttgatcatagatcatttgatctcaatcctgagatggttaagctctacctcaaatgtattacatgagttttttaacttgttcgttaccaacttaccgtagaaccaacccaatacttacatcttgggaactcggtagtgtaattgagtgcgagtgttaattatagatatggacatctataacttctatgtttattagaagtgaaataatatttttcttagagtttgtct

SEQ ID NO: 228091 - DNA, 576 bp, Cannabis indica
ttgctcataactacgggggcccatatctcacttgttgtgcttcttgtacatgggttctcatcaactcaatcagggtttcaacttgagtaattagtttcgtgattgcattaatctcatgcaaccagccactttctttgaattgctcctttcactaggccactgctgattattcatgaccatctgttctaaaagctcgtatgcctcattggaactttttctcatgaatgcctcattagctgcaacatcaatgagcatgcgagtagtaccacacaacccattgtaaagattgtggtccagcatctaattttgaattccttggtgaggacactttctgatcaaatctttgaatctctcacaagcagcatagagagactcattgtcaagttgataaaaactattgatctctcccctcaacttggctgcttttgctggaggaaagaattttgagagaaacttcagtgcaagttcattccaagtgttgattaagtagatggaaccaactcttgactcgttcccttagtgagaatgggaataatcccaagcgaattgtattctcactaactccattcatcttaa

SEQ ID NO: 228092 - DNA, 2650 bp, Cannabis indica
atacatgagatgatgaggaggggcttattttcgaagcaggggctgatggcttagcagagatcgatgatcgctggctactggtaggacgttttctcaccaatcgggctatcgactttcaggcgatgcaaaataaaattgccaccctttggcagccaggtagaggtttgtatgtgaaggaactagatccaaatctctttctatttcaattttgccatgaagttgatatagaacgagttatcgaggggagtccgtggacgtttgatcgtgcaccattgatttttgaacgagtgaaacagggagagaatcccaggcatataccacttgtgaaacttgatctatgggtacaattgcataacatgacagtcggtttcatgtccggcaggattttacaaggggtaggcaattacattggtacttttattaaatctgaccaaaacaatttctcaggtgtttggcgggattatttacgtatctgcgtgaagatcagagtggacatgccactgaaaaaaagaagaagcttgaaatagtgggaggtccgacatgccatgtattgtttaaatatgaggatttgccaaccttttgcttcctttgtggtgttcttggacactccgagaagttttgcgaaaagctctttgacacaccaaaagatccacttgttcaagaatatagccttgaattgaaagcggcgccgagaagaagaaattatgctgatggttcacggtggctgaaatcgggtttggcagtcaagaatcactcaggagcaagcagttcacaaggtggtggccggagcaattaaattccaccaatcagggagaataaagggagaactatgaatcagggatgttcattaatatcccatgattttcgtgctgacattgaaaattttgttttggaaaaatccctatctttaaggaaggataattggaatgaggtggtggcgccaactgatataagtttgaattcagggttgacttttattgataataaaagaagaaggatgggcttggaaaaagaagttgggcttgctgagacacatgacaaggagttgggccgtggagtgactaatcatagtcaaggaataaaaaatatggatatttctaatccaaaagacaatgatactacaacccacaatgaagtttcaaaaaacttgctcgaggcgggtgctggtttccaggcccgccaagaattatgaatgtgttgagttggaattgccgggggcttgggaaccaacggactattcaattccttaaggaaactatttttcaaaagagacccgattttatttttttgtgtgaaactaagtgtcataaatcaaaagtggtgggcttggtccaatctttaaactttgaaggtgtctttgtggttgatgctattagggcttcgggtggcattgctcttctttggaaaaataaggatgatggtactttgttgggttactctaataatcacattgatctacaaatatccatatcctccacaactccgagttggcgactcaccgaattttatgaagaattgaatcgtaatagaataagtgattcttgggcactccttcaaagcttaaaagaccgttctcccctcccttggtgtgttataggggatatcaataatattgttcgtcaagaggacaagaggggtgagcgtccttacccccagtggctgttaacggggttccaacaaactttgttgcattgtgggttggaagatcttgagctgcaaggtcatcaattcacttgggaaaaaggtagagccacaaatgcatggattgaggtacgtcttgatatagcattagtttccatttcctggagtcaagtttttcattcggccgtgctttctaacttgggttttgctacttcggaccattctcctttgttccttgaacctgttgcggttaataattttgctcctaatcaaagatttcggtttgaaaattcttggttaaaggagcctctttgtttggaaattgttcgtgatgtttggtctcaagaacaaaatgacagcatctctaataaactcaaactttgtgccgagagactatttacttggggaaaggggttaacgggttctcttaatcagcgaatcaagcgttacaaggctgacttgaagaaactccagggcttacgggactccaattcggttcagagatatgctgaaattaaaaagaaactttatgaagcatttgatcaaagggagagttattggaaacaatgagctaaacaattttggttgagggagggtgatcaaaacaacaattattttcataaggctgctagtaatagaaagaagaataatcagctgaatcaactacgagatgttaatggaaactgggtttcatgggattctggtttgccatcagttgtagctgactacttcaatgatttattcacagcttcgggtagtgtttgtgaagaagttgtcgattgtgtgccaactgcagtgtcggatgttgtgaatatggagctttgtcaagctgtatcggaagaggaggttcgaaaagcggtattccaaatgcaccctgacaagagcccgggacctgacgggatgactcctgctttctttcaaaagtgctggccgatcgtgggagatgaagttgtggaaaatgtgcattgtttctttgaacatggaattcttgctgatcattgtggggatg

SEQ ID NO: 228093 - DNA, 2476 bp, Cannabis indica
agatcctggtaaaataaattccaacacttgattccatcataatactatttgatggaaactttttctggttccaatgaccctgcatgattgatcatttcccattagaactttacctgcacaaaatgatctataatcagaaaattattcttgacttagacacatgcgataattgcatccggggtctagaatcaactccctgttcattgaagattctgatatggagaataattctacatctattgaggagtgatcactatcctctgcgattacagtagagtccttcctgtggtgatgatgtaggttgtccttcctatctctactatgagatttattaaagtcttgctgcttcttgtacttcttacaatatctttgcaagtgtccaaaccttccacaagagtaacactttcgagtttccttctctttgaacttcaatccttattgagagtgatgttgtttactctttgaacttactttcttggttgatctcactcttgccaaatacacttcttctttctttgattccttctccaattgtaattcaaaatcctttaacttaagtgagacaacaacatcctccaatacaatcacgtctctacaatacttgataatagccttgactttttggtatgaaattgggagcggtcgccaaaaaaatgatggcttggctttcttcatctccttgtgatttatattagccaaccgtataataatctcattaatcctgtcaatattatcatctaaagaaatagaagaaatttttctaaaacagtataacctttctagcaaattaatcttgctagcaattgatggttttaagtataattcttccaacttgttccagactccttttgctatcttctatgtgatgagttttcttcaaacactttgtcaaagatacatgatgattgtgtaacccgccatctcctctatttcagctttctctctcagtttcttctgagccagtaactttcatctcaaagaactttgaagactttctggtgcactaggatccctttcaatctttctctccatagcacgaagtctcctgttccatcaaatttctccaatcctcgaatctagccattgatgacagtgattatttcttgaaaaattacaacggaaagaatactgattctgcgttcttaattaattaccaagctctcatttgtaaaataattagaactggtgtgcaaaatcaaatccactaaaacttaatcaacaaacaattaacaatgacatgattaacaaataacacacaacaatcagagataaaattgggatcaatagagtattaaacctagaaacaattaaagcagtaagataataaaatcaataccaagatatactggttatagatcaatctgatccctgactctacttcagttctaaaaaactaccaaaatcttctttattaaatgagatagaacaaggtacaatacaattgagatcgattctttgttagattctctctaagtgtttatctctcacactcttacccaataatcttcttcatctacaaaaaattcttcatacaaaatccaaacccaatctctctcttttctctatacctctctctctacctctcaatctttctctcttaagatcacctctcaaaactcatctgatcttcttccttctactgaaatgctaagtgttggtggtatttatagattcatgatatagtaactaaagttggtggctgcaagtgctttataagttgttgtgttagttatggcttaacaaacataaaaaatgtctcgtacaagtatctccacgccagcttaagttaaagtacttctggatgagatgtacgcttcctagaagatggaccaaagtgtacactgaatagacttcccaaataggacagacatagctggagtcgacaatcagggactctcttccaggagggaacaacatgccatctgaaactccttgtcagaggaagacttgctttcctgaagactcctcccgagtggacatgataggaatctgggaatacccttctaaaggacacctgtcattgcacgagacttcatttaaatggaagagttaaacttctcagaatgcccttctagaagacatctaactttctataactagaataacttttagagatctttttatttgaaggaaatggaccataaattccacctagtttgttcaaattaaaaaatattgacaatattgaaggaagaatgcagccatcatggttggtgtttccaaaaatctcagtttactaacttttgagattgatcaagtccaaccagtgcttgaatttttttactggcaagaccttagtcccaacgttagtaagattatcttctgttctgaccttctctaaattaaccaggccttctttaatgttctctctaatccggtagagtcttatgtctatatgtttgctcttttcatgataaaatagactcttgcaaaggtggattgaagactggctatctgagtacacaatcattccacc

SEQ ID NO: 228094 - DNA, 1787 bp, Cannabis indica
gaattcatattaggttgttaataaaacatacatggtagtaaatctagatcctggtaaaatatttctaacacttacaccatgtacatactcatactagtgttggtaatatcgtaatgtactcttcagacatcgtacactttaccaatgcactctgtaccgctaccatacaagtattggtagtgtatcaatcaacataagcatgcatatatatttcacatatacatacattcgtaaatatatatatatcaatgtgttctatgctattcttaccacatttccaaattcaagtgagttggtcgacctgaacggaaagtctcatgctcgatggatgtgctaatcacacaacataacttggtaaataactcgccaaagttctaaatcgggaaactcgaacctccaacttaaggttctgcattactaactgaaactacaataccctaagaaacaggaaatcaccaaaccaaggcattgaatggacatgaattgaggaaatgaattgttcggggaatctaccgaaaccggctaaccggttttataggtcatggcaaactgtttaactagtttgcaccaggtttccccaaacaattccaaacctgctcaaaatatgtccaaatcccaccaaactctctaaaacacctataatgaccttccacaatatgttccaatcaacagaatctagaaaattgcacaaaattaaaacataccattgatgacccaagtttgagttttcaagcttaaacttggtcatccacaacaacaaacctcaaatacagctgcaagaacctatttccaacttcacttaaacataaaaaccataccacacatcactcaaaccctaacagcccctaaatcatcaatttgcttattcaaccaaaaaaataaagcttcaacaaaacaagattaagagttctagggcttacctacaccaattactccttgaatttaagatgaatttctaggaaagttggatgaatttgctggttcttcttggcttggtggaggtcgagcaaagagagagtgaaagaaaaatggaaattctcttgatttttccttatttctcaaatcaattacttaattgattaaattaatcttttggctgaaaacaattaaatggcaagctgccattcacacatacagctacctaatccccccctttaaaaatgaataaaatgccaatagtaaaaatcaaaaaggaagaggacgtggacgtggtcgaggacaatgaggagaaggaaggggtggctagaataacaataatttcaacaatagagaatgaagccaaaatttacaagcatcaagagggcgcagaagaggcaactcattgtcaaggagagacaaatctcatatcaagtgccacaattgcaacaagtacaatcattctgcctctgaatgtatatcaaggagggtcaaagaaagagccaatttttccaaatacaaaggtggagaagaaggaactttgtttcttgcttgtaaagacaaagatgaaggtcaagaaaataaatggtatattgacatcgatgctagcaatcatatgtgcaaaggaagaagaatatttgtggagctcaatcaaatggtaaaagggaacgtctcttctagagatgaatcaaaaatactcgtagaaggcaaaagtaatattcaacacaatattctgaagtgtttaaaggtctgctacaatgagttatcatggatttggcatctaagctttggacatctcaattttggtgggcttaaacacttagagaagaaggagatggtgagaggccttccatatgcatcaaccaaccaga

SEQ ID NO: 228095 - DNA, 1746 bp, Cannabis indica
attttttaatattacccgttcataggttatacccattaaaagcgcacccatatatataaaaacttttgtttagcatgcacgtgatattttatttttattttttcatgcataattaatcatataaacttttgatatctctcctcctccgtttttctcttacaattaaattctccttcgtttttttacaattaatatgatttgaaaaggtaatgttctcaccttctcattatgcataaattttattatgtataattaaatattatatataattcatgcaattagttatagttgcaggtatatatgtttttataaatggaggatataaaatacttatttagtaccttgtgttttatcaaaatacgtactcgataccctttgttttagagaatgatgaattggtacctcatatttgcaaaaattacatatttggtaccctggttgtgtttaaattttgaaaaattccaaattaccccttattttattattttatgtgcttattaactccaagacctacttcccctgctccttccaaacgtaaattagatcttcattctccttctaagaggatttctaaatgtcatcgatctatggaggaagagtctaattcggattttgaacttgaagatgagttcattaaattagcaaaagttgccaaggtcagtcgtttatttttgtgttgatttagggtttttgtgttatatttttaaaatttatgttattgtgttttgatttttacgattataatttaataatgttttatttaaatttgtatttgtatgtgtttgttgttttcaattgttttataccttctataacacttgaattttcgttttttttttatttatttttctgtaggggaagggtaaatcccctattctgaatattcctcccgaagttgtgttggaagagatttctggtgatcttattttgaggtttgtggacttttttttatttctttttattgttttttggttttggtgttatttttgagttatttttaattgtatttgcatgtttattattcattcattaacgatattaagtctattcttattccaacccagtcaaaaatgttttcccaaattgtttttggtcatttcctccgaagtttagagtatattattcattgccaagtcttgcacggcctgttgttgagggaagttcaacagcctaatgagatgaattttgagtatctgtttgtggaaagtttcttagatttagtatagaggaatttgcctttgtcataggtctagattgccacaatataaagtctaatatttttcagttcaaacagtgcaagaatatgctagtagaacgttgtttaaagggtaataaaaagattaccaagaatgtgatttaagttgcttttactgctaacgaccttagggatgatgatgatcttgcagtcaagttggctgttttgtattttgttcagtgttacttgcttggaggtcctcctagaaaggttgtttctattgaggaacttgatattatggatagtggtcgttataatatgggtgggggaaggagtattttgagatgactattgaatctcttaagggtaagattgatgctggtattaggactgttaggaagaaggaaaaggatagcgggttttataggttgttaggttttccgtatgcattgcaagtttggttttttgggtgttgttcatacgtcattgggaaactttctttgtattcaaacataggcattcctaggattcttaactggcctaaaatgcca

SEQ ID NO: 228096 - DNA, 2626 bp, Cannabis indica
ttctttatcaactttggaagattaatgtcaaggttttagatattctaggagtgggaatgagatgttcttgaagcatatcttagagatcgatgcaactgaaaaaccttccaaaaatcaagcaaagggaactgatcctaaagccatccttctgaaagatacttgtctttcaactcccatggtggatccagcttctgaggcttcaaggcatgtttagcaaagttcaagtactcaaatatatgaccttaccaagtcttgaacttaatatatgtttttattttgaacttgttttattggggacaagggtccctctttttacctttgcagagacaatttattatgcccttgtcgcggggcctttagtatgtaaatatttgaccttttgatggtactaaactgctttttatttatcatactattgtttggattcatttactatttgttatacttgaacaaatttgtatgtgccaagttagtttacttccaggttccttgaggtttcggttccaatggcttgaaccttaggatctcaacctatatgcttagacttttatctttctgggacaaattatttactttttttggattcttgaagattctagttccaatggcctagacctttagaatttcaataatttattccttgaaaaaattaataaatgctacttacttctggatccctatggttctggctccaaagtcttggacctttggattttagttttcttaaagcctgaccttctgtgttttgaagcctaaacttttgtaattttaagcctgaactttcatattgaaccctgaccttctttataatttagccaacctaaattgacttagcaatttattaactttaaaatatggtaagaatgttgcttactttcggtatcctgaagctccaacttcaggcaatactttctgctcccatacttaatgttaacttgcttttgtaattttttgaagagatacttaatacatattacccccaagtgatttaagagtttggactcttggtcacttattacagtacaactgaaaaattataagactaaaaacttaattgaaattttttatgtttttatttaatttaattcctgtcctgaggtgtacatgaaaatgagatgaaaaataaaatgcagaaagattaaggacgtggacaccctcagtttactgatagtatcagcataggtggtctgcattccatgctcgtacaatttctaatacgtccagtcttttaagatggtacgctttgtcatgaaccttatgttgtatctcgtatggcccttcccaagtacgtccaaggactcccagtcctggctcttgagaggcgggaaacactcttctcaagacaaggtcaccaacttcaatttttttgctctttactttagagttgaagtgtatggaaatctttctttggtatatttaaggttggttttgtgatttctcccaaagttcttcaaataaatcttgagattcttaaagtagcacatggttccaaaaaggatcataagtttccattatgtgagaaggtacaatcttctctactaggatcattgtttcacacctgtaggccattgaatatgaagtgtgtcctgttgaagttctttttattgtttggtatgcccaaagaactcttggaactttttctggccagtgagctttatatgcttgaagctttttcttcaacattgttttatagattttgtttacaacttccacttgtccatttgcttgtggtctggccacaactcaaaattttttaataattttgtgcttgacacaaaaactattgaactggtcattgtcaaattatttttcattatcaaacacgatcttgtggaagaccatgatgagatactattttctttataatgaagtccaaggccttcttggatgttactgtgttcatagcttcaacttcaactcacttaaagaagtaatcaatagtaacaatggaaaattggactcctccctttctggttagcagcgatcctactaaatatattcccaaatagcaaaaggctatggactattcatcagggttatcactgttggtggagctttaggaactttggaatagtgttggcactattcttattttcggacataatcaatgcaatatctcttcatagttggcaaaagtatccgtagtgaatgatcttctaggagagacttggtctggatgtatgatctacacagaatctgtcatgcatttcatggatgataacatttatctcaattataggtatgcacttcaggtgtggcattgacaaccctcttctacataattttccatctaacaacatgtatcttggagcttgatactgaatcctccgggcagctgctctgtcattcgaaaggtctccagcttctaggaacttatgtattggagccatccagaaagttgaatgattaattatagttacccccaatggttttgtgcttagaaggaatagatgggtgatggggactagtctgtatttttcaatttccggatccgttgctaactttgctaacatatccacaaaaggaattttgatccttggggattttcttgacaaaatatcttttgaagttttgtagcaactctcaagattttgtcacataagtagccatctttcaagcttcacgt

SEQ ID NO: 228097 - DNA, 1460 bp, Cannabis indica
ctttttgctaaaccatccgcaaaagataaagaactacgattaacatagaaaaagctacagctactagaactttcaattaaatctaacactacaagagaaacatttaaaaaattccaattaagagtacgcctacgattttccaaagcttgaatcaccactgtaaaatcaaagagaacatggacctcattccatttgttctgaatttcccaatacaaagccagcaacacagccttagatttcgcttccaaaattgaggttgttgaagtctactgcaatttatacatccacgagccatcaaaaagattaattgtgaccacaaccacccccgcaacccatttagaccaggatgcatcagtcatcaacatcactttagcttcctcccttctaggatcacacacagtgttccgattccacagacaaaccaaaaccagcatctaccaaaccagataatgcatgaaaagaaacatggaccttttgcgacaacttaaccaaatcagcaactccccctctaaacaccaaactgttgcgaatgttccaaattttagaatacaagcaacccatgaagttaactagctagacaagctcacctagtggaaaggagagacaaggttttttgcaaactcttaacattgaagtcccaggaattctttcattaaagataagaaactcctcgagcaaccacaaagccttagccatactacaatctctgaacacatgtaaacaagtctcaacatctacaccacacaaaagacattcattgtccaaactgaaaggcaacttgcttctgatgggaatagcttcgttgaagatcctccacaatagaaccgccaatctagggtaaacttttccattccagagccactttcaaatatttcttgtgtggccaaatctcaaattttgatcaacacaatacgcgctccttatgaaaaattctccattcaaattatccttccaaataggagggcaaacttgttatcacatttaagactctcaaatgagccataagattcgaactgactcacaatattactttgaagtaagtattttgtcactaaacgctcactcaatgataaattattttaaatatttaattgttaagaaatggtaagataatagtaatgtctctaaaatatttttttttatatacttaaataataaacttaacatgatttctcctttgtatttcagtatcaacaattaagtttgacttttgacatattaataaaggtgttaccatattgttgcttcaatatcataacacactatcatcaattacttttaatgtacattattatcaattattttaatataaatgtgatatgataatgtgttctatgaaatataaaaggtataaactttcaaaatgtctgtatccattgtctttgatgggttggtagtttcgtttactttcaaaataaatcttgtcattttatatttcgtaaaaaaaaaaaaacgttaaa

SEQ ID NO: 228098 - DNA, 4954 bp, Cannabis indica
tgtaaaaccgggcagcagccagggaagatagctttttagcttggattttagtttttcatttgaatatgagctagacttttgaggcttgaatgactatgaacttttatgttgggtatgattaatttttaagcttactttagcatttttgcctttgttcattcaagtgagttttcattttatttgattgttgcttcttggccataaatcacaattttctaagctagatcttgttccgaaagggctaaatctagtagttcaacttgaatggagcaagtgaaaacctagatttaagtttttctttgtaagtataataggaatattttatttaccttgcataacttaaggattgatgtttgaatagtgttctgcttgctggtttgaatagtggtagactttaatttgtgagttttggaaaactatcacaagcctagaggaatttatgttatctctgtaaaaaatgctgaagtaatgctgaaccgctgctgtaacacctgggaaaaaacctaactagaagaaattagctattcaagccttttaccatattacatttttttcttgcaagaaaattttctagcaacagtagtattaattttagcaagcttaattactgtcattttaattttgaatcattgctcaaccattttcatattttttccctctactttaagttgtaattagttagttttccgacatatttttatttgcaatccttgtggtgaagatcttacttatcatcttattacttgtttgactgcgtatacttgcatacataattctcacaacaaaataacacatctatagaaaaaaaatcctattaaaatccaagtccaatagtttgtaggctttcatgccagttaggtacccaagaaatatgcatggggctgcccttggagaaaatttagatttgttaaaagataaattggaggcataggccaagcaaccaaaaattcttagatgattatagtttggtggcttggatttgagaacctaaaatggagggatattcttgagattaggtgtaggagtcctatttataagataggcatcagttgagacacattcattccaatctactaaaggtatacaagattggaataagagtgcacgagcaacatttaacaaatgttgaggctttctctcaaacaaaaaattttgttagggcctatgtatgcaagaatggtggtgaatgatgccaagactattaaacaattcaacaaactgcaattccttagcattatcagacctcacagctttaatagtattttgatattgagttttaatgagttgaataaaagtagggatagcagtttgtgcctcatccttatttttaatgaaatgaacccaagtatacctagaatggtcatcaacaatagtgatgaagtatttatgccccccaatagtcaaagtattaaaaggtccccaaatatctatgtgtataagatcaaaacactctttagcaatgttgtgattagaaacaaaacgaagctttctttgtttagcataatgacaattggaacaagattgaccttgaaaatacaaatctttatttaaagaatgagtttttatacaagagggatgccccaatctaaaatgccaaacagtatcattatttatgttggaatcagaaatcaaggaaaaaacatgggggtgattttcacagcagactcctcaaggtaaaacaactttccaagtctcctagccatcccaatctattgtgtaaaaagtgaagccataggttttggtttcaagcatggaagagacagataacaaattaaggtggaaatcagggacatacaagacatctttaagaacaagattagctgagataaaaatagttcctaagcaaaagaccttgacagtattaccattaggcaaattgacacaagaaaactttgaattagcataagtattttgaaaaagagatagattatgacacacatggtgagtagcacaagtgtcgagaatccagcaagactttttaggaaggattttacaagagaattgagatattggaggctgatttgtctgctcactgttttttgttctccacttttctgagacaacatactcatcagtctttgacattgagcaaaggtggccatgaaatcttgctcaacgttcttgccatttccattagcctcaccattcttttgagctttagtcaaatttgcagcaggggtgtttttcagggccttgagcattcctgtttgggaatttcccatgcagtttgtgccctgggggatatccatacaaacaatagcacttggtcataatatgttcttagacacaacagtgatgtccttgaccattgttggatgatgtgggaggagcattatcactttcattgacagtaattcctctctgcctttcttcttgaacaatagaagcaaaaaccttgttgatattagagaaaggatcttgcatcacgatctgggatcgagctccactataggactcatttagaccgattaacaactcaagaacacgatcctcatcttggtattcttgaatagtcttcatagcaccaaaagtgcagacgggttgtggcctatattcttgtatcaaatcctaaaaagacttcagacgagtgaagaaagtggtaacagaattcgaaccttgaatcaatgcatacatagattgtttggcttcgaaaactcttggcgcattttttctggtggtttctctcctgagttctgtccaaatctttgcagcattatcaaggtacatcacactattagcaatctcactcgaaatggcatgtaaaatccaagaaatcacgaggctgtggcatcgaaaccacacatcataaatgtcgtcatcaacctctagttcaggtaatcgcccatcgacaaacttgattttgtttcttgctgcaagagctacaatcatggatcgcctccatgaactgtaattttcacagccagtcaaaatctttggaacaagattcacagctaattgatcttcacttgaaatgaagtagggacttctaagatcttctctaggtggtcgatcattggtttccagggcatagaatctgttagcagtccgagattcatctccctgattcgctgtgcatcgagtattggctccttcacgagccatgagccacaaccacaattaacaaagaaaccagaaaagaagctcacaaaagtcgtggctctgataccatattacaaacaagaaaatataaaacgagagaagaaagagaaaaggaacaacagagtatatttctcattaataaattaaagaagggagtgagccttacatagctcaagctcaagaggagtatagtacatagttagttacaaagaacaactaacataacagaatacaacagaacataaccactaaaccaatggcactaaaagaaaaataacaagcctattttaataaatatacaataatattttgagacataaaatattgaaataattattaatcaaataaatatttaaaagatatttacactacttataatattgtaattaaaaaatgtgtattgaattctataattaatacttaatgacaagaatgtaattaaaaaaattgcatcagaatgtgtcaaattatgcacaagatatggcacacccatgaataactatttttttttaaaaacaatgtaaaaatacaacactatactaatattttagcattttattaaacatgccctaatatatataagaatgctatcactataagaaatgcctcttttactgatgttatcgcccttctcaatggtcaccctagttctaagctttttgtgctaatatttgcccgcagttttcgtgagatttgccgcaaaaaaatggcttatgatactattcaaatcgataaaagtctatatctttacggacgagttttgccaccggtaaagaacattgcttccgacacaatacaaaagcagcaaaaaaagtgtgcctgtcaacattttggttttttttttagtattttgtcgaggcatgaattaattgctagaaaattgtagaagctcaacaaaaagttgattgttttgaaaataagaaatgctaaaacaattaaatatcagaactttaaggtaataaatttaagagaatatcgctaacaaatcgtaaagcgctacctctaggtggtactaggcactactagtgctgtaaatacgggccagaccttttgacaaggcacgaaactaacacgagcacggtacgaaaatatataggattggacacgatacgacacgacacaatgctacaaattggcacgacacgatacaaagaaatatgtccttaagcacgatacggcacgagaaacacaaaaggtatgacacgtaagcacaaataaactagctttaaataagacacgacacgcgacaagtccgaaaagcacgacacaatatatcaaaaaaactttataatttattattaataataataagatatgaatttattaattataaataagttaaaataataataaaacttaaatataaactgaatattataattatataattaaaactataaaaacataaaaaataaaggttatattttaatttatttatagtgtgatataataaattgagtatttataagtaaatattcaacttctaattatactaaatataattaaagttataaaatatacatctactttagtaattgtaaaagaaatatatgaaaaagtaaaacacgaatttaagctcgaatataaaaataggctaacctatttaaaaaaatataggctgacataaacaaagcacagcacaaatccatgtacgacacaaaaatatcgaacctaccctttagaaatattgatactgttgggaatattttaccaggatttagatttattaacaagtatgttgaattaacatcctaaatatgaattctctaaaacaatgagataaacacataaaggtttaagaaaaccttacattgggtacagcggaatataatgactccttccgttcaagatctct

SEQ ID NO: 228099 - DNA, 1326 bp, Cannabis indica
gcccaaacaagttgtctcattctgttccatcaaaacattatagttaacataaaaagttaaaaaggagaaaatatcaaattatgctatacaaaatctatgacacaacagaaaaatgggaactttgaacagaaaagcagctcaattacatcagtccggctaatcaactatcggaactcgaaggcaaactccaagttaacgataatttaatcagattaataaataataattctatcaaataatagatttccttgaatcccaaataaggtgattccgaagcaagccaaagttaatacaataataatagatgttacaataactttacaatacaaacatgtgtatatatagctgcgaacatatacaaatatatgtatttatatatatatatatatatgtgtgggtgtattcattgtagagttatctagtgaaaatcatagttaattgaagaaaatgccgcgaacaaaactaagaaagaaaagttaaacttacataatctgaagatccaaggagtttccaagataacccatctgagttaaaggtgagactgacttccccaacatgatccaacaagacggtcgagctcagagacgacgtttcaccaacaaacgcatcatgttcatgtggctgctgggatatgttaattggtctactactactactaccgccatctccgtcaccgtcatgttccatctctcaattcaaacccaaatttcttatttagcatcactctctgaaaagtgaaatctgaattaaagaattctgtaaaaggggtttcgtcgggtcaaaatctgattttgaataatctcatgacccattcaataaataaataaataggacatttgggtgtaacaagacaattgtgtcagttaaataacgacaatgacatcaaatctaaatcagaatctctctactgtaatactgaacaaaattcacgtatgaaccaattaaaagaaagatggaatgtggaatgagctgaaaatggtgactttttacccaagaaatgaaagagatttcttctggaacagaatagtaaaacatttgaaggaatgaaatttaagatgtatacgaaaaaaaaaagggtgtctagactattgatacctaatcaaagttaggtatttttttggttttttttttctttttttagaaaaaacttgttattattaaaattaacagtcattaataacaacagagtggattggagtgggaatttccccaaccaagaaatatcttcatccaataaaagagcaaactaaagcatgagctgctttattggcatctcgtttaacatgagatatctttacggtaggaaaagaggacaaaagataacaa

SEQ ID NO: 228100 - DNA, 3568 bp, Cannabis indica
gttacgtacgtgaaaatactattttagtttttaatatttaatagcagttgcataaacattttgctaactctttgaaacttgacatatcaattatataaattgatgagaatacaatgaattttattatatttgcaagtgtttcatattgtcaatataatacaaagctctttaaagaaacttttataacatatttagttttattaatatactaaattagttgatgtaaagctagtttacagaggtccaacaattgtttcttcacatattaatattaaggtataagtaattatcgatcagtgacaaaaaaaatattggcaaatagttgcttatagatactcattcacatttaatatttctagttgcaattaagttacacgttagttaaataatagttttgttattataatatcatagtattataaaaatagagctcgaaattgtcaaaaaacgcgacctgaacaaataaaacagggctcgtattcttagcgctttcttcatattttatctccttaggaactagcctattccaaatcctcatgaaataaacttcaattgcgacttcaaaaggagtccaactcgcaaagaagaaggcttttaccacttccatctattcagcccatatatctaaaatgttaccaaaagcaactatggcctttatcatcaagaatacttctatactcctattctttcgtcgagacacctaactttccaaaaagtcgaccctttcgaaagacatactcctctaattgacatgaagaggcgagttgattccatgttgtttgagattggtgcatgggagagaaatgggtgatctctttttagtactgaaaatcttcaaaacgttggttaatcatgtcatgccagcgtgtgtatgctgacactggcttcgctaatgaatcctgaacagtgccactcgagcaagatgataaggatgctcgaagttcaactgtcatcttgtttcagatagtatcagaagaagtgacctcagtttaaaatgacaaagaatattcaagaagaatatcggtgttcttagactaggatgacagagaacttacctccactcaaactgttttggagaaggatggagaatcaataggtggttgatgctccatggaatgcagttgactttgttatttcattcctcttttattgtactaacctctggtcttttttctttgcagacaatatgagattcatggctgctatggcatcttgtttgaacttgaagagaaagattctggtgtcaaaggaaattgagcctcaagtaagggaagtggttcaaggcgtccctgctgctctactacttcaaagagggaggtcaagaagaggggtagatttgttgatgccactcttcctgcttaagactctggtagggagaggtctaacactgctggtgttgatgagagatctccaattgacctctctccgaatgaaactgagcatggtgttttgaactcaagttcggactcggtggagcagctgcatgagaaaggctcctagcttcttgtacacagtgatgccttgattaattccaaggctgagaacatttcgttgcagaagttagttggcaccaaacctccgcatatcatcgctcaaagatgtttcacctatatctttgaggtaattgttttatcttgtctccttttggcttaactttcttttatttaacatcacatgacattgtcctcttatcttcaggcttttgttggttatgcctacagcatagataacaaacacaagaagatggttgagcttgctaagatgctcaaggttgcagaagatcgtgttattattgcggaagaccaggtgacttctttgaaggagaaaattgattctcttgagagtgaattatctagtctttgagaggtggctagtaatgccaacgatcgagagagtagtctaaagaagaacttaccgggttcttggaagaagacctctgatcttgaaaaatcttctcagcatgcactgaatgaacaaactgctatgggtgctgatctgagagaccaagtcaaggtcttgaagaagagagtgactaccatcaaggatcaggctcttcttgacgttacattctacgatggcttattctttgatgtcatttatacagcttgggtcgtcaatgggggagataagtctttcaagtggaagggcttccctaatacaaaggtgactgacttcatcaagcggtgtgagcagtgtttggtggagaaacccttaacaaaattgacttcactataaatggtggtaaactaatggtcgaagaaacttcagttgttgaaggctacaaccttaagcatcccgacttccatccttatgctggtgatgcgcctcttacagagagtgagaacaaggaggaagctactgttgatataacaggcttttaagaccttctctgagttcgttctccttttctatatatttttagcatttagttttagtgtgttagttggttgttcccgggtgacctttttatgtggacaaaccttagtaaaatgttcttagaatttctttttagttaaattataaattatttccaatttaataaaacttttattctaatgattattttttttattttactttattcgttaccgcttgaccgtttaacacttacaaagtacaccatgtcttaagaaactcgattacttaaaataatctcgctgcttcttaaagttatctttaccatgagagtacttacatagatgtgcaaaaaaaaattgaatgcttgtgtaacatatggctctcgtataccataacataacatatgtgtctcccaagtgatcaaagaagtgccttcattggtcacttaccataccaaatccccctaggccttcttgatcatgaatcttgagtggtgttacatgtgtgagaactctccacttatctgagaattcgtgggtggcagtgttgaacacaccaaagaaataattgaacttatctcaagactaagtcacaagctttactcaacactttaagagtattgtcaggtctgtgagctgtaattgattaatttaaatgaagtaccaaaaaaaattcaatactttttctcatccaattaaatacaattacattactgtgagctatgttgaaagaaaaaagtgtactttaagatagtatttgtagatttccttcttcatccaagcttagctgaagtgatccgcactatactaatgccctgtttaactttttagtataggagctatactttagcgatggacctcttaacttagagaaaactttgtcacactccgttagtttaagaggcgatcgattcacttgcactaagtaaagttaatctcactgtgaagcgagttgttttgaagacagctgcctttattggaagtaccatcgtagatgcaccatgttccaatacattggtatggattcaagctatagtcatagcgtgccaacttgtaagttttgagtttaagagcttcaatgacgacatctgatccttcctaattaggcccaagtactcctacatctttcatgttcaggaatactcattgtaacaccatatcttcaagcttaaatttcttatctttaatcttggagttgtagagttttgcaa

SEQ ID NO: 228101 - DNA, 2106 bp, Cannabis indica
gggttgttattctgcttttgaatttcgataatggactgtttattttatgccatatattgtctgtgtgtatgcttattttttcttcttcttaaatgcatacacaatgtgtgtgagaaaatgccacaaagtgttaaaataaagagaaagtaagaatgacgtttatgttgtgctcaaaactgcaatttggtccacaaatttgagctgtattggctcgtgtcttgtacaagtagtggttggggatactgaaaatatattgcttaatgatattggttcgaaatccagctgcaataaaactgaaatatcctttgctttttgtgattttttgagaggatttaaagcaatgtttgatagtgattggatttgtaggagtattttggtgagtgtactagtggaacaaaacttgaatgggtgtactagctagtattttatattttctttgaaaaaataactcaagtgttcaaacttatgtgagatatgctactcttttcactgtgtacttttggtgtaagagtgttaatcgtatctcattgttctcagttctcagggtctcatacaatggtttgacaactcataatacaatttattttttattaaaaaagaaaatgagtttattgtcttttccttacctggttaccttctcaagatattgttttttttaaaattcaaatttaataaattaaataattatgctgctctttctcctctggagcttttactctgctcacttgttttctaattgaatcttcttgctatatataatgtatgctataattaaaaatagtgttggtcctaagatccttcatatcacttagtgaacgacttgattgagtttatctgtgtgtagttttctgctctgtttaattttcttaattgaataccttctggatgaatgattgtgtagagcttagtattacttgcaaatgactgtaatttgctagatctatttagctaatatacaatgtcggaattgattatatatactatgttttaatacgtgattattaacaggacaagcaaagcaaatgaataataatatttgaaaatgggagagagatttacaaatgttattatcacaaactcttttggtgacagaaaaagaggacaaggccatcttcatcattgtatcagaaacttgtattttgtgagtgctttaatgattatatcagaaacatgaatttttttggggcatattgtatttctcttcaatttttttttaggcatattaattataatatatcatagaatgtttgattttcttagcaccaagtgagaggtactttgtcgacatttaactgacagatatatatcttttcttgaacttcagcaattgactttgacaatagagatataataagggtgttgtgcttagagatcatctttcaatctggcttccaaaggacagttcaagctctactagcatcacacagctgagatcatgccttttagctagataatcttcgaagagtttgaggggcgtgtgcttccaactttcgagttagagtcagattaggggcttctcattttttttttttagttgctagttttctttgttctttatttttggtgtagtttggtttacaactttgattcatggagtttgcttttgtagtttgtttagattttgtatatttcaagataggcaagaattacattgtaattgtaattttatgattgacataaaatttttatgtaatgaataaatgcctttaatcctacatatattaaaagaaccaataaatttactattcactcaaacgtcaacctaaacggtgcgttttcctacatatattaaaagaaccaataaaaatcataaatataaaaatcctacatatttataataactttttccttttttattcatttcctacatataaaaatattattattatcatcattattaataatatcttttgtttttgtttttgtttttgttgctgtgcgtgtgtgtgggtgggaaaaagaaaaaaaatgatatatatattaaatagtaagataaataaatagtgaagcattatattagttagtttaaaatttaaaatttaaatttaaatcagcataattttatctgattagttagattttatttttaaatttaaacctattata

SEQ ID NO: 228102 - DNA, 1082 bp, Cannabis indica
agatcctggtaaaataaattccaacaggaagttactggtgaatataagtggaaggagtgtgtaggtggataggtagcaaagacattggcggtagaatgatttggaaaggaattgtaatctatatatcaggtatatatatattggaaagatcagcagtagaaagggaggggtttgtttgttgttttagtgtagagaaaggaattgattagttgattgatggagtagtttgggtggaaatcatagtgggagtagagagaatgggtgaggggattgaaacaggagtgggagggaaggatggggatggcttatgtgaagaaggagatgtatttgcaccagaaacatggagtcccaaaccagatgtgcgtagtaatgtgttagttgctgtcgacacaggttggtgatgatgagaagtggggggtttgaacgtgagtttaaggccaaaggtgaggatgaagactccccaggaagtagaagtcttggctgaggctggccacgagtttgagttgttggtatggaaggtgaaatggagtttctagccaaccgagtgagaagaggccaagcattggctttggaaaagtctgtacgatatctgtcataaccatttgttggtagctttgaacctttcatccatggcccgtactgaaagtcatcatcattaccgctatccattcgctccatgaacgccacacatcgttcaaaaggatggccaaggcagccacattcaaaacaaaattcaggcaaacgctcatatcgaaagtctacccaaaattcatctttaattttcagaagtttgatcatttggcctgtcataagtggtttagtgactagaagtttgactcggatccgcagaaaaggaccccatccctcatttgtagaatcatcatgaactttcaaaaattccccaatgatattccctagtgcttcagcaaggaaccgtgacttactaaggaatggcaggcaatatatttgcacccaaaaaggagtatgaaccatattctcctttgtgacattttttagaacatctggcgccaaaaggattatcaaatggttttgaaagtgccatggttctttgttaagaaccc

SEQ ID NO: 228103 - DNA, 3143 bp, Cannabis indica
agcctttagcaacgatcacatctaaaaaagtattggacttttgcagtgaagaacataatatgtcggttcggactcccacacaagatcgtttcaaatgatgttaaataacttgacaaccagatgtttacaaacttctgtgtgactcatggaatcataaaaagtttctccgtagtggcacaccctcaatcaaattgtcaggtcgaggcagtcaacaagacacttaaagaaaccatgaaaaaattacttgaagaggctaaaaggaactggcccaaggaactaccaaaagtattgtggtcataccgaacaacagagaaaacaacaaccaggcaaacaccaattgctatggcctatggtaatgaagctatgcttcccgtggaattagaaccttcatcccacaaaagattgacctacgataaagaagataatcatgctctcctagcagaatcacttgacgagattgaagaaaaacgagcctcagcaaacttaaagctagtagctcatcagcaaaaggtagctcggtacttcaaaaagcaagtgagggcaagaaaattttttgtgggagatatggtcctcaaaggagtattcttgaacacaaaagacagagcggctggcatgctcaaacctaattgggaaggtccatatcaggtggtcgaagtcacagactctagagcatataagctggggcggcatgacaaaatatggagctcgttctagtaccaaggtattggtatggggaatatttgagaaaatactaccattaagtgtacaaggtcggatgaccattttaagtacacattgctagaacatttactcttaattagtggccatctgagtggatcctgctcaaaggtttagataaaatgactactactcaggtcagatgaccatctttaaagaacagttctaaaagtgaaattgtttatgtttaaattagctaaagatcagttagatcatgtaatagctttcataaatgtaagttactacggtaacaaaattattctaacctaccaataaatgaataaagatattaattatcattctaattgtgtcaattacatttatatcaagttatgaatttacaatcataatgcgtacaaagggtctgttcgaacccaaaagccaaacaaacaaaatttgaacttgtgaaatgcaagtgaccaagagtcataagtctgctcggtcacttggggggaaatataccaatacaaagcattgataaataacaggctaaaaaacatagcagtacgtacaattactaaaacaagggaaaatatttaagaaaagatgacaaaagaacgatataaactcaagatattggttagctagtcgtgtcaaaataaaatgatgtattacaaagtttaaagaccgcttggtcagtcatattgtatttaacaaaggcccatgggccgaacaaataaaaaagaaaaagaaaaaagagattcacatcgcaggagttctaagttctttatacggaatgatttggtaattagaggtcggggtctctatgttctaattggttggggctttggaattggctactttagggttttctttggctgcctagcccgcatactaactaagatatgcctctttcgtataaccgaggtaatcaaagtttccttttaagttgggcttccagaattcatagaaaacttctagggcgtcagactccaaattctcgacctccatcagaagctcttcctccctcgtctgcctagatttgatgtcttcttacaagttcgtcttatctgtgtgttgacctcgcttttagccaacgacagtgagtcttatttagtaagcaacaagtagtttataaagattgatatatagtaaagcaatgtaaagacacaggaattttatagaggtttagccccgagcagttcggtaatagcctaatcctcgttatttgtattaactcaagaacaaggagaaaggttccttttcttatagctcttacaacaatatctttgaataagaattctcagataatatcttgtcggtaaaatctctcgacccttttcccagtgaacatgcatcactatttatagggctatgaggttgaagaggaagtatttcccttctcgttacaatggatataagcagaaagattgcataatatatacagaatacactgatcgtgggatttggatagctttccatatctctgcaatctgatccccaagttatagggatttctttgatgactcacgatgcgaaagctgaattcgctaagtgttggtcgctctgcacgaattgctgattgctttgcttcaggcatgcatacgaggcatcctgttcgaactatattctcctagcagatacttgaagtcatttccacgtgtgaccatcatgtgatgccacattagagtgcaaaaattgggataacatttgccccccaagtctgtacgggactgccgaagttgcgtgtagacttcatctgagctgcttctacatttggatgggtgacacgtgtaaagcgcgtctgttcgcgactcgatgtgaggctgactgggcgtcccttcagctttcggctaataaatgctctgacaaataatatttcaaaatcgcattttctctcaccacggctgacggctgcacttgattatttttgatttcccatattcacttttaagggagaactgaggggtttgaggttcttttgaaatgattaccccttttcgttatttgcctataaatacagtgagcatttgtacacaaactcatttttaccatccttcttcgctaagtaagttcagagcgaaaagagaggtttttggctttaagtttgctgaagtgccttcatcgaaactgctcgtttggcttggcgttacctgaatccaagcatctgattcttgagtaagttctcgatttcctttatgtttactttgcatgtttactttttgaatgcatcttcgactttgctgtagaaaatatgtaggaaaccctaggtttagaaactctgcgattctccttcgtcatgggttcatgcgatatcacagtccataatgtttgctttctgaactgcataatgcctgtctttcatcttgcttattctaagcttcatgaaattttttgccctaactcgagaaaatttcaaacttcctgagttttgacttttttttggatattcttattctttaatc

SEQ ID NO: 228104 - DNA, 2135 bp, Cannabis indica
aggatgttgtttggagtttccattgaacttgcttttcttcccattgccatatctattgtcattgtttgacctctttcctttttgattcaaactgctaggatgctatgaattctgggcggatgtagcggctatagtggtgtgttactgatttttcttctgtcccattgtatccacatgttgtactgcctcttcgagcttaatgaatccatcagcttggtctagaaattctgccatcgaccccacagttaatctcttaatatccttccatagttctcccagaggctcaatgccctaagtattacaaccaatcttccttcctcaattatcccttaaacttttgttgctttagtcaggaacctgctaatgtagacccttagaggttctcctagcatttgtttcacttctactaagtcttctaggtgtgagggtagctgatgagaggaggaaaatcgtccatggaatttagatgagatgaaaaggaaatccatgaattaaactttcctagaggtaatttgaaataccattgttgggcggcctctactagtgtggttagaaaaattctggaccatacattgcctcttaccccttgcagatccatttgcatctcaaagtatttcaagtgagataaaggatcttcttttcccatgtacattttccatactgacattttgaactttggggataggtcaagatcattggttttaggtgagaagggtgatcctcttgcctggtcgagttcgagatctgtgagttctgggccggtcaggccttgtatgaggttcttaagttgatctatttatgcttgcacaagtggatgaacttggccaggttgttgaccaacttgtgtcacattaagatctctttgaactggatcttgagcatagttattttactggataactagtggattgttttgcctgtccaatccatttttatgattcagatcgtttttgtggtcatgcacggtacctaaccgttcaaacactgacgtatcaagagttctttagtctaaccagccgggttgagaggttggcctaatacctctgtttgagtagagctgtttaattgagtacctcctcgcaggggcagtctagcaaggtcttgccgtctactgtttggcccatagtttggtcttgtggtcttggattggatgattgactgttataagtttgtgtggtatggcaagctacatacttttctgtcatgctttaggggatgctagaatcagtcactaattgctgaccagtaacttggtaggcccttctaatcagcatggtggcctgcctggaacggttgtcaatggctgcctactgagccctcatgacttccatctcctggtccctccattctataaattgatgtctttcctcatcaaaggcaaggttgatagttgtttggagatcctcctcatcatggtacatcatgttgatatggccttgcataagtccaagcgtaactcgcaagttttgaagtttagtatcatctctaactggcctttgagtgttattggtggacaggatctcggtgtcaggagtagtttggtcggccgctgtactggtattcccaatttcttgtccacttggtgtgaacccagccagaggggaagtcactccatgccccaccatcgatggttgtgtattaacttatctgggatttatcgctggtggatctcttgtgttcctaggagtctgtacacttggatctctctctctccctctctctctcgaattccttggagaaccagcatcaaaaattggtgtttcttcagcttgtttttgtggatattagttggttcttggtgaatccattgatggtaacccatctagcaccttttcccttagttttcttaagtgctaagttaaggtttttgcttgattttgtgaattagggtattctgaggttaaattaaggtgatttatgttggtttgagctagttttaaggctgtttgtgttggttgagcaaggtttgagtttatgaactcaagctttgctctctaatggtaatttatgattttggatatgttgaggtgttttattgcttggtttatcttctttatggtctaaatagcaggtttggaagtttgtatgaagtttggggtcaaattgagtggattgggaagtttttggtgtttctt

SEQ ID NO: 228105 - DNA, 1926 bp, Cannabis indica
ttttacagttggagtagattctaaaacaacacatagatcattcaccacagatgagaattttcacaagcattaacacttcagagagacattaaatgaacaaatggtgaaattaaaaacagagcaagagggctaaccttctctagattaagttatattctctctcagagattctggatcaggtctaggtccacgatcctaaatttttcatagaatgatcaactatcctacactgtaaaacttatggataacactcgggtaattgagataatagatccttacagttctagaggttgcactacaaggatgatctcttcccagtgatttgtctgaagaaatttctgaaccaagacagggagagcccacagatgaattgtttgatagtgacatccatgagttagttaacaacatagcagccacaataaaaaaggatagaaatccactgaccattgtggcagcattgcttgagagttatagtagatggttttttttgcattgacagagacaagggtcgtctactgctcttgtcagtacctacaagacaaattaccaacttagcatctggatagagttataaaacaaattgaacacccccacttcatacctttaacgatgttcttccccaacttttgcatagaattggtattcgttttagggtgttcaacctataaacaaaatgtaaacaagtcacacaaacaataaaccttcatgagtactttcttgcaagaaaaagatgcatgttatctatgtgactgttatatgaagtattatttgataaaccattaaggaaattcataatactaaacgtctatatacctactaccaagtcaatatatgaaaaaacataataaacaatctactacttactatatcagcaattcttgcctcggaagaacatctaacaagctttcctttggaagggagtgacctcttgggggctgacctattaaccgaaagagctggcgggtcacacttttgcatggtatctattaataaagtgtctgatctgaacctattctgcaaaactttatattttttctcaaaaatacagttcattgtctttgccattgcatgaacatcattgataggaggattatagtgcatggcattggaaaaagtcaatctgacgtcagccgcaaactctgcaacgccataatagtcattcttttccaacttagattttattgttcccaagtccatgggtttagtaatgatcgtaaggtagtcaagaatgtttggcgcaacaggatcaactggttggttgaaaatccaaccaaattcatgagatatcaaatcttccaaaactgaggaacacattgccagcacacttgtttctgtcttctgtttcttctctttctgatacccaacattccatgttgaaactcgtttattactagccacaacactagtatttgacattatgtagtcattaatcccaacaccacaagatatcccaagatcagtgtttatatccccttggaaaatttgatcttcagcctcttgggttgtacgagcatcatactgaatattagttacagttcaatgagcaccaatttgcatatttattgagccagaaaattcgtccaacatatacatacatataaaaagattctttggtagagacatgcttttggttcccggtaggtacgtttttgttttttatacttagagaaataataatccaaatatttttatatgacaatatacattgtatttatgtaggaaatcacaatttttttgtaaaattccaaataatttgcagtgcccaaaataaactttaaaataactcattttaacctgtttttgagcctttttatgcctagtaattaaataacaaagagaaacaaattcaaacgtatgcatacttgtagttactaatttgttaacaccgactctatttgaaaacaaatattatgaaggtaatataaa

SEQ ID NO: 228106 - DNA, 4770 bp, Cannabis indica
agtctgttaacaagaatggtgggttgcaacactgcaaggcaaatctggaatgctttggagaagtatttcactcttcgagtatcctcaaaaattctggaattccgcaccagacttcagaatcttcgaaaaggatctatgacattgaatgagtacctgttgaaggtgaagcagactgtcgatctcctagcaagtgttggagaaaatctcaatgaccgagatcacatttcagcaatctttaaaggactccctagtgagtacgatacattcataatctccactaacacaagaatcgaaggatatacagtagctgaaatcgaagcattgttgttagcctctgaatcaagaattgagaagaatgatcaagatactgaaatcagtgctaatcttgctaaagttgaagctgattacaatcttgatcaagatctgaatcttgaagctaatgtagctcagtataatcgtaacatgcgatttttcttgccaaatcgcaacaattttcacacatcaagaggcgcctacactggtaacaacagcagggacactggctttcactctcaacaacctgttcaaaccagtcgtagtggtgtgttcacaggcagaggggcaagattcccagcaccaccagcaagagttcagtgtcaattgtgtcatcgactgggacacacggttcttgattgttactaccggtttgacaagagcttcacaggagttggatcctcttccactcaacaaacccaaccacaagctaacattgctcaaaactccacttctcaggacagctgttggtaccccgactctggtgcaaccaaccactgcactcccaatgctcaaaacctgatgactcaatcgaactacaatggcaaggacaacctatatgttggtgatggaacaggtttgacaattcaacacactggccaatctcattttttgcctaattcgaatcaaatacttgtgcttaataatctccttcatgttccaaaactcacaaaaaacttgctcagtgtatctaaatttggtagagataacaatgtttactttgtcttttaccctgatttttgtcatgtgaaggaccaggtgacacacaaaactcttctgactggtgctcacaagaatggcctgtattcttttgatgagtcccagcttcagctccagcccttacatctcttatctacagccccttttcaatctgacagtgaagccaaacaccaatctcaatcaattcaagccaatgtttccatctcacctcagcctcaatgtcctcaaaccagcaatgcacaacctgactgtagccaaaacaataacaaccagtttctagtatggcacaataggcttggccaccctagtgagaaagttgtaaaaactgttctcaattcatgtaacatcaatgttagtaataaagttcaattttctccttgcaatgcctgttgtcttggaaaaattcacaagtttctttttccaaaagcatctgaaactgtttacaatgaaccattacaacttgttgttactgatttgtggggtccttcccacattacttccaccaatggatacaaatattacattcattttcttgatgcctacactaggttcacatggatatatctcctcaaaaataagtctgatgcattaaaaacctttcaattattcaaagctgaagctgagcttcaactaggaaaaaaaatcaaggttttacaaagtgactggggtggtgagtacaggtctttcaccccttatctcactcaagctggtattgtccataggcatccatgtcccactactcatgaacaaaatggcctagctgaaaggaaacataggcatatagtggaaaatggtctaacccttctagcacatgcctctatgcccttgaaattttgggatgaggcatttagaacagctgtctatatccataataggcttcccacttctgttctcaacaatcagtcacctatagaggtccttttcaatatcaaacctgactatagcaccttcaagacatttggttgccaatgttttcccaatattcggccatacaacaaacacaagcttcaatttcgatcctcaccctgtacctttctaggatacagcataaatcacaaaggcttcaagtgccttgactctaatggtcgaatctacatctcaagagatgtcatatttgatgagtttaattttccctatgcctcttctcaaaaacactcatctgatccacctattcaatactctccatctgctctcattcctaccatagacactcaacatacacatacaacacctctatctatttcatatgatgacaccagttcatctactcacacatattccaccacggccaattccactcaaccaattatacctttgccaccaccattatttttaccaacatcaccaggtgtctctcatacagctgcaccagctgtcgattccagtcccactcacactgatgagtcacataatttcatctctccacctcttgagtcatcatccaccaacataaatccacctattgtccctaattctgttgcttccacaaaccaacatcacatgactaccagggccaaatcgggtatacataagccaaagctatatctaacagagaaagttccaaaaagctttaaaacagctatgcaatatgagaagtggagacaggctatgtctcaagagattcttgctcttgcaagaaatcgtacctacactgttgttcctttgccagaaggaaaagaacctattggatgtaagtggattctaaggattaaagaaaatcctgatggttcggttgacagatataaagcaaggttggttgctaaaggatttcaccaacaacccggcttcgattacactgagactttcagccccgttgtcaagccaataaccatcagaattgttctaacattggccatttccatagggtggagtataaggcaattagatgtgaataatgcctttctaaatggggatttacatgaagaggtttacatgactcaaccaccgggttttgaaatcactactcagcctaatctagtgtgcaaactccacaaggctctatatggtttgaaacaagccccgagggcctggtttgagaaattacacaagtgtcttctgtcctttggtttcacagcagctaagtctgatcattccttgtttgttcttcacacttctacctccattacacttgtgttagtctatgtggatgatatattgcttactggtagtgattccaaaacagtgtcttctctcattacatctctgaataataccttttctctcaaagatcttggagagttaaagtatttccttggcattgaagttgctaaaacaaccaatggactgtttttgtctcaaactaaatatgccaaggatctattactcagagctgaaatgtaggaagctaaaccaattgctactcctatgatcagtggacaaaaactatctgcctatggcagtgaggcttttcctaatccacaaatgtatagatctattgttggggcactacaatatctcacactcactcgaccagagctctcctacagtgtgaataaagtctgtcaatatatgcaaaaacctctccaaacacattggttggcagtcaagaggattcttcgatatgtggctgacaccactcaatatggacttcatctcacaaaaccatcagcctttgaaatcaaagccttttgtgatgctgattgggcttcggacacagatgatcgaaggtccacttctggttttgctgtgtttcttagttctaatctcatagcttggaaatcccaaaaacagcatactatttctggtctagtactgaagccgagtataaaagcttagcaaatgttggcagagattgcttggctccaatccttgttcactgaacttcacatacgtctctctcatcccccaattgtctggtgtgacaatctcaatacagttctgctcactgctaatccagttctccatgctcgcacaaaacacattgagctagacctgtattttgtgcgtgaaaaggtgcagaatcatcaaattgcagtcaagcacgttcctgctactgatcaactggctgatggctttaccaaagctatttcaagtcaacacttcagtacttttcgaaccaaactcaacattgttgatctcaccaatgctgagtttgcgggggagtgttaagggaatcagttagatcagtttattcagtttgtccaactgtaatatttctgttataaaggttgttacagtttgttattattctggtcttactgttatgcttttcagttgtattgttcagtctattggttagttgtatatatactgtactcaacttccaatgcaatacaatctttgattccctctttcaatcaatctttccttgttcatttctctctttctctgtttctttccttctctgtttctttcttgtttttcatgttcattctttgaacaacaatggcaaggagattcaattctcctgacatgctgtgagtccactttcgaatagcttaatataatattaagtttttctttgcaaaagaatttcaatagagtattacttagtcatagtctaacacaagggtaagatacacaaaatatattcagatcccataaccaaataattcttctcagatgtatttctggacattggtgtttcttttaagtttgtctacttcttttttacatgatgtcaaatgagtgtgtataaacaaaagagaaatttgcggccaaacctctttatgtttcatttgtttaacacttaaccccattttctttgtttttggtgggaaaacctcctttagtttaatt

SEQ ID NO: 228107 - DNA, 3267 bp, Cannabis indica
aaaataaaaatgaaaaagaaaaatttaccaaaaaacaaagatgcaccttgttgatatagtagctcatcatgaaagaactccatggttaagcgtgcttgacttggggtaatttcaagataggtgacctcctgggaagttttctcaagaagtgtgcgagaggacaaaacacactggaaacactcatgttggtttagggtcagtcgtcattccaagaagcagccagagtgacgtactcatgtataagagtcatcattacgtgagtgtaagggtccaatagaagcttgaagagcagacattacatcaagagtctctttggagaaggtacgttgactgcgcaaactcagctatacaaaggcatgtcctaggtctagctagtggtacttcgttcgaccagggatatatcgctcattttagagatatatgttgctcgaattttgatgttatgtgtgggtaagctacacagacttactagatgtcctcttaccagctatcctagctcttactgactaatatcctactaactaagagaaattctaaaaggcacaccttctgaggtgtcatatctttattagtgtaattaagtatcaagtctcacataatttaacataataagttttatggaatatcacgtactactcccaatgtgccacctctagatggtttttggaaccattctaatagcaatgctcactaactaaagatcacatcttggactcaactcaagctactcatcaaactcagccaagtgaagctactctcgatcgagtaggggtgttagaccaattataggttttacatgtaggtgttgtcaaccaagtaccagccaaaagtcatgtttctgactcaatattgagatttttaaaaactagtttgaaaaaaaaatataagttgaagaaatgattaaagaaaataagtataatttttttacattgttggagcgttaatgagtcttaatccacgggtactagtatttacaatggtgtttgagtacactttttgacagggtttgtgctttgtaaattttaggttgtgaaccccttaaatattgatcatgaagccttatttatatgttgccatgtaaaatgggtcaggttgatccaaacctgagaggtcatgtataataaaagccaactaatagggtggttacaagagacataaagtttgggtcttaagggaaaagcccaatgccaaaagtaatgtgacagtcagtagtcctgtgatccgtaagaggaaatatctggtaagctgtgcatcccacaccgcccggggaaggttaagtgtgatgattttgagattgtatatgtatgggactgcacagttgaagaagacttaaatggattaactggtactacttatataaataaggtgcatcttattttctggtagcccatcacgaaagaactctacagttaagcgtgcttgcaattgacctggggtaattttaggataggtgacctcctgggaagttttcctaggaaacgtgaaagtgaggacaaagcatgctggaaacactcgtgttggtctgtagggccaatcttcagtctaggaagcagccagagtgacgaactcgtgtataagagccataattctgtaggtgtaaaggctcaatggaggcttgaagcggggacattacaagtaatatgtgtggcacactgttcggtggtactattatggctaacttgtctgcatgtgagctgccattaggtgcataggcaatcgatgaggtgttagagtagtggtcattgtaatcctacaatgatcgtacctttttaccaagctttttcttgagataaaataaaggtgacattcttcaaatttggtgggattgtgtcagaatgatggcacgtaggaaacatgcccggatggttagtgatttctaggaagctactcactctcggtgaggcattttgtctcggataatcctaaaatggcttgtcgattatgtgttggtcccttgacacagttcatgggcctaagccaaagatgttgggatggagccagttcacctggcgctccctgcttgcttggaaatttcttcattcatggatctcttgatcaagtatcgattatgtatggtcccaactaccttggaaaatcttcccagaattttaattctaggtcttgcctccgagaggcatgaggcacgtggcatttctcctcgttgttgggacttgagatgggtgagactctcgtgtatgggctttcgatcccaccctgagggtccacgtgtcatggttagattttataaaagataggcgacaagaagctcatcgagtgaaggcactccaacaagctacaagcatatctcgttaactagctaatagcaacaacccaggtattcttagaattttacctcatatttccttattagatatttgtaattcgaatttaaatttgttgtttaggtatttgtaaggatacataccattttgaaccttgtgttttataaaagttaccaattggaccctctattttgttaaatggtaaaatggactctgtattttctaaaattatataaataagaccctaaactgattttttgttaaaataaaacttaataataatatgatatagagatgttatgacaaaactgttcacattttctgtatctgttcgtattagaaattgtcttaaagtttattatatgaaaaaataaaattattgaaaattgagtttgtgatcctatttttaccattttgaaaaatatagggtctattttatcatttaacaaaacagatggtccaattggtaatttttgcaaaatacagggtccaaaatattttttaccctatttgtaaagataattagtatgcagcacgtgttaagaatataaattagtacatatatcatttaaaataatgtcttcattaaaatataaaatataaagttcattaatgaaacaaaaccaaacttgatgcaatacaattaatttaaaccctagcaataaaatggtaaaataaaaacatctaaaagtatgattcattgccaattttacatttgagattgaactctcatactcaaccacccacacccatcttttacacaaccgacatgatcttctacaatggcatgatcgagctaagctttattctcaatcatattctcaatgattggaacaacaaaattttgtctattttaaactcggggacgaatgaaatcccaataactcttcaaaagaagtatgataaaacaagacagattggcaccaaggaggtacaaaaagttgagacgactatgatcatcatttcccaagatttcgatagaagt

SEQ ID NO: 228108 - DNA, 1039 bp, Cannabis indica
atactacaataaagatttgtgcacttgcgagttgataaatgtaaaacgtaccatttcgatcacaacaattcttctagattgttgttgattcaagtgctctcgataatgaagtcaattagggcttgacccttgattgagattttaggctagtactggatgtcaaattggctaagttccatagcccaatttaacagtcttcctaaggattccagcttttgtaggacttgttagagagggtaattagtcagtactttaatggcatgagcttgaaagtatggtctcagtattttggaggcaatcaataagcaataggaaaacttctcgatcattgggtatttggactgggcacccagaaatctattacttacgtaatatactggcaactagacccttccttcttatcgcacaagtgcggcgctaatagcatgatcagacacaacaagatataagtacaacagttttcccttaatgagtttcgataagatagaagcctcagccggatgctccttcagattctaagaggcctctacacactcagtagtccactcaaatttcttacttacgcgaaggatgtcaaagaaaggaatacatttgccaatcgatttggagattgtgaatatcggtccagttcaatgtataacccaagtttgggtttaggatcggggactgggtctgggtccagatttggggcctgggctgggtgtgtggtctggggctggggtctggggcctaggaccgggtctgggtccgtggttcggtgcttcgtctggggtctaagactaggtctggggtttggggccaagtttgtggtctgagtctgggtttgtggctggatcagggttcgggacctagttcacgtctaggtctaggtccgagttcggggtcgtggctggggccgagtccgagtctgcggccaagtctaggtctaggtcggaagctgggtcccaaggttcaacttggggtcaaagtttaaaatattaattaaaataaaaattgttttaaaaaaatttgaaactgatttttttttattttaaaattt

SEQ ID NO: 228109 - DNA, 2846 bp, Cannabis indica
ttgaataaacaatttaaataaacaaataatatccatgtaacaatatgtgaaataagatatttattacttatataattaaattatcatttatctaaccaactaaattttaaaaatttagggttgttaaaacaacttaaaatatttcttcaaaatttaaaattcaaactaattttaaaatatctacgtttatttgaattattttatcaaattaaattaaatatctaataagataaatgatttgaaataaccaaataggatattttcaatatcattttctaatcttataatttaatacaattaaaataacaaaataaaccaattttaaaatagatttggttaagcaatcattactttaaaaataaaataataattaaatgataattattaaaattatatgtcaaaatatattaaattaagctttttttttaatttctacaaaaaatatctaggttatttaaatattttaaacatcatttataaatttctgataagtaaaataatataatattacaataaatatcatttttctaacttataattcataaataataaaatatttcacaaataaccaatttataaatttgaaaatattatggttaagatattgttatactcgaaattcagctgtacttcagagagtgacacgtgtcgaacaaatggaatatgaaccaccaggtataataacgattgtgttattaaatgcaaaatagaataactcattatatatagaattaatagagtatattcataactcgctgactacataatcttaggtgagacaaggatacacgaattatcaattcatgtattaacgaggaaccatctcgcctcggaaggcagaatccgaaaggaattacagacaatgcacaacaagacatctacctcgctgcatgtaaggaagtattgacgaggcgaatcagtcgttgaatcacttagcatataattcacattataataactaagtgtaatagcttgagagcatgtaggacatgattgttcggtctgcaatgccttatggtcaaagagcagtttctaagtttgctcagtacactggtgctcatgccatttttggaaggcatataaataaatcaagtcattcatctatgtataaggcgagatgcatctagcgagatgctcctatccaacgttagtgtccactatcttaaagataagaataacaaatggttatgcagatttttagctctacacgtgttaaaatggaacatggtcaaagcccacgtttcgtgaaaacagttatgtgtttcaaattcaaatgtaaataactgccaacctatattccaataaataggggcagagtatacacaaaaagggacgaaaaacctttgagagaaaaaaatcattgattataatactgcattttgtatccagaagtatcttgaataagatagactcgtggactatgcagagttaactgcaaaaccacgtaaaaaacttggtgtcattattactattattattcatctcaaatttcttatagtttttgaatttaatttattacgaaaaaggcttattaattagttaacaaaaatctgcgttaacaatttggtgctttcattaagagcctatgtgataatagctcagaaaaatccctccaaaccaaccagaagtttgtccatggctaatgataataaaaacgataatggtcgtcctgagaaagaaccaatgggttaatagaggccacctacctcaggaacaacacgttcaagaagaagccaaggtggtcatgatcaaaacccaaaaactaggaatgagaaaaccaatactaatactggtggttatgtacctaggagtgaggatgcctatgatcccactaggtatgtaccattagttgaattgaaaaattaacaacttcggcaacgtctggccgagtctaaccaacaaaatgctgagttggaaagagaggcagccgcagccagggcgactcaaagaaacaatgcacaaaactaacatgatcctggagtgaggaggccccgaggtagacctcgaggttcgagaaatcaagaaaatccccagaacacccaggaggagcaacctggggaaactagggatgttccagaagacgaacaataagacaataaagcacctcatcgaggggtacctcgaagaccccatggatttacgaatcaggggaatgaaaacaatgacatgccagaatcttcttgtagaaacgagaacataaggtagcccagaataaggaaacaggagatccctcgtaaaaacgagagaaatcttaggacacaacataggacaagtgggttaccactgaggcacccctagcgtctttctcaaactgataaggaggaggcatacatataccccagcggggggcgtgcatctagcctttctcgaaggagaaggcctgtgcatgacaaggtaagttctagcttgagatagtcaagatcccgagaacacagtcagtcagaaaggcatactcgagaaggagatagacctcactgtaataatgatcgagagagtaggagtaatacgaggagctgtcaatctgagaggtactcggatacaagatctgtgagcaaccatgaacgaacacaggcagatcttcgtgaacatctgaatcaaagacaacctgatttacgcgagcgcttaaatcaaaatgcacctgatttacgccaacaactcgatgctaatcgaaagcaagaggatccaatccaattacgaatcattgaattagaagataaattcaagagatactaagatggggaaatatgggaaactgcatggttatgacttggacgaagaatctgagcctttccattcagacattatgaattctaaatttccccagggatttaaaaaccctcacgtct

SEQ ID NO: 228110 - DNA, 3966 bp, Cannabis indica
aagattttctataatatgagattgaatattataattacaatacttagtttacttttcatatttttttgtaagcacttctactttactgtactggggcagcttcattttttattgtgtttttgtcaatttttttttattttaagtttgtcatattatctttttatagggtcaaaactaaatttattaaaaagtttagttgccatcaccttctcaccatgcgtcttgtttaagttcttagactcaggcacagttagcatagctctaatgaactgagccacgtgggggtcatattcattaggcaaacattgacttctcttcatccgagccatgaaagctcgacaatacatgttgcttatagctcaagaaaagtcttattggattgtgaaaaaattcaagcaattttgaaggagaaaattcttaattcactaggaaagtattttaaaattttggatgtcttagaaaaaataattcaagaatttttgggagtttgaggatgcttagagcaagaccaacaatgaaggagaagaagaattttttaaaaaaaaatgccaaaaaaaaaaaagagagagaaagaaaagaatttttttttctaccttgaggatgaagaacacttgaaggcttgatgaagatgaaattccaagaggcttttctaaggcttgggcgtgcgcaattcaaatgggaagtgtgaaaattttttattgacaactctcttatttataagtgcgttcaatctcctaatcctagagtaattgggagtcttttaaatttaaagctttaaaggaagatgtaaatgataagtaaaagatataaatatccttttccttctcttttcaagctaaattttgaaattcctatacaaataggaatgggaatttgaatttaaaaggtaacatcagctgctaatgctacgtactaagattaaggaaaattagaagtataaaagaaaaagataaatgataagcaatacatcaaaaatcttttctcttcttctttctctctctaatttttgaatggattcatcaactaggattaagattcaaatctatttaatccaaatgctatgaaaaatataaggaaatttaaaaatgataaaagatatgttaaaaaaagtttttcctctttttctttgataattggtttttgaaaattcacaaggactaagcaagggaatcaaaagtcctaatttaattgtaaatgcttgaagaatagaaatagtttcaagcaaaacgggctcggttcacatcatcaagttaactctacacaagtgtaaaattgagttaggggaaaattttaacccgaaaactttctttggtgatgtggacatcaatttaacacaatgcaggaaggatgatgtcacgaagttgagtagaccttgttcatagcagttgacctgggatgggaccctaacctagcacccaggttgacttcgagagctctgagatggaggttcagactttaataacttgaattcaactcactatctttcagtattctgtaccatgaagatatggagtaatcaaatccaagccacgagagctgaaattacatgaagctacatcttagaagataacttgggcccctagggttccaccttgcacccaagttgacattcccaattagggttttagtttttaggaccgtcttagtgcaaataggtcaaaatttctattgggacataaactagacatagtacagacatatttgaggcatcaacatcaaattcagagtaagtttatttttgaacacccagtgcctaggttgacaatttgtcaatatgggcaccttctaagtatcaaattgatgattccacttttgcatcatcttcatcttcatcttcatcaaaaatagggaaataaataattttgggggaataaacaacacttcatgggtgccaaaagcaagggccagcgcccaagttaacacttgggctggcctagtgcccaagttaacaatttgttatcctgggccaattttgataatgttttccaaaaactcttccatgcatcttctctatttttataaaatattaggatttaactattttttgggaccaaaggaaacttccaaagggccataattgggccttagatattttgtcaacctaggctatttccaatcaagttctcgaaaaagtattttgggcattttttctgtcatcagaattaatgaagattcaaacaaactcaacaacaaacccaagcccctagaaataggggtggtgcccagattgacctagtgttaggcccagcgcccatattgacaatcaacctggtgcgctagtttcaatcactcgaatcacaaatctaatttgaccaatgaatttagaattgtcaaaaacgtgttaggagacctcttcttcaagctcaagaaccttgaaagtatcaaaatgatatcccaggaggtcaggaatgagtacccaacgttgaggttgacaaatggcctgtcatttgggttttgcttatccaattctgattctatttcaaccttccgtctaatttttttttttataataactatgatccttgaagccatagaagtcaaattcacaacttcatgtttctcattttcagcatgggaaactcactcgaaaatgaagagttttcagtctctcctttctgcagaacaacaacttctctgagaactggttatcaacttcgttcgaacacataaataaactaattagtgatgtcaaaatatctcttaaacatcttaaagtgcatcccttggatgtgttttacacttacccagggtctacgttgacgtcatatgtcaacctggatgctgagatatcaacttggacactggatgtcaacatgggcattgggtcttgaactgccttcagtaaaatagtcatacctcacttaatattaatcagattgatgcatttcaacttgcattttgaatctaattaaatgctctatcaagtcatgtatcatagttcaatcacaattctgaagctatcgaccttaaatttcactcccgagttacgaaaataaactctaggttacccacagcgagtcccactaggctccaaaaaatgactattaccttcaaaagctaattttcacaataatatcattgtaatatcttgagattagtaaatggattaacaaccctaatcaaattaattaagtataatgactaattatattattatataattaattatgtgaaattaattgatatttgttgcatttaagaccccatttgtgttggggcattttgtaattttggcccgagaaaactaaatttataattttgttatttattgtgctagtggactatattattatatagtatgttcttattgtcttattgtaggtgatttttgacaagttggaatgatattgtcacaatcaagtattttgactttaaccaagtttggggtctaaaatttatgagttatgtgcctagtgcaataacatgaagtgtgtatttgcttatatgatgatatgagtatgtttgttgtgtgaaaggacaaaagtgtccttattgatcactattattattgatttaatccctaggagcaaaatggtcttttgaccactttttcttactaacataagtaaaatttcttttggctaagtgtaataattacaagctcattttttggtttcactactacaaaagtcaaaattcgcgacggtcctaaaaacactttttttgggagaccgtcgctaaaaaaagtaagtaactgtttaaaaccattgggaaaaattgtattcccgacggtttataatagtaattacaggaataggcgacgattttaatcagaattcataaaattttttgggcccttataggcgacggttttaaaccgttcggtataagagcccaatagaaaatcgttacttacttctcgccacattttccatgtgcccacctacttcttttctatttctcacatgactcacatatttcttctccattttccacaccctaaaacaaaaatcttaactctccaaa

SEQ ID NO: 228111 - DNA, 1864 bp, Cannabis indica
cctagggcccacctataggggccaaaaaaaaatatttaccttttaaaattataccatttttcttactgatcttgaaaaataccatattttttttaaaataagggcccaaaataatttttttttatggcccactaaaagtcagggacggccctgattggtggttttcttaaagtctatgtttggttgattggtattaagattgtaatagaatcaaagtcaccattacaatgtttggtttgtgtttctaacctttgtaatggaattctattgtaatgggcattacaccaatcctatgaattctcattacactcttacacctcatgaatgaggattacaatgacaactaaataataaaaagacaattttaccttttctctttcacagtttgaaaatataaataaataaataaagcaagaatatttttgtcaattcaattctaattacaatgttcattacaatataaactaaacatggtaatagtattcctattactattaccattacattccattactattcctattaccactacaattatattccggtaaaccaaacaccacaaagataatgtgaatatctttatacacttgagtttcacatgccaacttactagggcaagtcaaaactataacacaccccttaaatggcaacttggtggagttcaaaccttttgggtccaataagaaggagatgcctagaaaaatcatccatacaatacaactctactccatcacccaattgatagtacaattacccaacatttgttagatcaatattcctttatttggtaatgagttataatatatttagatctttcttagcaaagtagggtggtgaatgatataatattttcttcatctcaaaaaactcacatagtatttgatgctaaactaaaccaatatcttggtggctaaacaattgcatatatacttgaattggatctaataaggaaggaagtatgggagtcaagagtccatttacattaatgggcctatctatttgtggtgtttaggctgagccctattttactctaggcctactccaaactctattgatttctagatcatattgatcttctcctcttatgacattaaatttaagagaaatgctcaaggtactagaagtgtttagcacattctacttattaatatagttatttatctaattaagtatcgggttccatatagtataatgcaataacttttaaagagtatcgttagccaattataagacaacacatctagaaaatactagacactagtagtattcaataataataatataaaaagtcatatcttttaacaaattttaatgagcttattaatccatttgagttttaagactagcattccacatactctaagcataagaacatggttggttgggttcaaatcaaagagttcaagatgtgcggattaagtgaatttgtgggtaaaaaaaatgaatttttgaaagttatttataagcttttaaaacttcttatttataggtcattaagttatttcttaagctaaatttgctataaaatttacaccatacttctaagattttaactaaaatactcaacaatggggttttttaaaaaaaatcatttatttatttattttattgcagtacaccatacattattatttctatttaaagaaaaatgaaaagagtaagaagaaaattcattaattaattgtatacaataaaaaatcatataagagtatcactacaaaaaatcttatttttagtcacaataaaatttgtgagtaaaagtaaaagaagttgtgattaaattataaatcatcattattatattgtgactaaaaaatatatgatttaatgtattatttaccaaaattataatttattgtggcta

SEQ ID NO: 228112 - DNA, 2004 bp, Cannabis indica
agtgattttaatcactttgtcaaaaaaaaaatatatatatacatttttaataaatttttaatgattcatttgtaggatataacttcaataactacaaccgaattactcattctctaattttcttattaattaaattgacaagttaggagttagtcgttcatatcttagtgttgtaaatttcactacaaaattttttacttttagttataaaaaaatttgtgactaatcacaacggtcttgtctattgacatgctttgttttgtctgaggttttcctctgttttgtcttattgagtgattgtcttgtgttgggtggttatggcatcctccagtggaactaacaacatggctgttccgattctggcggaagaggaggaagatgatgcgttggcgtacggtgtcgatcagactgtggagtttgccatagacgatcgatggtgtttagtgggtcgatttttgactgaacgtaatatagattttgatgcaatgcgccatctcatggcctcgttatggcaaccgggcaaaggtatgtacgttaaagagcttgattcaaaccggtttttgtttcaattttatcacgatgttgatattgaaagagttattgaaaagagtccttggacgttcaacaattttcttctggtttttcaacgattaaagaagggtgaagatcccaagctcattcccctatcccatgtcgatatgtggattcagctccatgacatacaatcgagattcaaaactgctcaagtgtgcaaggatttgggaaattttattggtagttttgttgaggcagacaaaaagaattttctgggtttatggagagattaccttcggatccgggttaccttggatgtttctaaacctctcaaacgtcgcaagaaaattctcacagtagatggaaaggagttttgggttaattttaaatatgaacatgtgcctactttttgtttcatatgcggaatcatgggacactctgaaggtttctgcccccgtctgtttgatactccgaaggatagtatagtgaaaccatatggcttatggatgaaggcgataacaaggaggaagaatgttactatgggttcgaagtggttgcggtcttttcaagatttttctgatgagaagttgggcggtgatgctagtgcaggagcgacgacggtggatgggaatgataatcacgtccctatgatcatggaggggatcgtgggtcaatctgctactggccataatcgtggagaaaatatggggtttaatgataatgagacaattgggggattagatattgatagtcagagtgatgagttggctcatgatgtattagtcattactgatactaaaaggaaaagaattgaaattgaattgaatggtcttggtagtccacgtgatggtcaattgggcttgaataataattcttttaccactcaagaattcggcccaagtggggaagtggttggtgttgtggatgaagtttttaccaaagacactagtaatgataatggtgttaatgggccaaaaaacttgaacaaggtgggtgctggtttccaggcccaccgaggattatgagttttataagttggaattttcatgggcttgggaacccatgggccttacaattcttaaaggatattgttatccaaaagagacccagttttgtctttttgtgtgagactattagcaaaaaagataaattagaaagagtgagattgttgttgggctttgacggtgtcattactgttgaacctcaaggcaagagtgggggattggcttttctttggaaaaatgaagacgaagctcgcctgttagggttttctcagtcccatattgatatggaaatcaccatggaagggaaggaaaaatggcgttttagcggtctttatggtgaaccaaaccgtggccaacgtagacgtacttgggatcaaatgagaagcttggctttggattcggttttgccgtggtgcatcatgggtgacacgaataaggttttatctcatgaagacaagagaggtgg

SEQ ID NO: 228113 - DNA, 1118 bp, Cannabis indica
aaacttatatttaatagggacgagttattataaattacatttaatgatacatcattattatattactagagttgattcacattcgttctgtcctgtcagcttctggcacatagccgaatttcaatataacaaataccccataaaagtactttttaagatgattacaggcgtatattcgtattaacccgtttttgaaaaattgcatgccttgtgtttttggtggttcagaacttcgaggcacatcattagcatataatgctatgactattcccatttacaatgttcccatccgttagattagatttcttttgatcaaatagttttcagtaattgggtataaaattagaagtaaaagttcatttcgcaatttttgcgtttcaaatctttaaacctttctgcaaaaattcttttcgattgctctttctcaaccttgcatgccctcgttgtcccttatatttttcttgcgtataacatctgaccgatcttatatttctagaaattgcaaggacccagcttctcaatcttcaaattttcacttgcaaagttctctattgctcagaaattctttgcaagacagttagtgattcactcccaaattttaaagattttcttttatgtatttgtagtcttgtcttcttgattgatatttctctttctatattgtttggttattcttcggtaattttgttttggttgtttggatagttctagggctaaggagaatcataggttatttagtttataaatattttggttaagtcgtatttggttttcccaaaatttgagataaaacttattcacaattatgacccaatttattccagaaattacaatcccagagttcttagaaatgaattattctcagaatttagccaccccattcaaatccaaaacaaacatttctaaaactattcttgagataaacggtgcaaaaattagagatcatcttattgaaagcaaccaggatgagatttcaagtcgatataggcgatttttgcaaaaaataactgagggtaaacgtcgttttctacgagaagcagcttggtctgaaccccaaaatttatctacaatttctttagcgagatatttgttttcacctccagtcaatgttgcttttt

SEQ ID NO: 228114 - DNA, 1990 bp, Cannabis indica
attatttgtagtctctctattttgtatatacattttgacaatggtaatgatatgttttatttttaaaagctaaccatgcatacaggaattttaataaactaagggttctttgatattatttattttccaaatggattttataaactcaccccctatttttctcgcattctaaaaatttagtttgatgctagtggatggggatagtaccgttgaggaagaaagtcgttattagtttagttttagtctatttatcaaactttccactgaaaagtgattctgtagttaagcttgaatgaatgttctggataacttaaattagctatgtactagttagaaatgaggaataatggatgctaaatattatttttgtattctattaactcactaaatctatctagatataggagttaattcatatattttgtaatataaattaaaggatcatttataagcattattttcctacaagagtcaaagtgtgatctttgactactagagttatggatattatataactgtcacggcctagggctcgggttgtgatatcttgaatataacaattttcaatagtttagggaaaaaatttaacaacctaaaagttaaaagatacgatttagtatatgttaaaatttgtgggacaaaaattttaaatagcctaaaaattacaaccaactgatttatgatggtttttttttcactctttatgctttgtcactattacaagcaaataatattttttccccacacatttctaaattcttatgcaaagaattatttttctttttaccgacttttgcaaggaattatattctatgcaaggaaggaattttctattaaaaagtgttaaggtaaaaagtataaaacaaaaaaatgctctaactttattttttttattttttttaattttctttttctttctttctatttttctattttttttcttaaaaagtaaataatttagtacaaaataagtaataacactacacaaccacgattattattattattattattattattattattattaattccttacaaattttatgtatatatttttggctagggaaagggaacaggttttttttggttgtttgtattttaaaaaaaaaatgaaaaaacctaaagggataactattttaatattattaatgtattttttattttgaaacctatattccaaggaaataataatttatatatttatatatattttactttcttagtcttttttccaataaaccattaacatctacattaatatatctgaaaagaaataaacaaatatctcttactataatataatcttcagtaaaagttttttttttattaatactaaaaaactgaaactaattttaatttgattgaaactaattaatattaatgcatatctatcatcattcatttttaagttatactaaagttacaagaaattatcatagaaagtaaaaatgttacaaattataaattattatagcaaggaaagaatttatttattttattctctttttctcacctataaaagatagtacaaaattacaaatggactacaaataaatttgagtaaaagaaataactctagccaaattaaaatcaaaattagtgtactctctcttctctatatatacaaatcataattcagctctttggagtatagtttatttattttttatttccaagttgggtggtgaaattctgaattgatcaggtaagcttttagtttttattcatgagtttcatacatgtaatctatataaaattatattatttgcttctaatttatataaatatatatatatatatatatatatatttatgtatagttgagctattaatgtatgtttttattattgtttcaattatatagatccaaaatggagactcaacacttctgtcgcaaaaatcatattatgctcctaaaagataataacaagattaataatgatgaaatcgagtgtggaatgtgtgctatgctcatggagaaatttac

SEQ ID NO: 228115 - DNA, 977 bp, Cannabis indica
tctcgcacgtagttttttgttagtatatatatatttatgtataccaagctaattaatcaaatcactttagttctaaccctgatggtaggttaatatattgaatgaaaacccttagtttttttttttaaaaaaaaaaaatgtaataaatgtactaaattagattaaggtgatgatttcatctttacaatatgcaagtatgtgtatattaatctgttagtacaaattatcatgtatcattagactctaatactttgcgttgagaattatagaattctatctcaaaaccaataaaaaaatgagtgaagtagctcgtgtttttatatatgacttaatacatttatatttaatctatataggacaatgttctctaatatctctcctcaagatggtggtttttgtgcaccaattttgaatcaccttataacaggttgtgccattttactcgcttttattattgttcagatttcaagcgtctaattgcaccatttgaatcttatttttgttcaaatctcaaacgtcttgcaccatttggatctcatgcggctggctaactatctagataagtgtagatcgaaagcttactaaggaaatatggccctgatagcatgttaagaatcatggggtttcatttcaaaactaattgacaattagtagagtaactcatattcttatatatggttcaatatttttacaatatttaattcatggataatattctctaatactttgtaaaaagcatatcttaatatttgtaccaacaattcatttatttgacaatatatggaatctgtagcatttcattctttttttccatttatggcatgtttactaataagtaatgggaattaatagtaaggtaatcattcccttacatttgtttacttgcattattaaaattaggaaagggagaagttgattaaataagggagaaaagaaagggagaacttcccctaccaattttttaaggaatgctatta

SEQ ID NO: 228116 - DNA, 834 bp, Cannabis indica
ttaagggtggaggaaggtgaagagggggtgaaggaacaatgacaaagaaatagggtggacgaacgttgatagttgatagagagaaggggtggagaggagagaaaaaaatgaggaagaaggtccctggcgtgttgattttatcgattaggttttctcaacgtctttggttagcaaaacattacaaaaaaccctaaaaatcaaacacttcatttcattaaacgctaattttttaggcgcatgttaatacaccgacaacactatttcccaccaataaaatttacaacatttttgttggtgctatattgcgctggcaaatgtgtttttccccaaaaaaaaaaatcaccttttggcggtgtacacagtaaatttttgccggtaaattttaaaattgcactagtaaaacatgcttttgttgacagcatcgacaaatgtaaaaattcttgtaatacttttgtcgatgcatttaatgagatgtgtcctcaaaagtgagtttttttttttgtagtcgctctttttagtaccgcatttttgtttttaagggacaatctcagtcttgtttccttaactacactgagtttgagtaggggtgttagacaagatattaagtctgtaattagttaagtttttatgtttatgtacaactttatttgatgtacataacttagttggattattaggcttgtatataaaagcatttgctctgttgttaattagttaagaaatattatgctctctcatgatttcacttacatacaaatattctataatattaagtaatgttttctttaacaactatttattattagttgttagactatcaataatatcaatacg

SEQ ID NO: 228117 - DNA, 1492 bp, Cannabis indica
tttgtcctattgagggaactccttcaattgattattaaactaatgtaattatacaaacttttgaaggaatacaattgacttatttaccaaaaaaaatgaaatttcaattaaatgtgacattatgtataaacactatttttatccgtattcccggatgagatatatgttacaattgtggaagagtgccacgttgaattatgcatggttagtatataacctctacccctcggcatcacgaaaaatgttatataccagaacctatctagaggctcttcctattagtaaaggtgaaacagactccaggattctcattagtaaaactattataaaggaccataagttataggcgctccaagatggtagcatgttagcctagtccaggaaagctttagccagatgttcctagaactcactcgcgtgtgtcctattttgagctaaatatgacggttgtataccttttgacaccaaatcacatcttttcctctgcgtcagattatggtggtgtgcgtacatgctttgtagcttctctttgtccaatggcttgtctagacaccaactttgcaacgtaaaatctttgggcaacacgtgtccttagtcctatcaaatgggttgcagcaaccgtacaccacacaatgaggagactcccatcccaccaacggtaagatcaccatgttgtacacaatagccatagaaacgtgctttgtacgaaactctaggtgggtggatggtatgccctcatccacacatgttcatataaatagccctatttttcatgtgcaaagagtgaacaatttttacttacaaaatctctgtcgaaattcctatgagttttcttcttctccaagagaaacaagaggaatgtagaattaatactaataatgtaaacatttgtaatacttaaacacttgacggttaggctaatacaatggactcatggactagggattattaacctcaaaccatgtaaaaaactatttgtctattgtttattattctatattttccttaagatctaattaatcagcttctgaaaatcttagtaaatattttagtgctttcattgtgagctaaggaaagttttctagtcgtcataccacctcaaccatggtgttaacatgaaagaacggaggtaagaaaaccccattagatacagttatggaggaagcagactccctcacctctggttcccaaacatgcggtataggataagaaggtgcaaccaatgtcaagaatcgaagggaagatgtcgagaatgtgtttgacagcctcgacgatgaccagaaccctaaaaacaggcaaaaagtagacgacaacagagactacataaaaaatgggaactataaagatggttattactatgaccacgacccaaacttaatgtaagtgactaaaagaggctactcagataaagttaacagaacaaaggaagctcactgagaaaatgaaaaagatgatgtaatgcctctagacaaagtttagagacttggcaaag

SEQ ID NO: 228118 - DNA, 1228 bp, Cannabis indica
ccttttaggcaaaagatgaaagagcctttaaaattgacatcgaaggaaggatctatatttgatctctctgatatagttgttcctgatctccatatttcatctgatcacttgttgtatgcgaaggttcttactaacaaaaaagtttggctctccactttcaagaaccagatggctcaatattggaatgggagatgtccagttaccataactgaatcttcaaacatgttctctctaagtttcggttgtgtaggggacaaagctagagtcctacttcgtgaaccttttcactttcagaatcaccacattatcttgcactcccccacacctggacaaagtgtacaatctgaatcactcaaatttacacccttttgggttcaaatttacaggcttccatttcttagtaagacaaaagggctggctgttgctcttggtaacattattggcgaatttgtggatgtgtttgaagactcgctaaatgaaggatgggggccttttttgcgagtgagagtcaaaattgatattaccaagccacttctacgaggaagaatgattaccctgcagcaaccaaaagatgatttttgggtggaattcagatatgagtgtttacccgaatattgtatggaatgtgggcgcatcggacatccttttgataagtgtatgatctatcttgagaagttagacaatggtattgaaccagatcttgagtatcgtccaactatgaagggttcaccacttccaatctcaagttatgatcgttatcgaactgatttctcaaaggaaaacgcttggccattacttacccgtttggctaaaaattccttcatctcggcaattccaagtttaaagaatcaagcccctccttctccaaatcctatgtttattggagaatcttctcgctctggtgttaattcccttgctgctactaatgaaattctccaacattctgtgaacaacaacactcttcactctgatgttcctgttgtctctgatgttcctaccactgctacttcattgattcaacacacttcacggcctgcggcatcagtcaacccagcaacttcaattcatgcacaaactccacataacaaatccttaacaaacaatgtacgagtcaacactgcagtcaaattagactcacctgcttcttcaaaaattaatgaatcagtagtagatttatctgggattttcactccattgactgtcattgaaaaacaaaaagaactaaaca

SEQ ID NO: 228119 - DNA, 764 bp, Cannabis indica
tttttcctacatcttcaaaaaaccaggtaccttctccttctaatgttattcctactactacatttcacacctctttcaattcttctgtcactaattctggtgttattggtaccatgccaactcctggcaccaagacaaatacaaatattgtctctccaacaggtgacatatctgctcatggagaaaatgtcaataatgaattgaaccaaaatggctcttctctcagaaccatacctgacagacccactcaccatacaccaaaaattcgacctgttatcctctagaaccccacaccacctacaccaactataaaacctgtcacagaccctcactgtccaccagatgttcaccctgttaccattcaaactcccagtgcacctggttccacttgtcacaataactctcaccatcaaaccagttcccatgacccactcctttacctgttaacaacttcattataagaactcactcaatgagaactcgatctcagaatggtatagtcaaacctaaagcctatatggccactaaacatcctttgcctcaagccttgctgccaacttaacctaaaaatatcaaacaggctttacaagaccccaaatggtttgcatctatgaatgatgaattttttgcattaaaggctgctgacacttggatacttgttccatatcaacttggtatgcaagtaatagacaataaatgggttcatagagtgaagttaaatgcagatggctctctaaacagattcaagtcaagacttgtggcca

SEQ ID NO: 228120 - DNA, 2726 bp, Cannabis indica
gtgcacagaaggtgtttgatgaattgcttgatagagatgttatatcctggaattctatgattagtgggtatgcggctaatgatatgggggagaagggagttgaaattttcacacagatgattggtttgggtattgaagtggatttggccacattagtgaacgttctagtggcttgtgcagatattggaactagttggctgggaagagccatccatggctatgcgataaaagcttgttttcatagggaaatcatgttttgcaatactttacttgacatgtattcaaaatgtggggacatgagtgctgcagttcaagtttttaagaagattggcaaaaaaagtgtggtgtcatggacttcaatgatggcaggttacgtccgagaaggtctttcagatgatgctatcgaaatattctatgaaatgcaaacaaatggaattagcccagatatctttactgttacgagcatacttcatgcttgtgcttgtagcggatcactggatgatggaaaagttattcacaattacattagagagaatgatatggattcagatttgtttgtctgtaatgcgctaatggatatgtatgccaaatgtggaagcatggaagatgctcacatggttttctctcatatgcctacaaaggacattgtctcatggaataccatgatcggaggttactccaaaaactgtcttccaaatgaagctctcgaattattttctgagatgcaacatcatttaaagcctgacagtagaacagtagcatgtatccttcctgcttgtgctagcttagcagctctagacaagggccgcgagatccatagtcacataataagaaatggctatttccaagatcgaattgttgctaatgcacttgttgacatgtatgtaaagtctgggctgttagtacttggacaattactttttgatatgattcctgaaaaggacctgttctcatggacggtgatgatctctggatacggtatgcatggatttggcaaggaagctattgctgcctttgctgaaatgagaaattcaggaattgaagctgatgcggtttccttcatatctatactttatgcttgcagtcattcaggattacttgatgaggggcggaagtttttcaatattatgagaaatgaatgcaacattgagccaatgttggaacattatgcatgtattgtggatctttattcccgaactgggaatttatcaatggcttataagtttatcaaaactatgccaattaaaccagatgccacaatctggggtgctttgctttgtgggtgtaggacctaccatgatgtcaaactagcagagaaagttgcagaacgggtttttgaactagagcctgagaatacaggttattatgttcttcttgccaatatatatgctgaggcagaaaagtgggaggaagtgaggaagctaagaatgaaaattggtaggaaaaggctaaagaagaatccaggctgtagttggatagagatcagaggcaaagttaatatattcttctcctctggtgattcacaaccgctggcaaaacagattgagtcactactgaagatgctaagagcgagaatgaaggaagaaaattactttcccaaactgaagtatgccttgattaatgcagatgacatggagaaagagattgcactctgtgggcacagtgagaaattagctatggctttcggaatactgagcttgccacccggaaaaaccataagagtcaccaaaaatcttagagtttgtgtggactgtcatgagatggctaagttcatttccaaaacatctgggagagcaattatcttgagagattctaatcgttttcaccgtttcgaaaatgggtgttgctcttgcagaggtttttggtaaatttagaaatgagagtttattcgaatataggtgaatatgttagtttggtcatttgtttatttgttacaggtagtcacaatttgtcacctctaaccattttctgttattactttattgggttttattatcttaaaggtccattctcttgtgtatttggtgctcacgttttcagataatgtgttgcaaaatttcttgttggaattctaggttcccaataaagggtagttgctctaattttttcactgaacatgtttgcttctcaaattcatatactctatacttgcaacttgatatttgatatgatgcatgctgcttcctttttttgataaccagatacatattgctcttcctcgattggttttgtacctgcatgatgatgatgttggtgctcaacaggcttgttgggtatttacttacaacttcttttattttgttttgttattggaagtgttaattacacttgtttgccattcttttgtgaatagagtacacactaaaaggaattgcccccttgttggaatgaagggattacattgtttcaattctgatcattcataggtagtccttgacattataaatgcctagttacattacagaacgatatctaaagtaatgacattttcacagtgatggaagtaaccaactctaccttatatttttcccgaagccattatgaagactaagttacagaattctcaaagcaatttgtctagagttgatacttgcatggcatcaataataaaggttcttaacaattactgttaatatattgcttttatcatctggagtgaaggcccttcgggacattgttacttgagaatctcagatcaaacagcattgtgctctcttctgccactg

SEQ ID NO: 228121 - DNA, 829 bp, Cannabis indica
tgctcataaacaaaatgccattaagatgatatctgaagctggaaagaacagtggggtggattatggtttgaatgagaaggcagctgccaccgccattcaggcggaaatcggccggaccaggggtacggtgatggtgtctcacgaacaggggagtgaggtggggagagttagtggggttgttgctcccgcctttggtgggaaagaagttggaaatttgaatgatggacaaaacacaactgggccggatacttcattaggcccaattgattgcccattagtgccatgtgatgctttggaggcccaaggtttaaaaagtaacacacatatgactaacagtggcccaaccacttatgctcgaacagctggaggtgaagtgtcaaatgaaatatatccttctgcatctcgtacagaagtaagggggaatggaagtgaggatgagggcgaaggggatcagaaaaaaagaaaagggggtgctgggtttgtagtgactgattctaatgaggggaatggaaagaaaaataaaggcaaagaaattcttagttgcccttcaacttcgaatttggatgacaaagtcccattattcccttctctcgttaccgaagcacataaaggaaggaagggtgtctctcatggacagaggaggaaaatttctatcaagaatcgggcacgccatgttaatagagaaaaagccgagatggggcactcttcttcagagcaaatggtggaagggattcatggttttatggtggcgggaggctcccaggatggcacttttgatttggaacagctacagagccaaccaatgcggcacgagacactactattacat

SEQ ID NO: 228122 - DNA, 947 bp, Cannabis indica
aaaatttgaacaatagaaaggaaaaatatagagagccacatacttttgacatatattaatgggtaacactaaataattagactgtaaaaaaaaataaaagttagtaattttgatacaaataaaaatgaacaatttaatatgttacttataatttacaaaataacgtataccatatatttttttaaacatatattgttattgagtatgtcatcctaaaatctaaaatatataaaaaagtaaaaaataaagataatatagaaaaataaaatcttgacatcttttagtttcagaattatataaatagatagatagatattataatattaactccaaatctcatcaaaatacttacaaccatcattttctttactctctttaattcctcctgcataagtagtaccaattaaatacaccacatatatggaaaattgtgtctaattatataagatcatttataaatttttagaaattttttaataatttaaacaattaattactactataagaaaaaataatctaacaaatatttgaatcatcctccaatatttgattcttgtttttttgtttggttctctttctcttttcttttttggtttttaatgtaaatattttgtaatgtatattgtgaaaggaaaatgtacgcttttttgttttgtttttatcttatattcgtggcacaaattgaaaacaaacctacggcctagagagttaaaaggtgaatggaaattgattttattatatttatatatgccatagaaaaagggggaataaaggttgatgttggattggatatacgcctttttatatttgtggtgttcaactatactactaattcaattccttaaaaaaaaaaataaataaataaaaaaaaggctactaatttaattgatttatacataaaataaattacttagaggctataacttaaaattaaaactgttttctat

SEQ ID NO: 228123 - DNA, 1808 bp, Cannabis indica
ttaaagactgcagaattaaagccacaattttttttagagaaacaggtgatgacgaccagtggcgtgtggtgaataacaaataataggaaaatgaagtaaagggtaaagacaaattagtaactgaggttgacccaaaatggaaatagctatagctattgcctctatccctaaaccacaaataatgatgtaactgatttgaatcctcatttattacctatccaaaattccatgcatttatcacctctctctctctctctctctctggaatttgtaatttagtactgttctgttgagaagttgtggcattaatgcatttaagaagtttggtttataaaatgagaattacttttggggttaaatggcttcttcactcactaatgttcataagaagcaaactttggtgtaaactgtactataggttacttaactgtggcattttttctctgctaggtcagttctctcttcttctttttgcaccacttttagattatattttcactgaattatgtattagactctcctccatttgttaatttgcttaaaaccagactatatgatataggtttaacttttcaatgcagattggaacgttgaataaagcaaaaatatataaatagaacattgactaaaagtaaaatgatataaaaaagaaaaagaatgacctcatgatttgatgggggtgtattagcctgatggtttattgaaagtattaatataaagtaatttgttatcaacagtcaactgtaaaaattaatatgtatgtatgaaactgtgctatgtatataatttgaagatggtgggttgacaggtgagatgaaattgattcatttaagtggtaggacagtagagcttgttttcttgcaaaaaaaaaaaaaaggtggtaggacagtgaaaatatgttttggtcagttgactgaagtagaagaaaattaatcccatcaaccttttttggtgcttgaattccttcttcagttttttgttactccaaaggtgaaacccttcacgtcaacttctcttggttaatattaattgaattcaccacaccattaaaaaagaatattatgcatttgttgttgttgtgtgaattaagtagtagggactgaagttgacactggttaattcttctttattaaatggccaatttaatgatatgtaaaggtaaaagtattttcaaagcaaagctcacttatttttttacatcgagtggcgaggccagttacactatgtgcaaaaaaaagatattaacaaaaaaattaagagataaaaatagaaatatataagtataaataaaaataagattacatggaataaaaatgaaaagtattaatcttatgataaaaaataaatacttaaaaacatataacatgtaaaatttaatttatcaaaaattgcgggaggttcttttttccaaaaaaaaaaatgagagaggatgtgacccaccccctccttccacccctaattacatcattttatttctggcaagaatttttttgattttttaaatttgtattcttctgtttgtcacgttatatgggccttaatgggctccatatacttttagagatacgttaggcccgtctctataaaggcccagatcaaaaaacaaaacaaattatacttttaaaaataaaaatatatactttttagagaagaaaaaaaaaacaaattatacaactgtcgaaagaaaaaaattataaggatcatgggatgaatgaatcttgatcgtctaatcttttcaagacttcatcaagggcaagtatgtaatgttagcatattatactttatgttagttttatatttatttaaaa

SEQ ID NO: 228124 - DNA, 3471 bp, Cannabis indica
tcttctttaatttagcaaaggctttatagatttatgatttagggttttctatattaaagcacggatctgtgatttacatatttcttaagtgttttataaacactaacaataccatctcgtgagagataaaaattcaaagtacacgtcattctattattgtcgcgcgatacaaggagtgaactactataaatttgttatgtctctcttataattaccacttaacaactgtttcattctcgtcaatctagcgagcgagtgtggcttagaagtctagtccaaattattcagtcaataatatatatatataaatatatatatatattgggttctttttgtaacaacttattaagttttttttatttccaatattttagaggtaaatttgcatgtgaattgtatcagcacttgagataggaagctggaacattgaaaatttaaaagatatggaacaatttcaagcaatatattacaggttgcaagttggccaacgaaccatacacctaagttcaaattatgaatgtaataacaaaggttgttatcattagtgtataattgcatatttaagattattcttatctttttttaatatatatatatggagggaattatatataatcactaaatatattcaaataatatatattcgtatttggtatgtaattgtttaatatataaatactttttgttttatttatatattttatagatgaacatctactttgttgaaacaatcttaattcaagatttgtttctattctcttattaattctctcatattttctaataaatagataaaaacagtacaaaaatccttgaaaaataatacttgataggttcagccctttagagagaaggaggagcttcttctaatgtaattttttagtgagagaaagtgagatgtgaaaagtaaaaaaaaaaaaaagacttttacttccaaaagtacctatatagtacatgtgggaccctttcttcacttacttcacctacacaattaaaaaaaaaaactaaagtagtgcaaataagatcagacagtcaaggcaaagtgtttcaaaagattaaaaatgtagcaagttttattcagcaaaggctacaacagtgccgactgcaccaacatagttggtaaagtccatgttcgtacaaacatctacatagggacttagggggaaaatgttatcccgatttttgacttcctgatgtggcatgcgtacatgaacaaaatcagtgccacgtggcagtacaactaaccaataagaaggccaagccaacacctaagcaaacggagaccccgacactcaaacgggcatcaagtgacataccagctccctcacagggggtggccgaccctatggccgacgaaccttgggactgcaccatggttggctagcctatcctccacaagggcctggctagccaagaggagttatgtagggttttatgtgcacttctgcacgtggacaacatcctctgggttgggaattgggccataaaagcccaacagaatagctgaataacatccaagttcaagagcatttttgtcttttgtaattaactaataaaatatacgaatatctagggtttcaagttataatttaggatttaggcttcctatataaaggccttaactctagcctagaaaaatctaagctcaattaagcctaatacttgcctccaagctctaagcctaagtctgacaacttctctcttcttcacttcacgcccatacaagcactatcacttgagatttaccattcttgattcatacattgtatccttaagggtgctatagcagatctcatctgtagtgatctggatagtattaaccctcagtattgattaactaaaaggggaataggtcattacccgctatcataggagggcaaacctctataacaaatcagtgagttttctacttttcgttatgtttgtgtaacacgtggcaagcatcagattcatatgatctcgctgtcggttgatcactttttgaggtcacaaatttgatagggagcttcgatcaataatttttcaagtcaatctagtgtgatttgtaacatataaataacaaattaaggttaggtagtacagatcataccctgctcatttcgatttttgtctaatgtttcatacatgtttcgaatataattttggatttaataggaagctccgattaacaatttttctactctttattatatgatctgcaacactgaaactataatttaagcttatgttgtatagatcttacccagttcattttaagatttgtgtttcggatgtatcataccaatttttaagcaactttgttctatgggattttgttattgatctattgatgtttttgatattttttttgtcaacctggctaatccaataaggaaatttttttaaaaaaaaaaaaaaaatcattgtgctgttgattttttgtttcaaaaagcttcgcccaagaacaatggtgtctttgtcattttttttctaggcaaagagtaacgaatgtgttattgatgatgataacgtatattgtctaattagattatatattaccatataaaagttaatttctttatgtatttgtatatatgttaattttttaccctttttgtgcacatgtaaaatttttctatttttacacgtatatatacatgttttaattaaatatcatgtaaataatataagtaaaataaataaaataattaatagtaagtcttaggaatatattttgggtgactactcaatggttatatttttattgtaaccatgttggttacatttttgttgacttgtaataacaggttacaaacatgtaaaaaaaaatttaagaattaaattaactataattaactatttcttaaaaatttaagacccattgtagcaattaaattaataattttatttttatattcaaatctctattataattttttaacagttaagctatttaattataatatttacaataaactctatttattttataaaatttaaactttcaccccttctagaatatatttttgagtaattaatcacaaagtctgagaatagtgtgaaatactagaatatgagaattcatgatttatacatcatatctaaacccccattgcatctaagtatcttcaagttatatgttttagacacaacttgaaaacaaactaacaacttcatatatgtatatttttatcagtaacacatattcgagatcaataaccaggaaattatgtacttgttgggttttatgccctaaataaaactccatttcaatgtaatctctatcttttaaatatcaataaagaaatttcatcaaaaaaaaatatcaataaagaaacagaagtattttcatcacttatagtgtgtcatttggttcatgttatcatttatttgtttatttgatttataaattcatccaaacccttatcatgtttatgttcttgtttattgtgtcgtcagcacagtggaaagtaatcaagattatgtgattaa

SEQ ID NO: 228125 - DNA, 863 bp, Cannabis indica
ttacaaccatagttttgatctttctctgtgtgtttcttcttttggctcttatcaagatcttccacaaactatggtggattccaactcgattacagaaatttttgtcattgcaaggagtcaatggtcctccttacaagttcatccatggcaacaccaatgaaatattaaccatggtgaaggaggtcaaagccaaacctatagtggagttgtcacatgccatctatcctaaacttcaccctcatatccactactgggccaacttatatggttagactctcttagttaaccctttttttttttctaaattcctttcagttgttataaacttttgtacatgtgcaatcaaattaggaaaagtttatcttcagtggtatggttctcgagcactattggtcattttggagcccgacatgatcaaagagatattgattaacaaagatggagcctatatcaaacctgaagccatgccatatgtgaagaaaattataggagatggccttgtcatgtctgaaggtgaaaaatggacaaaaatgcgaaaactagctaattttgctttccatggtgacagcttgaaagtaagctcttggtatccctattttattttcttaataaaagagagcaggaatatttcagttcttttctaatgtatatgatattcctggaaacaaaaaggaatggctaattaggattttttttttagaacttttgacatgtattaaattatgccccttgaactttttggccattaaaaatgtccacggaactattgagattattgaatttaaaggcttttgtccaattttagtaaaaaaattctaacatggatgaaagtttcaggatgcatgatttagtacacatcaaag

SEQ ID NO: 228126 - DNA, 873 bp, Cannabis indica
attgagagatagagatgatagagcaagattatcctaagctttttgccagtgatcaagagtaatagaaggagaggctaaaacatcacgtatagtagaattccttttgttccaaactgtattgttgcgagatttccatatggcccaacatagcatagaagctcgacaaatatgatctgtgtcacccgtttgctgcaaaccttcgaaccagttgccaagagtagaagaagtagttgtattgatgaaaaggccgaatgaattccagcaggaaattgcaaaagaacaatgcaagagagcatgtattgcagtctcgggatgtgctttgcagaccgggcattggacagaaatgggcacgtattttgttacaaggtttacacatgttggaagggaatcggttatagcacgccatagaaaatttaacactttaggtgggatctttaagtgctagaactttcgccaaaaaccagagttgttgcttgttgggactgctggttttttagattgcagcagattataagcgcttcggacggtgaaaattcctctacggtcggctgtccaagaccagaaatcagatcttgtggtgttggtaaaagggataccgagaataacctgggcctcatgagatggaaacaagtccaaaacaacctcagaatcccactcacggtgatcgatttgcatgagggtgctgactgcattgttctgcaaactaggatgggttaaagttatgtatctgttatggggattcggcggccaagggaaacccactatacttgtagtagtgccatcaccaataacccaagaagctcctaaacaaaccacatcttgagccccccaaatactacgccaaacaaagcttggattattaccaagttcagc

SEQ ID NO: 228127 - DNA, 2116 bp, Cannabis indica
aaaaaaaaaaacatgagaagtatgtatccttcactcggtatatactgagttgaatgaaactcacaagaatatcttcctcgctaatgaaaacagggttgtgtttagcaaaccagagccaatgaggcacacgaggcaaaagcaagattaccctaaatactatcgattacacaaggatatagcgtataccactaaagaatttcgacaattgaaagatgagatagaaagtttgatcttgcgaggatactttaggtagtatgtgaaaaatcaaggaaatgagcctaaccagcctaacaacccgaataacccgaacaatctgagattgcaacctccccctattgagggcgaggatatcttggtaattaatggagggccacacctggcgggaaacaacaacaatgcccaaaagagggatataaatgaagtgaaaaaggaacaatcagcattcgctctagtaccattgaaaagagcaaaattgaatgaaccaccgattatcttctctgaaaaagatacaaaacatgtgcgatacccacatgttgatcccctcatgataacgatccagctcaaaaataaaagggtgaaaagagtactagtagataatgggagttcagtcaatatcatttacaaagacaccttaaaaaatgggattagaggatgcaaagttgagaccatgcatggtaagcctatgtgattttacaagtgatagtgttgcgagcttgggcatcatcaagcttccattaagtatgggagaactgcctttatcagcgacacaaatgcagttttttttggttgatgacatcccttccttgtataatgtattgatgggtcgtccaactctaattagaccaacggcagtgagtttgattaaacacttgtccttgaaattctttacacagttaggagtgggagtggttagaggcgatcagttattggctcgagaatgttaccgaatggaacttcagaataggagagccagtcattaattaatggtaattctaactaaagaaaataagagggaagtagaagatttggatccgagaatccaagatgaaagtatcaaactcaaaccaatcgaagagttagaagaaattattttagatccaaataaacccataaagtgtgtttacattgggaaaaatttggaggaagaactaaaatagcaattaattatttttctcagggcaaaccaggattagttcgcctggagccactcggacatggtaggaataaatccaaaagtaatttgtcatcatctaaatatcgaccccaactatcgagcaaaacatcaaaagtgacgaccattggattctaagagacaaggtgcactcaaagaagaagttgacaaattgttaactaatgacttcatacaagaggccttctaccgctcgtggatttcaaatccagtccttgttccaaaaccaaatggcacttggggaacttgtatatattttttagatctgaacaaggcatgtcccaaagattgctttccactacctaggattgatcagttagtggatgcaacagtaagacatgagttgatgattttcatggatgcatactctgaatataaccaaattaaaatgcatgtcccaaatcaagagcatatgagctttgtaacaaacatgggactttactattataaattcatgctgtttggattaaaaaatgctagagcgacataccaatgtcttgtaaatggtatgttcgagaaccatattggatggaaaatgttcttgggatttcctcaggaaaatttttggtcttcattgtcaatgcaagaggaattgaagccaatcgagaaaaaataaaggccttaatcgagatgccctcaccaacaaagccaaaaaaagttcaggctttaataggaaggatggaagcactcaatagattcatttcaaaatcaactgataagtatctcccattttttaacattttgcgaggcaataaaaaatttaaatagactaaagagtgcgaggaagcatttaaggtgagaaactttatatctttatattcttgtcttggaacatgccatcagtgcagctttagtgtgagaagagagtaagaaccagcaacctatttactatgttattaaaagtttactgggggcagaatcgagata

SEQ ID NO: 228128 - DNA, 824 bp, Cannabis indica
taagttaccaaaaacttcttcaagaaactagctaataattgtattaatgttagatatatatatataagtattaggtatttagtttaatcttttcagtgatgaacttacttattttttgttcattcagaattcgaatacaatgctcaatttcacaacgtaatgagagtaacacatgcaatgtacaagacatgtaatgcgtcactacctttggaaacatacaccacaggaaatgacagcatcaccatcaccactcgaggccaccatttctacatgtgtggtgttccgggccactgtcaaggcggccagaaggttgacatcaatgttcctcgaacaccctctgccgacgttgctcccactcctttggtttcggtctcgcctcccgctccagccgtcaaggcacctgctccggcttccaatgtggctaattctaagaagagtcattctgttttgcttggtttggctggtgctgtgctttttgtagtctttggctcatctatgattcttgcttaattttaccattatttttttttttttttttatgttttttggctaaagagtttgttctcaattgtacttattgtacaatattttaaataagtttctttaataatagtggtaacagaatcttgaatcttcgatctcaaaattgacagatttcttaaatttctttgatttggcacacgatagcaatagcttataataatattgatatatgaaaatgaggtaaaaaggaaataataaaatgtgcttcattttctttaacaacagtatgtgctttaccttttcctcacaactttaaccctatgtttggtagaggagaaaat

SEQ ID NO: 228129 - DNA, 2009 bp, Cannabis indica
ggttagcttgttatgaatccaaaggtacactcctggatagctattgctagtctttaaggttcattcaggaaggaagccatgtacgtatctggaaggattatgtgtttacaatgctcctagattgctcgtattgaaagcacgtattttaagatgacataaattattgttactggtgatgagctagatcatttaagctggtataaatgtgccacgatgatttaggggttatttttgataacaatgcaaatctataaatagttgtaaatctttgtaacctaggatgagattttcagaccaaatttgcttgagtgaaaattgtgatagtgtaaggtagagtctaaactggagagataaacctcttctcgtgatctttgataagtttataatgattcttgtaaccttgtaaacactgatatcaataaaagttatggctgttgttccaaccaagatgtagagcattacacaaggctcgaactcattaaacttggtgttattcttttctattttactgcttaattcattatattgaattcttgagatctcttggtatattatttcttgattgtgtagcgtatttgttggtactgtaaactaaatcgtaagtcattaattatttcgttttgcacagcaaataatgtacgagtatgcaaataaaaacgatataaatgtaaatgagacagtgaatcacagtgattcagtcagagcttggtttgcttagtctactttaaaaggagtattttttcaatcccttattcagtttagttgaccccattatataaaaagtaagtatccctttggattacataaccggtcagataggaccattatttcattaattacattcaattaataaataaaatgtttaaagaataaatgaaagagtaatttcgactgttcttaattaattgtcttaacatatgcaacttgagaagtcgcatatcgataattcatcttcgaaacatacaagctcctaggctctttgatgtttatttgtgtataaggtctttggaccatagataacctcagggttatcctctaggtagaatgccagcaattactttggtcacataacttggcattcatctaacaactgaacctatgagttcttgatgagttgttgtgtatttgtcttttggacatgacgcatataaagatttaatatttatattatatagttgcatgagaaatgtacttggttattacatataatcgatatatgcgtgatcagtgctgacttctcttgattctactttttttctcgactatgctaagaatagtatgcgactaaatcctgtcttagtcgcacctcctcacaaatttatatcttgcaaggttagctctcgcgaagccttatgctgacacctcatccttttcaacttgaaaattgggtccacgtgtcaaacatctacgagaatgtgctcattatttataggtaaaaattgtactatgatacagatagttttgctactaatattgttgtttgaaatgaataaaatataataaaattaaaaaaaagtaggatttttgtgatgtatttcaaataaattaatataagtgtaatataaaaatttaaggtaaaattaatatatatctatatatatatatataattttggtcgtttattttaaaagatagaataaagaaattgacgagagtattttaaggtgagtacgacgtgtttagggctcacctggccgaggaattcaaacaaaaaaaaaaaaaacaacacatgcaacttaacttaccacacctgtcattgaatagttgacaggtgtgacaggcgttatctcattaaaaattataagtaaataaataattaatatgggttatgaaaagcccacgtatgtaacaccttaccacacttgtcattgaatagttaacaggtgttgtttaagttatagctaaataaataattaagaagggttatttttgtaaatagcctatgaaaagcccaaagaactattctcctttttataaaggtttatagatatatattaattttccacaat

SEQ ID NO: 228130 - DNA, 1777 bp, Cannabis indica
attcttatttttcttctccttattagaatcaacaaccttcacaccagatccagccatttgttttgaagcaacttcctttgttttttccagtttcttcttcgaaccagacacctccgatgatggagacattgaactctttgtacgcaccataaacaaactaaaaatgtgaaaccctaacagagagaaaccctaaaactttgctgaaatgaatataaaaaagaaaagaaaataaaagtgatggagtgatggcttgagagagaaatggcatcgtgtttaacactcaaaccactctcaaaacaattaccgtgtacacgtgtcaaaactaatttaaaaaaatggctacttttaccaattaaaaaatattcggtatatataggaataaattccaaaattcctcccaaagcataattttctcttaatttaagtgttattagttttaaccaatactaataaatgaacgttgagcgtcagccctccctttgtgctctgtggtagttatagtccattatctggtttttacagttttgattttcaccatttcagttactttgttcttgcttttctcttttcctttgttattctactgcaatcttccttctgtttcattcatggatccttttattcataaaatgaaatcaaccatgactttgtctgacaatgagaaatcgatttttttcattactgatgatggctcttttgaggaacaaccccctgaaaaattctctttattcgccagagtgatcacgcataagaaagtctggctttccactttccaatgtcaaatggcggaacattgggacggtcggtttaaggttaacattaaagaacatttctcaggactctttattctttgttttgggtgtgtaggagatagattaagggcacttgataaagaatcttggcattttcaaaatcatcatattgttctttatccccctactgcactgcaaaatgtgaccccagaatctatggttttctctcctttttgggtgcaagcttatatacttccttttcttagtaagtcaagattgttggctaaatccttggggaatctttagggtgaatttttgactgttcatgaagattcattgaatgaaggttaggggccgtttttacgattcaaagttcgtttgaatataacgaaatcgttgcttcgtggcaagatgattacattacccaaagtccgggatgaattttgggttgaattccgttatgaacgtctccctgaatattgtatggaatgtggtgttattggtcactttggagaatcttgagaatggtattgaaccagagttggcttatggccctatgttgaatggatctgctcttccgtcttcatcttatgaccgttatcgatctgatttttccaaaggcaacacgtggcccttactcactcgtctggctgagaactcaattactgcaacaattccacggattaattctggtccccctgcgcatccaacaagtttgttgattggagtcttctaattctcaagcacttccctcttctactggtactggttatgtctcaacaactgccccaacttcaatggttcaatcctttttctcacctgctttactgggtcaatcttctttgatctcctctggtgtggttcaaacttcagcaacacaaatatcctccttcacatctgttatgaattctccaaaggtcaatcctcctacaacatgtaattcggttgcacatcttttgaatgtgtacaaacctgatattggcaatatctttgttactagttctgtatcaccactcactcatccc

SEQ ID NO: 228131 - DNA, 1280 bp, Cannabis indica
gtgcatgtggtacagaggtcgtaccttctttaagaacattcttaaatcatctgttaagcccggtagataggtgtatgggcgcctagatacaagtcgatattattttatatgttatatgtttatcttactgagtctgtcgactcacagttattgctttcatgtgtaggtaaggggaaggctaaggctgagcagcaatgagtttggagcttgaaggtgattgtacatctcaagacggtgtgacctggagagtccggtcccgggacaacataggcttattttgtagtcactttgcgatatagttctaaagtgtattttaatatgtaaacaagtttaaaaagcgagatcccgacatatttcttggttataaagttacagttattcaagtttattattattcaaaaaagttttaaattatcacaatttttgagaaaaccctttaattagcaaatgagtgtgcaacaaacaaaagagcattgtaacgtgcctaatcactagggcgttacagttatatttttttatgtcaatatcagtggttgatcttaggtctatagatcttaatcatgagatggttaggttcaatcttaattgtattatttatggtcttcaatttttttattaaagtcgaccaatttgatcttctcgtgacatatagattaaggacatggtagttcaactgagtgggagcgctaattatagatatggaatctatagcttccataagtatttagaagtgaaacgatgattttttttgagcttggcttaatagttttaattgattgaggcctcatttcagtaattatattagtttactgaaatatcatttataggtacctaagtgttttaaggataaaatatattaaaggatagaacagtaaatttgtccatattcgatgtagatcatctatagaggatctttgactatttagattgtaacaatggataattcataacctttctatatcttggtacgtatagagcgttttatataattaagagtgtaattttgaatctatagtggcgcaaggaggaattaataagttagagaatttacttagtgaattctagttctacttattggaagcttgattatataggcccatcatccttaaactaattgagatactactacttgcagactcagttaattagttttaattaatcaattataattctaaaattagattgtcttatttatgaatttacactaagcaagggcttaattgtgaagaaaagagatttatgggtttatttgttaaataggagactttgttaagtctaat

SEQ ID NO: 228132 - DNA, 1363 bp, Cannabis indica
gaggtaaatatatttgtttatctttttaatttttatgtaatgtatattgatatggagatcatagggtgtggaacaataataatcaaaagaatgcttctactgcataccagatttagtaccacaaaacgaacaaatgttactagagttaattctattatgtatacatatattaaatattgtgtggatgttttgcattttatatatatgcgataagtatgtgaatgaatgattatgtatattatgaatgtatgttcgatgatggatcgttaattatatggtactattgggtgtaggaatttttttatattttaaaaaaaaatgtaagcaattatggggcatagaaatttcttttttgtgtaattgatttttcttgaatttttacataaaatttatgtaccatctaatgctcatcacatggatctcaaattttggccatgcacgtacaccgccattactgcatggagctcaaatttcacgtgaaaccccagctgtgcactgcttaaaccatcgtgagctgtcaacaaagatggcaggtccttctcgagattcaaactcgtgacctaccattcccgttctcattcactagagttgttcgactaccggatgacatcatacaacagcccctgaccgtcactgtgcatggaggagccttgactgtagctaggaccaaaggttcttcggtcatgtctcgaagaaaggaaccccagatcctttctctcagccagaaaggactaccatggtctggtcgtgctctcacgtgaatgcatgtgacgacatgcaagagggattaacgccgctcttcctgtgcgtatggaagacaacacccagttaggtctttgggtcttttgacacatgtgtgttattttcaagccccttggctgccagtggccatagtggctcttcccgagcctccagtcatggtaggattcgctttttaggaacttctttacatcttgattcctgaaatcaaacaacgaatgacactagacttgactttttttaaaactatgcctaatcagggaagaccctaggcctagtgcctaagttcacaaagaaggtgatttatgtgtcgagttatagactcaagattcttgagtaacgtgtaatgaccgctttagtaatttggattagtaaatgcaattagcactattttctgatatttttataattatttatgaatttaattatttatgggccccattattagaaataggcattagagttataatttctcaattctggagattttattaaactccaggggtattttatgaattaaatatgaaatatgttatttttgtaatttttgctcggcggtaacggaaaatgtgatggatggctagtttgatcacatgggtaagtt

SEQ ID NO: 228133 - DNA, 2655 bp, Cannabis indica
caaaagtctttaaatgtaacaatctcaataaaattagcctaaaaacaaaaaaaaaatgtttcttagcttaataattactaaatgattgtaatggggatttggaaatgtataattaaatttgtgtttgatatgattttagtgaaagacttatgattaaagggatcaatcccacttttaagtttattttttagagtagtctcaaacttaagttttgaaattccaccaaatacaccatcatagagaactcataatattttttgcttttgtttttttgctaaaaaagggttttccagggttcattacatcagtggtgaaccagctatacgtgaacttgaaacaaatccatgaattgggagtgaagaagatagcagtgacagctcttgagccattggggtgtcttccaccagcaacggcggcaagctcgttccagcaatgcaacggaacccaaaacgccctcgtcaacctccacaacctcttgttgcaacaagcagtggccaagctaaacaacgaaacctccaaagattctaatatcatcattctcgatctttattcttccttcatgtccgtattcaagaacaaaggagacccattaggtaattttagttaatacaacaagaacaacactaacaaattactcttttacaacacattataatcattaatcactacttatttgcaggtactataaagtttgagaatccattgaaaccatgttgtgttggaacaagtagtgggcattcatgtgggagtgttaatgagaatggtacaaagatgtacagcatttgtggaaagcctgaatctgcattcttctgggacgatgcacacccaactcagcagggttggcaggctgtttatttagctcttaaggacactcttcaccaactaatttattagtacaacctacctatatcttaatgatcatcagtcatcactccttgtgctagaattttcaacttttttctttttggtgtgtgtgtatgcatccaataacttgattttacagtcaatttatatttgttcacttttttgtaaaattattgttaattaattaatcaattaatgggatagtggcttcaaaattagttcatttaatcttttcttgttctttttaataaggagaaagttatgtatattttctcatcaaataatttgaacaatcaatctaaagtacctttcataaaagcattagtctcttggagattatgtgattgagagcaaaaatcacttttatatatatacaaaaaggatatttctcgatgcatttgaaattaacatattaaacaagcgggatttaatctcaattattaaacatcatgtctttatacattattctcgataaagttttgaaagcttgaagaacaagttctagagtagtttatcagcatatccggcagtatgtggcgccagttccgacgatgagtcttgctttggtttcaaactcagtgtaattagttagtttagttatgtctataatttaatcagtttatttcttgtgttgttgttttgtactgattctgatttagaaaaatttagagagcctggaaatgagagagtgagaagggttagagaggattcgtagaaatttattaaatactatgtagttggtaattaatctaatgagcatcaagaagctatccccaacggcccaattacatgtactgaattgttgtgcgaaagagattaatcaatgacttatgattcagtttactgaatcaataaacacacaacacaatcaataaacaatatatcaagagatctcaaaattatagataatgaattaagcaaaagaacagaaaatactaacaccaagtttaacgagtttgagccatatgcaatgctctatatttcggttgaaacagaaacaaaccatatctttattgatatcagtgtttacaaggttacaagaatttttacaaacttctcagagattacgagaagaaatttctctctctagtttaaattctaccttacactttcacgattttcactcaagcaaatatgatctgattctaacattgattacaaagatatacaactgtttatgcattgttgccaaaaatatctcctaaatttttgtggcacatttacaccgccttaaatgatccagctaatcaccagcaacaataatccacgtcagcttaaatacgcactttcagtacggtcaatccagaagttttataaacacacaagccttctggatacgtacatggatcttccggatacatacatgacttccttcctggatggaccctcaagactgatagtaagctatccgggtgtcactactacaaaattcactattcacgtcggtcaacacgactgttcattgcattgactgacgtgaatagtgccagattaaataatttgacgttttaaaaatgacacaaataagtaatggtttgcatcggctctctctctccctcgttaattacaaaattgacgacaaaaggtagaattttttaaaatatatatataggatttgcgtcaattttaaagccacgcaaacccattttgtgactttttaaaactagtatttttggatttttcgtcagttttaaagcctcacaaacccatttactagtgagaaatgtaaatgggccaaagcccattctacaaaccctaaaacaaaactctacacttaaatatatcttattc

SEQ ID NO: 228134 - DNA, 1459 bp, Cannabis indica
taagaataatagatgtagaaaatgtataacaccttgtgatcgtgttattattgaaatttattttgataaaaaattagttaagagtactattttgtactattttaaaaaaatatagtgtttaatttgttatttagcaaaattaatctaataagtaactgttatgaaatacaagatctaaaatggtatgtaacgaccataaaaagaatattaaattttttttcttccataaagttgaaccttttttttttcaacaagttaaagtttttactctttttagtatcatgctcttattacaaactatgaagaaattactaggaaaagaactaaattctctcaaaaatgtcaaatattaggaaagttgtatttttcatattcatttttattgagttaaaagatgtggattttattaaattattaatttattcacatgggaataacccataaaaagctcaattttttttagttgattttctaaaataactacttattaccaagaataacttaggaaaagaaatataaatgcattgaaaacacattccactattaactactatttttgggtgaaaagttgtgtttttatttaattaatattctatatggcagaaagaattacagtacaaaaataagtgtaattaacaaaaataactatttttttaggtattaataaaaaatgaaaaagtacaggtgaaaaaaaaaggacaaaatctgtaaaaagcactaactcaaaagaaagtaaataatatccttttcagaaaaaaaaagtaaataatataatttctactaatgggaatgttggaattataaaatataattttttattattaactaataatttccataattaattattgttttaattttagacagcaaatgttgataatgaattttatttgcaccgaaaatttgttaagagcactttacttttataatttttattttatataaaatatatatctttaattataataattttttttttctaatttatattcttaaaaaaaatatacatatcaaacaaaaataaattacattttaaatattattaaaaaaattaaataaaaaattatatgaaatattattaaaaaattatacatgatttaaaaaaaaaagttataaaaataaaattaaaatatgtattaaaattaacacaagataatttgagaaaaaaaaatgtaaaaaaaatattaaaagtaatttttaaaaataattttaaactcgaataaatattataaatgaacttatcatttaatgaggtggaaatataattacctttttaaaccaaatgcaaagtaaaggtgcattgaaagaagcgtagagtgcaatatagagaagcgttacctcaataaaaaaagataaatattaagaagtaccatactgctattaatgcaattaagtatcagataccatataatttaaaaaaaatagtttttaaaaaatatttctaatcaatcgtaagaag

SEQ ID NO: 228135 - DNA, 1824 bp, Cannabis indica
attctctttccatttctttcttattcttcacttcttcttcttcccttaacaggacggcaacccaaaaaactccacccacgaaaccccaaccctgtgatcccctaagccacgaacccacaaaccccaccctcgtgatcccttgaaccacaaacccaaaaactccaaccccatgatcccctgagccacaaaccctaacccaaaaatcgatcctcaacctagaatcgaaccctgtgatcccttgagccacgaactctaacccgaactctaaccaccaccaaccactaccaccatcaccaatacctaacattttctcagatcacaaatacaacaaatcaaacaaatacccaaataaattttaaatcatacaaaataaaacaaaaatctatgtcaaaccaagaaaaaaaaaacactagatcagggggaaagaaggcaagagaaaagtaaaggagatagccctttggtgttgggtctagctccgatgccacacgattaacagaggggggaaagagaaaatcaggagatagaaaaagagatgagttagagcttttaaaggaggaagaaagaagaaaaaggaaagaaaggaaaaagaaaaatgagaacaaaataattatttttttaaaaattattttttttcgtgattttgaaatatttgatatatttttttaattattaatattaggcggactaatgaatttgtttcacgtgtacacttatgtagacagtggcagtcaactttggcacttaacagactaaatagacggaagaagtatagagaaaaataattgtgaaggttggaatatatagccttaaatttcctagtctaagagattgattgtaccaaactttaaaattcaagaagtttggtcgcaaattactaatggcatgtcgtagtataaaaataatcaaataatatatatatatatagtgattatttattaatgggcattatctattaatgtagacagtcaactttagcacttaacagattaaatggacggaagaagtatagagaaaaataattgtgaagattggaatatatagccttaaatttcctagtctaagagattgattgtaccaaactttaaaattcaagaagtttggtcgcaaattactaatggcatgtcgtagtataaaaatgatcaaataatatatatatagtagttatttattaatgggcattatctattaatgtatacttttaaaatttaactataattaaatgtcaatttaaaaaatattaatttttaaaaatgaaattttaatccaatgattaatagtaaaataaaaataaagttggtgtggttgcttttaccacactactaagttattgttacgtgtattgtacggatacctaattaaagttttagtttttatttttttatttatttttttaattttaaaaattataagaaactacttatcaattttttttttaaaaaaaattaatatttaaagttttaaaaacttgagtaaagtaaatataaagtttaagaatattaaaattgaacatattctaatattaaaaataacattagaaataataataatattacaaataatatttacatattttatatatttaaattaatttaaaattagtataagtttaattaacataaaacaaataatattaatatttatatatatttaaattaatgtacgataaaaaataataatatttttatatatttataaaaactaaccttactaacaccattaaatttaacaaaaatattacttatattttttagaataattctgttaaaccaacaaaaaatcgttaaataatcacattttatgtataaaatttaacaaaaaaaaaaa

SEQ ID NO: 228136 - DNA, 1871 bp, Cannabis indica
ataattcaatgctctatcaagtcatgtataacacttcaatcgtaattctgaagatatcaacaccaaattttaccctaagggagttacaaaaaataagctttgggttactcgcagcggtacccaccgggctccgaaaaatgccatcaccaccaagagttaattttcactgttagatcatcatctatagtcaaaaacatctaatttttattttttctatatttgtgggcctccttcacctataaaaagagagctccctaagctcatttttcactttcagaaaagtacccacaaggtcaaagcttctctctctagtttctctcgctaaaagttagagcttctgatatttagtctttttctgtaatatcatattgtgagaaataaaaactcgaagtagacgtagctccattattgtcacgatatagggagtgaactactgtaaatttacagtgtctctcttataattagttaactacttttttattcttgtcaatctagtgagcgagtgtggcttagaagtctagtccagatttttgagtcaatatttgtcaacaaagtctctcattttatgcatacacttcctaagggtcattggaaaacattaaagaaaaaattgagatatctaaatggtactctttactttggcttgcatcccatatcaacttctcaacttactttaatagggttttgtaatgtcgtttgagaattagactctgatgtcagtaagagtacctttggattctacatttttctggtatctaataccatctattgggactctaagaagcaaagaaccatctctcgctctaaaactaaagcaaaataccacaccttagctcatgccactaaagaattgtcctggatccaagctcttacttttgaaattggaatcaagctccaactacctccaaatatctgatgtgacaaccagagtacaatacgcatgtctaccaattcgattcttcactccgcacccagcatattgagcttgatttgtactttgtgaagggaatagaaactgttggtgaagcacactcatatttgtgatcaattggcataaatcttaactaaagccttgtctagcacacgatttatttttctatgggacaaatttagcttagtttctttggctacattatgtttgaggagagttgttaggcaaactatacttagttaaatttttagttatagtttgttataattctgttgtaacaattgtattttaaagctggtatttgagctcttttgcattgtatatatactaagtttgagctcctttgttgaatgaagagaatcatttttataattttgttattgaattttaacaatgtctattatatctatattataattttataattattttcttaagttatataaaacttgtttaatacttcttttagcgagtgtaatataaagttacccaaatatataaacctgatcggttaagagaaatcataagacatgttcacttaattggaatgaaaatcataggtatcataataattcttatttaattgtatactaaaaaaaaagaatgagaaaacctagataaataaagggtaacttttcctttaaatttttttttataagaatactgttaagcgtaatatgattttaatttatttattttttaaataaaataaaaaatattactattactatcatgtgaaatatatcttacaactagcttatattatatattaattaaaaataataataatttagttttaagcattttatttatatttcttaataaattaaacaaaataaaagtagtatgattctattctcaataattttaataaataatatattgtaaataattaatttggatttttccatatttagtcagttatatttctctattaatt

SEQ ID NO: 228137 - DNA, 2809 bp, Cannabis indica
gttttacatggatctatccaatgaagttaaaatctcaagcctttgaattgtttattcaattcaagagtatggtggaaaaacagtttggtttacccattaaaagtgtccaggcagatggaggtggtgagtataaaccgtttgctaggttcctagctgatcagggcatcttgttttctcatccttgccctcatactcaccaacaaaatggtagagtagaaagaaagcactgtcatattactgaaacaggattaactcttttagctcaggccaagttgggtttaagctactggtggcatgcctttcagtgtgctacttatactataaacaggctgccaactacctattattggtaatattagcccttatgagtgcttatttccacactaagcctgaatattctatcttgaaatcctttgggtgtgcctgctggccacatctaaggccctataactctcacaagttagaattcagattttgatgagtgtttatttttggggtactcacctgcacacaaaggctacatatgtgaaaataaaagtggtcgagtctttattgctcgaaatgtcattttcaatgagacacactaccctggcatgactcatcactcccatactgaataggtacctactgcaacttacctttattcatcctactgctaccttttctactaaaacatgtactaatgtttctcctgttggtcctttttctcgaaatactgagacaatggtcctcccagttgaagtaatgccaaaccaagtacctcataggccccacaccttataaccaataccagaaaataaccctttgcctacaccagaccctgccacaaacaccaacaccattatacttgatcctgtagcctcaccggatattaccaatgaacctacatcaaacaatggtgctcctgtaccctcccagatagacacttatcctacaggcccagataattcaaacttctctctgccctcagccattgtctcagctccagcagcttctgtacctgttcaaaactcccatcacatggttactcgatccaaaaatggcatttctaagccaaaagcttaccttgccccaaaacatcctctacccgagtctttactaccctttgaaccaaagtcattacaaatggctctcaaagaccctcagtggcttaattctatgcaaacagaagttcatgctttaaagaaggctggcacctggacaatggttcccaaacaacctggtatgcatattatcgataataaatgggttcataagatcaagttgaatgcagatggatcatttgacaggttcaaatcaaggttagtggctaaagggtatcttcaggctcctggaattgattatgaggagactttttctcctgtggttaaacctgttacaattcatactgttctctctctgactgttaattctcattggaaggtaactcagcttgatgttagcaatgccttccttaatggattgctaactgaaactgtgtttatggagcagccccctggctttgttgatcagtcaaaacccgaccatgtatgcctcttttacaaagctctttatggacttaaacagcctcctcgagcctggaatgacaagctcaaaaccagtctgattcagtggggtttcactagttcaagatctgatgcttcattatttgttcatggttcgggtgacaatcttattatactccttgtctacgttgatgacatacttgtcacaggtcccaaccagaaacttatcacacgactgattactgatcttaataaggagttttctctcaaggatttaggtgatgtacactatttttctgggtgttgaaattttcagagaccacaggggcatgtttttgtcttaaacaaaatacatcacagatctattagttaaagttcatatggaaggtgccaaagtgtgttcaaattcgatttccaacacaacaaagttgtctctgcatgatgcagagttgttcgaggatccaactctttatagaagtactgtaggagctctacaatacctctccttgacaagaccagatgtagcattcgtgatcaacaagcttagccaattcctcaaagctcctactgtttcacattgggaagcctgtaaacgattgctgagatatctaaaaggaaccattgcagatggtctactactcaaaccaaccaaagttctcactttaaggagttactccgatgcagattgggccagttgtgttgatgatagaaagtccacaggaggctatgttgtgtttttaggagagaacttaatctcatggtcagccaagaaacaaagtgttctggctcgttcgagtactgagagcgagtttcatgctctagcaaacactgcagcagagttaaaatggattgtttctttactctctaagctgcaggttcagttgcctcactgccctgttgtttgggtcgacaatcagggagcatctgccttagctgcgaacccagttttccatgccaggtcgaaacacatagatatagatttgcactttgtcagggatcaaattttggccaaaagtctctcagttcgatacattccaagtcatgatcaagtggctgatatgctcactaaaccattaacaaaggataggttcctgtatctgaagtccaaactgaaaaatggcttctaccctttcgtttgagggggatgttaacatagctcactaatcttagttagttttctgttttgcttaggttagttagttaatggtagttaactgaattctgttatgagtcttattgcttctatttttgtacttgtataaatacgttttcttcagttgaataaagtgagctttcttttgcta

SEQ ID NO: 228138 - DNA, 1083 bp, Cannabis indica
aacagtaacaagtacaaccaaaagtctttagaattttatagtcaggtgcactatgaaatagacattcatagggtgttagcaaccccaaaattgtagtaggtaacctattgctagtgaaggcaaaactttgaaaggctgaccaccagtaagacaaatcaagtccagcttgtgcaagcatagtaagaccagtttcagatacatgtggattctttctttcaactcgataattttgtgcatgatcatgtggacaaggatgtgaaaaaagaatttcttagtcccttaagaacctttaaaacatcctatattctcctccccagtaagcttgtacaatcttgatatgcaaactgagctattttttaaccatgctcttaaacttgataaacatatcaaaagcctaagattttaagtgtaagggaaaaatccataacgactataatcattaagaaaatgaacatagtatttgtaaccctctttagacaatacatgtgatggaccccataaatccaaaataattagttccaatggttaagatgcataattttgagacaagggatatggtagtttgtgactttttccttactgacaagaactacaaaactttaagtcttttatttttccagaatgaggaatatggtgaagaagtctacttaaaattgcaggaccagagtgcccgagtttattatgtcaagtattaatatcaatttgtaaagatgacacaaaagctaaaggagtgcaatcaagaacatacaaaaatttattatctttattgatattggaagtactacaataatgtaatgtcattattatgtgaaatacaaggtgtattacaacaagaatgagtgtttgacttagattcagtcacaagaaggcactaaagagagggaatggaatgaccaacagagtcatctctaagcttgtaaatgccatctttaacttgtcccctgagcaaaaatatcataaaatttttgtccttaaacaaacaacaatttcgctaaaaactctaagaaaaactttattgtcttcagtgagtttagaacactacaaggttctttttaatagcaggaagttgaaagaacatatgtc

SEQ ID NO: 228139 - DNA, 2373 bp, Cannabis indica
ttaatcttttattattttattggttgccaaaaacctcggtcaacagttagtttccaaaaatcttaacaaatatttcgggtactttcattgagagttgaaggaagcttaaaaccacagtacacttgtagcagtggtagaaaaaactcctcaagcagatgttgatatcatcatgggtgatgtaaatccactccctcaagggcacgcccagccgagtcatgcgagggatggggaggcttccaaagctagcgacataatagatgagcccacccagtataaggaacaatttatcaacaagaaccctcacggtgaagaagaggaggaagaaaatgatggagaaatcaaagacagctactacaaggatgaatactattacgaacaggacccataccttctttgagtgtccaatgagttacattaaactcagaaaaagctatccaccgagaagagttttctcaaaaatggagaaaatgatgactcgcctttgggcttgttagggtttatcccatgaaaagcttgtaaagatatttctggttattaataagaattgaacattgtgatatatgcattaatgttaaattattaatatttattaaataatttatatataaatataaaaaaaaatcctaattcatacatgaggatgtgacttgtagttgtacaaaaaattaagatcacctagccatgaataaaacattcaacaacatattaaagtttaagaatctttaatcaatggttgttagtgcagttcagtgatgcccgttattcggtgcaagcaatctcaatttagattactaatatagcatgacatctaagtgaaggtgctgtatataatagataatatatattgcaaggatcgatatgaataaagtagtctttataaaacttaccattcactataaagacctaattcatatcataaagattatcaacaatagatcgacctaaatcttaagtaattatgaactcatgttcatgttattagtttctttgattcactcattaaagtttctcagagaagaagtttcttacaacttttattttgggaatctaataatgtagatggctgggaacatgatctagtgatctacaattatggactcctaactgttatacccgaaatttgactacttaccagaagctgacacatgtattacaaaaggaatgaatcagctgaatgattataatatttaattgcattattaaatgcggcttaaataactcatttcaattagttatagttgacaaaaatcttcaaactcgctgccacataagcatatgcgagataagaataatattaacaaatgtaattaacgagacaatatgtcaatcttgggataaacagagtatatactaaaagtatacaagaccatatatgaaggagcttgcagctcattgacccacatacttaggagtaagagcttgcaacttattgacccacatatttgtacatggagaaaataactacattcatccatctcgccctctacgcgacgcaagagacacctcgctactatcattataattcaaagagcacggtgaggagaagcatatctgtactaagtttttttttctatacagacggtgtagaaggataactcacatttagcaagaaacaaccttcatagtcagcataactgtttaaggataaagacaaaagagcggtcgagtagttattaaccattattccatgtgcaaaaaaatgaaacgtgagaaatgtctacatttcatgagcagttgtaaattattagatcccaataaaaataactgtcatgctatacacctataaataagcacagaatccaaggaaaaagggacgacaaacttgagagaaaaactgtattttacatttattaagagaattgtactatgtatccagataatcatccctaataagaaggactcgtggagtatgtagattttaactaaaaaatcacataaaaatatttggtgttcatttattattttcatcaattccatagtatatttattacgtaaaaggcttgtatatttagttagcagaaatttgcgctaatattttggtgcttttaagggtgttcattggatcacatccaatgtttttaggcctttccagatccgatccaatcatatattggatgatggattttacaatctgatccgatccaattaatttccatcattcaatcgatccaacatccattggatgttggattggatcgtttctatcgattggatgtatttcatgtataattatttatttatttattttgggtttatccaatattttagacctagtattttttggatcaaattagatccatccaatattttaggtccagtatgtattggattgaactggatccatccaatccaagaaaaaaagaataaaatttt

SEQ ID NO: 228140 - DNA, 1123 bp, Cannabis indica
tatcaatcttagatgcgagtttttttgacagctttgttgtctgcatcgtgtacaccggaagagcaagccccaccgatttaatcaaagtagctcgtcccgctttggacaatgttcttaatttccatccatggagtttagagaccaggttatccaagatgaagttgaagtctacatctttcttgcgagacctaaacaacagaagccttaaataattgatgttacccatggctttattgagtcccagctcccgcatgataccacttttcatacccgagctggtgttcttgctgaaaaatatcgatgttttgagtttattaattctttggcctgaccaaccacaaaatttctctaaacactgccagaattcctttgcttctactatcattgcccgaccaaccaaaataaagtcatttgcaaagaacaaatgagatagtcttggaccatccctgcttaatttgattcctttaatatatccacaattcaaggagttttcaagaatgcgcgaaaggatttttgctgcctagataaaatgataaggggaaagaggatccccttgtctaatgccgcactcaggaaccaaactattaactttgttaccattaaggtaaagattgaagagcttttagagcttggcttaacagacataaatggaagagctcttatttcagtaattatattagtttactaaaatattatttataagaagctaagtgttaggataaaatacattgaagggtagagcggtaaatttatctctactcgatgtaaatcgtctttagaggaactttgattatttggattgaaacaatggataatatataacgtatctattcttggtgaatatagtgttttatataatcaagagtgcaattccaaatctatagtggagtcaagatgaattaataagatagagaatttacttggtaaatttaaaactacttatttagagcttgattatgtaggccagggtcctcacactagttgagataatattatcttgtagactcaattaattgattttaattaatcgattataattctgaataagactatgtcttatttatgagtttcactaagcaatggcttctttgagaaaaaaaagaggatttagggtttgtttgtt

SEQ ID NO: 228141 - DNA, 5030 bp, Cannabis indica
gacccttcttacgaaaagggttaaacggtagaaaactcgccagatcgtccgggaaccagtgggatggggggctggccagggatctcaggctaaacaacagccccttctatccatcctgtggccagccaaccaccagcaggagtcccaatggctggccaggctactcgagcagtcccaatggccagacagagaagagcactccctcggcgaggggagcgagtcatccgaatatcaattttgaaccgacgaggatcgggagcgggtggaaacacccaaaaaaacaatttgagaagtgaagttagtcacttaagaaagtttgatccaccaaactcaagtaattggtgcgatctactccatgtcaatgcacaaactctaccagccaggtagagaagtatgggctgtcagccctgcccaacctaaggctagctgaccatgtacaaacaaaagactcagagctggatgaccttgagtataccctctcccaaagtatggccgaccaggctcttaccaatccaaggctacaaatcaatcaaagaaggccaatcaaccaagctcctgtagcaacaaacccttatgtgtaagcacagttggatcaaatacgagacatgttcaaggccctagctagtccaaaacctttagaaatcgagcaagacagggcaaagggatcataatttttggcttgcatcaatgccttgcccttgcccaaattcaagatgccgacttggaagatgtacagggaaaagaagaccctctagtacacctgaagtactttgagatccaaacatgtctcctacaagtacatggagatgtgagatgctaaatctttccagcaaccctagcaaaaatagcccaataatggtatttcaaggtggcccaatgaagatttaattcttgggaagagctctcccgtgagttctatattcagctctatgcatcaagacaaatacctgcttgatttgaggatcttgccaaaataaagcaaagacaaggtgaacccttgaaggactacattcaacatttcatggttgaggccaccaaggacacaggcttgatagaagaaggccgatatacggccatactcagaggcatcctactgttgagtgacttttggaatgatataaggaggatctcaacgagaaatatggaggagttccttgtgcgagttgatggcttcataaagttaaaagaagctgtccgacaagtccagacaagagggcaagataagacaaaaaaacacagggcctcatagcgccccaaacattttctagcatgccgaccagcacaaacaatctatatcaattctcaaacaacaagaatggtggaggaaagcacaacaacaatgactctgatcaacataatggcaaaaaagggaaattcaacgacccatttatgccatgaagtccaaggaagaaggaggagaaatgtgtatgcttaactcttccatcaaaactcccaaagcaaggcatgcctagatgtaccagtacggcgagtcaacaacaggaacacctgaaggcttacctccatcacaaaaggctgacctccatctccgaagtctggcctaaatcaatgtaggctggcctctgcctctgaagactggcatccgtcttttgaggctggcctccatatctaaaggctgatctttgcctctgaaggctggcctccatctctaaaggctggactccatctccaaagttttgccactgttatcccaatttttcacactatgacattacaacacatactagtgacacgtggttcctatttcctaaatctggctgaagagatattccaaacagagctcagcatacatccgcatggatagagttttctcgactgagcagggtaagggtagcccgttcgagcaacatatcaacacttagcaattccaagacatgcatcgtgaagaaagaaagcaatccctacaatctagggatcgtatcaaagagatatggcaagctgtccaaatcccacaatctatatattctaaatatgtaatttatgttcttgccaattatagatattgtaagcaaaagggaaaccttccttcaagcatttagtcgtataaatagtgatccattctcacttgaataggggtagaaagaattacatcagagagatctaagaggataaactcagagatttcattgtgagagcttcaagagagcaaataatgtattctttgttgttgagttaatacaattcaaagggagtaggctattaccaaactaacaaggctgaacctctttaaaatcttgtgttctttactgttaattagttcttactttatcttaattatattttctatcgcttattatttgactcattatcgttggctaaaagcgagatcaacattttggtgctttcattgagagttgaactcaagtttgctcttggctataagtttaaccagacacacaaaagggtggtgcaaactcgcagaggcgtggtcgatcaggttgacacactagtggcagatcctaaactgcacactctagggaatgtaaggtcccaccagtcaccaatccttggccacctaatatgcaaccacctactgcgagtcaaggtgtaacatctcttctggctgggaccacacctggtgtgcaagagactggaaacaccagttcaactaccaacttgggtacttccagtactggaatcccttcagtaaccaatgttcagacaaccatcggagataacactgagattcagaacctccacaatgctcttgggcttatgcaaggtcataccaataccttgcatcatgatcaggaagagctctatgctgcagtgaaccttgcattcgaagagcaaaggcatcagttcgctgaatggagggacagagagatggaaacgttgaaggcttaataagcagccatcaacgactgaacaaaatagaccatcgtattgatacgaagagccttccaatttgctaaccagaaacgactgtctagcatcccgctgggcagctcagaagaaattcctactgggcacaccacccaaactgtgaacgaccagtcctccaatccctggtcacaggttccacctgtgggccaagtggtaggcagccaaaccttatctggaaattcatcaggtggggttatacccaataactctacccagactagcgattctggccaactggtcggccaaaccaaccagtcactgagataacttggtgtttcaaaattcaacagactgggaacatctcatgatctcagggatgatttgaatagaaggaggggtctggaggaacaatatgttcaaccagccactcagcccggcatccgcatccaagatccaggtcaaagagaccctcacgtggcacaaattggccaagaggccgaacaagtttacccatttgtgcaagcatagttagatgaatttaaaaatgtgttccaaggcctggccgaccaaaaactcaatgatcttgagttggatcgagcacgcggattgcccttcactcctgagatcaatgttctagagctacccctcaagttcaaaatgctgacctggaagatgtacacagggaaagaagatcccctatcacatctcaattattttgaaatgaaaatggatttgcaaggggtgcgaggagatgtgcgttgcagagtattccctgccacactttcagaagcagcacaatagtggtatttctagttatcactgggaaggttcaactactagaaagccttctcctcagagtttcatgcaaagttctattcatctcgccaatttcaattgcatttagaagagctggtcgaagtgaagcaaagaccgaaggagcctctttgagcctacataagtagattcatgacagaggctacgaaagtagcatggaagctagccgcaatactggggggcatcgagattcttggagaactatggaaagacatcaagaaaagtggtcatctagactctatgacagatttccttgaccgagcagatggtttaatcaaacttgaagtagccatttaacaggcagatgtcgagcctacatcgggcaaaccacaggctccctcgacagggacatcgccccataaccccagtgccctagtatttcgaatttaggcgacaaaagatccaacaacaatggtagacaaggcaatggaaaaaggaaagtttgtaggaaaagccgaacaaatgcctagaaaaaatccttccaagttcactactctttctctatcttgactaacgacctggagaccatctacatggctacccagtcagtagtcccctacaaaaaacctgctcccatgaaaaaggagataaccaagcaggacatgtccaaatttttccattttcatggagactatgaggccatgacaccaatgagtgcaacaatctgaagagggaagttaattctgataagaaaaaataacccacacgtgcaaaagtatgttaaggccgaccaaaatcaaagggccacccaaacagacaacaaccaagacctgttactgcctccaccagtggatgggcatttatgagttatcataggggccccacccattgctggagattcgggcaaagctcggtagaggtatgctcgaactttaaaacacaaaccaaaggaagtggttctggccgtagaggaaaggaagcaaaaaataccacgggtaggggaacccactataaccatcactgaagaagatgctgtcgatgttcacttgccgcacaatgatccattagtcatggaagtacaaatagcaaataaaacagtggcccagactatgatagataatggagcctcaacaaatattctgttcaaaaaaccatacgagaagatggggctccaacttaaagatctaatcctctgtctctagccagtatatggtttctccggccaaagtgttacacctttagggaaaatttgcctacccctcactgttggacaagctccaaagagcataactgtaatggcacaattcctggtagttgatgttccatcatcctttaacgtcatgttaggccgaccagctttatatgacttaaaagatgttacataatttccattcgtgcatcaagttcccaac

SEQ ID NO: 228142 - DNA, 4321 bp, Cannabis indica
gtgtaactctatttctagccgacatcatactaacaatgaggttgggattattctccaagacaattatcaggtgtggaattctttttcaccaatttccatctctcattgtaaatgaaaaatagtgttatgactcattcttcaacaaagcttgctttatctttagaagctcctctcaagtaaagtggtgggaactacctgtttgtctttggccttaatgcttcaatgcttcttttttatatatccatttgctattggttttgtgccttcttttctctaggaaagaaaaatctacaaatttttgaattttttttgaataattaatgcgttaaaaatatatttaaataatcttttacacgtgtctcgtttattttatacgcgtgtaaaatagattgcataaaccatattataaattattttatttcttaaaattttgcatatcttaaataaaaataaataaacattaaaactatttagatgtcaaaatgcaccataccgtagaagcacccaatatgatatgtgaacaaacaatttatgccaatatgtgaacaaataatttatgccaaaaaaaatataaatattcacgttacaatttcaactaaccatatccatatttatttatgatgatttccacatgattaaaatcacctactacacaagtgagcaatattttggtattaaatgtgtgcagatatcagtacacttccaaattaattaaaatcaataactgtgccagttaggaatcagcatcctccatactaaacgaagataaaatccatatactgtgagcaatgtaattctcactcacacaagtgcttaatttcataacccgtgatagatcttaattaaactggataaaattacatctgttttaaaacaatttgatattcgttcttcttcgagagaaaaacggctaatctgaaacacatgcctaactccatgtaaactttagtaaagagatataatattaccactgttccaaagtttattgtctttcagtgtataaagtcgagattgatcaaaccttaaggaacaaatgaccaaattgaatttcacctcccaatctcctctcactttggatctgatgaccttattccgtggcgcttgaaaaactctctaaatccataggcactaagatcgtagttgtactggacatgtaaatataaatatatatatgtatatgtatataaataagactcttgattggggtaaaaaaaaaataaataaatagagtttcttttcctactgtgtaggtaggaagaggacttcaacatgagaaaaatgactgtaaaatgctagtcatagctcaaatctaagttaccaattacttaatcaaaactaaaaaagacaagaaatgtcagttcatttaagaagcccaaaacttacaggaataactttgaccgagtactttgtaatatttgtatccacaatccttccttgattagatggtgcctgaagaagatcgagatcataattttgataagaaaaataaataacaaaaaatctgtctatcaagcacgacataaatcaaattaaaaggccgagcttagaaattgggagaagtcaaggattgcccaaattaagactcaataaatcattatgacccttcatcacttttctttctagctcttactctcaacctcttgtactcactttctcgtactctctcacttgcattctcaaacaagaaatcacctttttcggtgccaataaagaagttttgcaaacaaaatagtcttgaagaagaattttcaaggcagcacttctgtctgatgacattgataaataaaagagatcacaagcaaaaatactaaggacagcaatctatatttattcatcgtcttctttatagaagagtgcgtatcctgttcactaacagtgttgctttcattgagagcaattgcagtgagtgatttcattgagagaactctcaaccatgaaagctgaagagattgttgaactcttgaaatttatggaatcttgtttcaagcaacatttggattctcaattcgagaagttcactgataggccttaggtattaaataaagagggtgaataggtattgtaatggggtattgagatagtatatataagagtgtattaaaagggttgggaaagagaattattttgttgtgagcaatagctcttgagagagtgtcgggtctcttgaatacctagaaacttgttcatttccttttccactatctattactttccatcttgctattgtgtggctctatttaccctattttgccactgtttatacttgaatgatagaaaattcttatcaaatggtatcagagcacgtcgatccggtaaccatgaaaaactcgaaactcattttttacagcgatgatccatacgcgtgggtcactaacattgaagagtattttgataggccacccttaacctttgtatatggttgaaagaataggaaaggtatcgtggtcgacaccacaagaaattaatagctgagctggcacagtttgttatgtgagttgtgtttaagtgtgtgctattttgggtgcactcgttttgtgggaataaagggtgtatgatttgtctttttagggtgagaagaattttattatcttgtaacctcttgagagagaactaggctctcgaattcctgggtatcaatagaaggcaattatgtcatttttgcaatataatctcaccgttcttcttcctctcttgcttttgacctaattttggcaccaaatatgaatggccccacaagatgtcgagaagacggcttttcgcacccatgaatgccactatgagttccttgtcatgccgtttggtctctctaatgctccagcaacgtttaatgtgctggttttctttgacatcttagtgtacagcccctctttggaagctcatgttgatcattcggaggaagtcttaaggcgactatagtagcaccaattgtacgccaaccaaaagaaatgggcaaaaaagtgtcgagtacttagggcacatcatctcagctcaaggagtttcagcagacccagctaagatagcggctatggcacagtggccagttccaaaaactctcaaggaactttgggcatttttgggattaacgggatattttcgtaaatttgaattatggcactattgctcgaccattgacggaccagccataaaaagatgctttcggatggaacaaggaagctcaacaggccttccaactattgaaagaagccatgtgctcagtactagttttggcctacctgatttttcgtgttcatttattgtagagacgggcgcttccagagttgggttgggagcgatgttgatgcaaaatcaacgacccatagcctatttcagccaagctttgtctcctaggtcacaagccaaattagtatatgagcgaaatggccatcgtgcttgctattcagaagtggcgtccttacctccttgagcgtagatttgttgttcgaacagatcaacgcagcctcaagtaccttctcgaacaaagattggtggcagaggagcaccaatagtggttgtctagaatcttgggatacaactttgaaattcagtacagacctgggctcgaaaataaggcagcagacgcccgtccacaacgactctactttggctgctatttctgtccccaatgtcatttccattccaaaattacaaacccaggtaaaaaccgatccactgttgtctgaagttaatggagctggaaaagggtcatgatgggggtggatatactttagtgcaaggggtgttgcgcttttgtggccatctcgtgttgccatctacttcaccatgtgttccattgttattacaagagtatcactgcagcaaggtcggaggccattcaggggtgtaaaacttttcagcggctagcaactgacctctaattggtcaggtttgcagaaaattttcaaaagtttgtggcagaatgtgctatttgtcaacaaaataaatatctagctcaatccctcaccggtttgcttcaacccttgtccattcccgagcaagtttgggaagacattttcatggatttcatcaaaggattgcctatgtctcatggttgtggattgtttgactaagtatgggcactttattcccctacgacacccttatacggcagctactgtatctgaagtttttgttcggggatggtcaaacttcatggctttccacgttccattgtctcgaatcgcgataagatttttcttaacttgttctagaaggaactatttcgtttgcaaggcaccagcttgaagcacagtacagcctatcatcctcaatcagatagtcaaacagaagttgtcaatcggtgcttggagacttacttacgttg

SEQ ID NO: 228143 - DNA, 1578 bp, Cannabis indica
tatatagtatgcctgtgttgtctttttcaggtgtgttctgacaagattgtgcggtatagtcacaattgggtatttcaggttgaactgggttcgggcccaaaatacaattcaaggattacttattggcattttatttataaatgagaaatctgaaaattattggaataggtattatatatgaaatgacttaaatgcccttaatagtgtatgtatatgttatatggcccaatgggtattttggtaatttggtttgggatttatcttgttgtaaaattgaattattgaggaaaagagattggatttttctgcattttaccttcaacccaaaccgacctccccctctattctctttaaaccatttttgctcttgatttttcttggttgaggttggcttgatttcaagtttggtgttggaagcttttgagctagtagttggaaggaattgaggtaattctttcactcatttttaattgaaattattgctggattttattgttgtaagagaatgaaataagttgatgatgatctttagttgcatgttagtaatctcttgttgatttaagcatgtttatacttgaatcttttgattttgtgtttgggtgaactattggatgaattttagggtatttctcatacttgaaatcaaattttattttggtgtttgttgctggaaaatataaggttgtatagatttgaagttcttgttattgagcttgagatttgatggtgttaactcttgggagaagcttgttattgtgtgttgtttaatctgattttggtggttattatttttggtttttaatgcttgaaattgggttttaaactctctgtatgatgattaaaaacctatttgatggtttgggagttctggttaagaattcggttgtttggatgtgatttaagggctgaaattcgtggtttattgctagtttttctaggttttaaacccaagtgttgcgacatggcttttttgcatgccgcggccatcccttttttttttctcggcagatcctaatgcaaacttcaaatggccataactttgtgatcaggactccgatttgggagttctatataccattggaaagctcgtttcgagctctatgtggatatttatattttgaatgccaagtatatattttataaatttggaattagggattaaccttatatgtgtgaatctcagaatttgtgactaggaataccggtacttggtcaggagcacccggggatttgaaatctcctcttttctgggacattaggtaagacagtagtatgcacgttgagttaagcgcagtggcgctcatattgtatgttgtgattgtgattaattaagaaccaagattagggttattaccctaaaatgagcggttgttttgtctagggttattaccctagtagttacaatatgttgaatgttatgccatgttaaatatgttggaataaagagttatgcgtctaaggcataactaagctagactcggtaaactagtattttgagtttaattttgatgcggtctagggtcattaccctagaatattatgaaggtaagaaatcgttaatatatggtaatattatta

SEQ ID NO: 228144 - DNA, 1537 bp, Cannabis indica
agtatttgcacatcatcatcatcatcaaacatgatttcttcaccttctttttccaggcaatccagaaaagcgtgatagtcttcgcatataccatcaccttcatcttcttgatcgtattcgtcctcaagttcaatctcctcaactttgtcagatttctttggcaatgtattctcataatcttcaatagtatccagatatgtgagatactcaatgtcaccatcttcctgttcgcaatcagcagctaacccacgtttcaaattaggattaccaattgttccaccgtgtttcaaattagaatgcccacttggttgactaggtttcaacttaatgaatctgcaatgatctgcatcatcttctttgtcccttgaaacaggtgttatataagaatactcatttctgttattaagaaaagttaagaagtattcttcatcaacatcttctaaatcttcaacgtcaacatcttctagatcatcttcatcaacatgttttgaatcatcttcatcaacatcttcagcaaaagccggaagttgattttcaaagccaaatcttatactaggacgtaagtcctcttctacgtcatagtcgattagcttagtcacaccattctcatcaacaaactcagctgaatatgagtttccatttcgcctcaaactttccaagaacttgatatgcactggatcatacacgtcctcttcatcagaaggagcagcaacatcattatcattatcaatatgatcataatcaccatcctttagtctaatgtttgaaaagctcgcaggtttcaaaacccctgatttttctccagctatgttcttttttattgcctttgaagccttgctgcgagatttggggttgtaacattggttactcattctttctctcctcaatcgtctctctgacctcaagtcagagtcattatcaccagatcctaagctccctaactggacactcgttgcactgctgtgagagtttgggttgaaactttggtgatcggtgcatcttctctttagtcgcctctgcagcctaacatcagtgttttcatgactacattcctgactagttgcactcccataatggacgctctttcccttccctgcctttctctttgctgaagtacgacccattcagctcaaacaatgtaatgccgtttctgaaatttttcccatcaaaacccagagaaactgtaaaagaaaaccagaactagaacacaagatcagtcgaaaacccttaagcaaaggtctaaacatgcagaatggtctaaacaaaggtctaagctcactagattttttttttccacaaagcaatatgaatcacattaagaaaagcatcacaaagatatcagtaatcagagcatggagctgttcaaacccaactcactctctagcctaagagtatgcttggtcagatcatgggcatagtgtaattgttgtgacccaaatgcgacaaagctgtccatgataatttagaccgcatacaattaaaacctttgtaattcttttgtacacaaaacttccgcatataaaattaaagatcatat

SEQ ID NO: 228145 - DNA, 1012 bp, Cannabis indica
agtctcaagccacaacacaattagaactacaacatccacaatgcaatgggctaagagaacgttccggccaaataaaaatagttagacaaaaaagggatattaacaattaatttaggaaaatatttaaataatggaaacaaaagtttaaaacttacccatataatttgatgacgaagggattaggtcagggaaactagatcctcgctcgaaggagttgcatacctttttagacgaaaattaatgtcccaattcgatgaagaagatctgcagtaaaagaacctatatcactctccaaagatgcaataaatctggtagttttagtagaaatatccaccacctactttggtaactctgtcgccggatcatgagtaataatttttgcattttgccttggcacgagttggcaagacaataagtcccgggtgtcgtgaccctcattccaaaccttgaagatgagttggtttttctcatcagctatagtggcttcattgtctttcaaaatcctagattggatagggaggcttggagccattaggacccccatagttacctccttgaaatcacccagagagtactcccgggtgaatcttcgtgagtgtttctttcctcctcttggtagctaaagcttcaagttttatcttcttattggcttggtcatccgctttcctttttggattaaaacctcctccagagtctcctttatgtccagatcgatcactagactagctttgtttacctcttcagatgtttgaggcttcacagaagagggaacttcctgaagagggatggtcacgatgaatgcgtccagattcaataaagcatcaaccaagttgagggatggaacctttggagttgtggcctcctttggcttgggttgtgacctggaagccttcgcccttaggacccaggcaggcacgccagctacttctctcttagcttggctctttttggtgatgctcttgcagaactgcttcaggctacttaagcattcgtctctgtaaaattcaagcac

SEQ ID NO: 228146 - DNA, 1126 bp, Cannabis indica
atataatttttttatgtggttgatttgaatttttgaattcaatctatatatatttgtcttattattacaattaactaaaatataataattgaatgtaaaaattaaaaaaaaaatattagtggtcggtttggacggattaaaccgactaatttcattgggcgagttactatttttttttttttttaattggacaggttgtacttagaattttataactcgatcattgaataaaatataacataaatcgaccaacgtgcagacttagacctagtaaaacattcaatgattggtaaatgatggaaataatatagaatcattttgtagtcagtgacctgatcacaagctaaaccacacttaccagtcgaagaagatgactgagacatttatatggaacattgagactcataatttcaccgaatatatcaaccacaatgccacgtgtcaatcagtgaatagagaagccaataggcaaccatacccaccaaatcatagttctggttatggacaaataagtcccaactcatataactaattttgggtctagacattgcaccaacatatatagatcacctgcccacaccaaataaataaataaataaataaagaaaaatcaacttcaaaattaaagcaaaatcaaccttattctccttgatgaagacaagtcctttattccatatgttcatatcattttatagtactattaaatttaagcaagtcttattaaataaagtggagtggatgatggttttggttgattaggatcagttgctaaaatattgttagaaataaataatataatttatggttcaccaactttgttgcccaaagtcaaagttactttgtcacctttgcaagttttctagagagcgggagttcatataatattagtacaattttaaattgtagtacatttgacagtgatcgaggttgcccttttgattgcgtttacgttgttaacatctggcattcaatccttgcctaatttcttaattgatttataaatatatatatttaaaaatatatattattgtgtattttaattgattatgcaaatactttttttaaaaaagaaaatgtttatataataaatggtttaaatctcatagtaattacacataatattttt

SEQ ID NO: 228147 - DNA, 1404 bp, Cannabis indica
acaatgctatatttcttgtaaatattttttccttggggtttaacaaataaatgttgtcccaaagaatgatagaaatgaatattaagaaattttctttaatgatatttatgggattggaatttttttcttcttaatattctgatatagaatccttgtacacccttggtcttcatacttttttggcattttgaaaaccaaagtattgcagcacaaattgagtgcatctgtcattgtttatgtaataacaagaatacaagatactgttttcaaaacattagaacaaaagttactcaatcattaatttgattcaaatatattaccgatcaaactacaaactattaaacaatcattaatttaaatttgtctttatttgatgagcttctcactaattttaaacaagcgaccaatcactgattttaaaaagtttgattcaaatatattaccaatcaagaactactggactggactggactggattccttcattctgtcaatacgacgtcgtttagtagttgcgtgaggattgaggttgaggatgatgaagaacaagagagggtacgcctggggagtatcagctgggctcaacgctgccttagctgccatatccgccaagctttttacctctgagattatcagatatggtttggtactactcttcaacctcacaatgtgggcatcttatgtcaacagccttagatccctctcttctcttcaagctacagtcaccaatttcgctaccaacttcctcacatctggccttgccgggtactttttgtttgaagagccattgtcaattcagtggttttctggtgctttgcttatcgtagttggggttctcatccttagtaaatcaagtattcacaacaacaaggccttgaagacagagtaaagctaagctaagtgtacatctctttctttctttcttttctaaactgaattttacaaaataaattatgttattttgtggttatggtcgattaagacttttgtgattatatgcttttacaaaattgtagtaaacaagtaatgaatggtggtgttagctattgttctgctatttctgtatgcttatcattagaagttttaagagagaaacgagttcaatgaagggttcttcattgcagggtattgtgagagttcccattggatgagcttttaatacgaccttgacttaatgatcatttaaccactaattcataattgtaaacaagacacataaataggctttttgttttactcatgcaagctgagaatatatgaggaaaaaataaattctacacataattctggaaagaaaaagttaagttgtatcatttatatcactcttggagactttacttttggtctccaaggaaaaaattgtacatggtattggcaattacgcctttaaaaaattgtagtaatc

SEQ ID NO: 228148 - DNA, 1167 bp, Cannabis indica
tcatttggtctttctgtattttcacccgctccttggtcctctcctatatcggtacaaagtataaatgagtagatgaacacaacagattttcagtcattcgaatcaggtggtccttgaaactctctaagattcaagactacaaatatgcaaatagtcaacagtttggatcaattttagttccagcccaatccatttcacacaactgaagctagcaccttacaaataatcaacttgcaaacaaacaaatatcaaacaagttaaaggggtaatagaaccaaacctggctactttcacaatgccttaaattattatataggaaggctaagccttgtgtaagacactgatgtttattttgaagtctgaatcctagtgctaaattgattaaagtagttcctgcaagaagaaagaaaaaaaatcttattttgctttattattacattactccaattcaaagaggtggaagaggaaaaagagaaacataccaacacagagatttatcaaggggctctcgggtaacagtttataagcttcgagatacttccttgcagcatcttgatgatggctgccactggtaagctgatgtgcagaaataagaatgggtgggacacaatctttaagttttccttgcataaactgcagaaacttataatgtcttgtatcacgattctccaatctgaaacgttgcaaagaacaaaatgactaaaattacaacagcatattgaagatctgaatttcaaagccatatatgttattgaagggacatgattcacacatgaaaatagttttcattaccttgaaataactttgtagtagcaattccatgcggcaatactgtatggatgctgctgaacaatgtacttaacatagtcgaaaccatgcttaggttctgtgatgttgtaggctagttctgttcaagattatacgtgtaatttagccatatcaaaacaataaaataagctatcttatagtgaaatttgtgcctaaaaattaaatattaaatatttcaaaaattaggataaagatccaaaagaagatgagtagaaaaataaaagccttactagctccaaggatccgaagctcctcttttttatcagcagataaactgttattagccaatctcagactaagacttataatctctaacgcatctgaaaatctttgcaaggt

SEQ ID NO: 228149 - DNA, 1412 bp, Cannabis indica
gatccctctactactagaacgtatgtattttaaactattgaattctgctgtatgtaactctctaatatcttgttttaacttaaaactgaatttcttgtgttttttcaggcatggtggtactggtcttggactctgcattgtaaggactttggtgagttttatgtctaattctacttagaaatgtattcattttcatggattgttaaattgtaagattagatatgggaatgaacatttagaaagtagaccaatcttgaaacggatatagcacctgaatatacaaaggaatgaaactgtacatagtgtagaatggagtaatgaatttctttctcgaaactaattggtaataagtagagtaactcggtttgttaatattaacacttttgttgttgttaacaggtcaataaaatgggtggtgaaatcaaggttgtaaagaaaaacagtcctggaactctaatgcagctttacttagttctcaatacaccagcagatagcattgaacaacattgtcaaatcgattttgccaaacatggcttggtggttagtaacttagtttaattgcctttttccattaggctaatctttactcatcagcttaattagattgagaatgtgttgttttttaacttgaacttcaggtgttgcttgcactaaatggaagcatgggaagattgatcatgtcacaatggttgagaaaaaatggagtgttcaacatagaagtatctgattggaatgaactcacacaaattctcaaggaactttttcaaggaagtaactcagttcgaaataaaggtttcgaaacacagttttcgctgaatgataacttgagagctgagttgcttaatgtttatgaaatgagaaatccatattttcttatggttgtggacatagctgttcttgatttgagcactgatatatggaaagaacagcttaactttcttgataagtaccatggtaaggccaaattcgcttggatgctaaatcatgacacatcaaacccgattaagatggagctaaggagaaaaggtcatgtgttaatggttaacaaacctctttacaaggcgaaaatggttcagattcttgaggctgttataaaggagaaaaatcttgagcagcatcagcatcagaagagaagtagtagcacaagtgttatgagaagtaataacgggaaagaaggcgatttgcacgagtgtcttgagattgattcaactcagtttgagagtgctagtagtgatgaatctgatatctctgatttgggtcaatctacatttcaaatggaagaaaatcaaagggagaaaatgactaaacttcaatcttctaaataccaaggtgttaaaaattgcttagttgaattaactcatgtgtaccaagatgaaaacaacatgagaaagaaagatcatcatcatcaacat

SEQ ID NO: 228150 - DNA, 554 bp, Cannabis indica
tttattattcatctctatctatagactatatatacatacactcaattaaatctggtagcattaccagatcatgaaaaactgattggcaagcatcttcagatccttttctcatccaatggcaatcaatccaagctcaccactgcctcccagcattttgtccccttcagacttagccgttatcagaacgagcagctcctaaaagattttacagcccaagatcaagatgcatgtgtctacttctttgaattttgtctcaaattagtgcaattgagcgcccgggtatagacaaccttcctcgctttttctatgagcatcattaggataccgtcggtcatgatcatgttactcaggtctgtatacatgttcttaatcttaagcaccacatggactgtaataccatcaacaagaccttgatttgccaagcctactcgcgtctcagattaccacccaataaaccattgcaacgtaagctatataaataaatattgacctcatttttaatcaaccatgctgaatcaattaaagtgattagaaaaataaataattatgaataa

SEQ ID NO: 228151 - DNA, 1906 bp, Cannabis indica
aatattttctttttgttttcagttctctagaggttgtgatggaccttctctgcatcgccaaatacaggtggtattgtagtgggatctacattaaggcctacaatagccatggcttgtttcatagctataaaggcttcttgcattctcctattcatttctttttgttttgtcaactcaacatcatacttattagcttgtcgcctgaacgacacaagcttagggtattcatcctcctcgtagcttgaaaggtcatcattatcccttgagtactcatggtcattggtgtcactctctttgccttctatttaagaggttactttttcatctggatgcccttgactgccgtagtggttggggaggtcgttggttattctttgttgtcaccattgcgacaagaggtttatttttggcgaaagcttcctacaactctcaatgaaagtaccagaatgttgatcgagattttcagtaacttcttaatcttgtttaagggaaattaattaagggtagagaagagtattttacgtagttcaaaagttaattaaccatagtctgtgagtcacttttattgatgagtaatattgttattacttgagagtatattctcttttacagtttcagagttctctttttgtctctaaaattttcgatctcctttcctttacatatcccctttatttatgggcaagattatgaaacattcttcggtgatttttgcatattccctttacctctaggctatgtatggccttttttgtaggtgtaggagatgatatttgctatgtgtgtacaagataagctttgaagtagaagtttggtctgacaagacctatcttctatgcgactgatggggacaacacaaaaattcaactttccccactatttcataagccttgttctcaactgtctcacgatggtcacatcccaattcaatctcaatggtaacatctctggtaaagtcacgcctacatcgtcaaggtgacactctctctacttacatcattttaatgtgttcagaaggcttttcctcccttatccgtcaacaagaaagaagacaggctctcattggctacaaagttgccaagaccgcacttgcaaactcacatcttttcttcgtggacgatagcatactctttggtcatgcttctattaattcctacaatgccaccaaggaggttctccatctttatgagaaagccacggggcaacaagtgagcctccaaaaatcttctctctatttttccccaaacacgactatcagggatcaaaacctcatctcaaattacatgggtatccaagtcagagctacctttaaaaatatctggggctccctcaatattttggccgtttgaagaagaaagtttttcattatctcaaagataagatttggaatcacctaaacaactggaagcacaaggttttttcgaaaggtggcaaggaagttttactcaaatcggttatccaagccattgctacttacactatggcttgcttttgtctcccgatagctacttgtcattcattggagtccatcatggctaacttttggtgaggtttcaatgccaataacagacccacaatccattggcaaagttggcataagctctataagtctaaaagagatggtgtattaggcttttgttcgcttgtccactttaactaagctatgcctgctaagcaatcttggtgaatccttaagcatccaaactcacttgtggctagagtttttgtagccagataccaccctcgatcctcttttatcaaatgttcccttggccactccccctcttttatttggcgaagaattcaatggggaaacgaattgttgtacagaggccttatcatgaaaattggtaatggtaagaacacttctccaactcatgattgttggattccctctttcaaccaa

SEQ ID NO: 228152 - DNA, 2159 bp, Cannabis indica
ggagcagcaagttagacttatcaaacccttcacaatagaggatgttaagaaagtaatgttcagtatcccctctactaaaagtcccggcttggatggttttggctctggattctttaaagacatgaggagtgagataggtaataaaatttctagagttgttcttgatttctttgccaatggttacatgcctaaggatctgaatgaaactgtcatatccttaatcccaaaagttactgatccgaggacgacgaaagattatagacccatagcctgttgcaacacaatatataagtgtatctctaaattgatttgttctaagctctcagaagttcttcctattcttgtccaaggtaactaagatgctttcgtcaagaatagacttctagctcataatatcatgatctttcaggatctcttgaaggggtatacaagaaagaacatatcagcgagatgcatcatgaagatagatcttagcaaagcatatgatactgttgactgacaatttgttgaagatctgctgagaaagctttgtttttctactagattcatcaattggattatgacatgcctaaagggaactcattaccatattttgatgaatggtaggattcaaggcaatttcaagaagggaaaaggtctccgacaaggagatcccatgtctcctcttctctttgttttgatgatggagtacctttccatgcttcttagctttcactcaagctcgggagactttggatctactcctttgtccaaaaacctccgattgactaatctttatattttgcagatgatctcgtattatttagcaaaggcaacttgaattcgatgagaataattcaggaagccttttctaaattttgtaatgctactgggttatctgcaaataaagctaagtcccagatcttctttggcgaagtcaaagatgttgtggaaagacaaattctcgacttggttcaaatggaggagggttcttttcctctaaagtatctaggggtgaatcttccttcaacaaaatggaaggcttcggattgtggcgtgatccttgataaaataaacaagaatctcaattgttggactagtagaaatctgtcttttgctggaagaaatcaattgatccactcggtgttgcttggtataagaaattactggatcagtatcttcttaatccctcaaaagataactgttgccatagacaagagttgtcgtgacttcttatggggtaagaaggggaagataagcaagttgcatctagcttcatgggaaaaagtttgccttcccaaaaagtttggtggaaaaggctttcgagaaggaaagaaatggaacaaggctttgatgaccaatttctttgggctatatctagcaagcaggataatctttgggtactcaatcaacctggaaggtcaatccatccggaactatccctccaaacctgaaacaagctggtattttaagaaattactgaatcttagggtggctacaagtgattatcagctgacctttgctgtcaaaggtaggaaattcagtgctacaagattctataaccagctggtgatagagaatagagttgattatgctggctgggtttgggacagacttgtgattccaaaacacagttttgtctattggcaacttctcaacttgcggcttctaacccgagacaagctgattagaatcatgccgatttatgacatcaggtgtctcgtttgtgagttgaaggaagaatcgcatgaccatgttttgtttgattgcttgtttgcaaaactggtgagtaatcatatattatgctcttggcttggtcaagttacttggccaacatccatttctgatctttgtaacaggtgttccttggctcggcatgacatccaaaacagagtgatcaatgcagtggctgctaccactttctatctcatttggcaaaatagaaataactgtctttttaacttgttttgttctttcccaagcaggattagctaggatgtgaagaaaatgataaagtttagaattttatgtttgggccccttcattagcagtagaaagaacagttatttcattgatgtaatattaaactggtagttggtctaggtgtgccgttattgttgttgctcggcttgtttggttggggcaatttttgcctcaatcttgtttcgttttttgaataa

SEQ ID NO: 228153 - DNA, 1776 bp, Cannabis indica
atgataccaattattagcaggattaggcaaaaaacagaaatggaaatgccaaccactagaggtattctatttggtgagttaggttctacaaaaagtacaataaacaaataatggaaactatataaccataaaaagagcaaagaaaaacttgttttaaactcaatatattgcattctttattttcacatttatcaccttcacaatgggatttggaacctggaaattgtagaaaacaaatccatgttcaataaagggcattcctataaaaaccatagaataaatctgactatgaattcacaatatatttatgatagataaataacttacttggacacactgaaatagcggatacgagaataccataatatcctctcttaggaacacaagtggttccttttccagcccaatagaaacgaatttccatgatattatcagtcacattgacattaaaatagtcttggagaacaactttactaccacttcttgtagcttcctcatgtatattaaaatccactaacattttctttccctaaaaaaacaaagagaagcaatcaagaaagcaaagtcagtactattgttttacaatcagaatagtaatctatatattcaaattacatctacccatttaagaaaattaggtaccgaacaaatatatatttgttacataagtatttttcttagggagtaaaaataacttacttgaatatatatatcaaatatgcgacggccaacaacattgtcaaactcaagctctgcaaaatgtagttttacagtgtacattccattttgcagacatccaaagtaagtgagggacaagggtgattttcgagctgtaatatataaatccccactatccttaaacagattgttgtcatcgtgtacaacatgattatttatcttatcattgtcatccatagcatctcctatgctgctaaatccccaagtttttgttatacttttactcactgctgaattgtagccatcaaactcatcaccttcatatgtgagactcccattgacattcttcacagtcacttgtggtccaccacaatttatatgcagggaagattgatctgtcatgtttagttaaaacacttttatatattataataatttttttaaaagaaataagtgtattataattagagattataactaactaggtatattggtatatatgtaggaacattttaacacaccaataacaataaaaactctatcatagtaacaagaatatcagttaggacttattctattagtttagtgcagagtgtttagttagttctttctgttttatacttccgttatttcagttgtttgttggctgtcataacaacctttggttgttgttctgctattaggttttactgcctataaaggcctgattgtattttctcattatctcattcagacaattcaaagaaaacaacatatggcttttctcatttccgcaacatggtatcagagcaaggaggttatgcttccttccgatcttgattgcccttgtcgttccttctcgccgtgttcttcttctccttctccggcgacgatcagtgtctgcattgaagaattcatctcttcatcgacacaggttttctctcaacatttctctttctgtaattactctgatttcctttacttcgtcttccttttcttgctgttatggcgacaaatgaacaagaagcagggtcagtcgaaggagattcatcccaagtcaacaatggaggaaatcaaaatcaaaccacaaacactcgtttcaatgttcagatgacaaga

SEQ ID NO: 228154 - DNA, 2348 bp, Cannabis indica
attattattattattattattattattattattattatatttagaattaattatcttccttaacacacccacccactagggtctctgtgtttaaaaaaccataaccatcacattcctttccattctagtagggccgacactgagagtaggtgagttaagcgtgtgctttgggcccccgaacactcaggatcctgaaattatgaaaaaaataatattaatatatagataaaatattaaataagaagaaaacataacaaacattatttggtgtagtgttaaagggaattactttaagtcaagaggtcaagggttgaatttccaacctagacttttctattctttttttaaatatttaatgtgtagttatgaaggattgaaccttggagctattaagagtttttaaaagatttaccattacactaaagcactagaactatcattttgataatgattaaactatatataggggtcccaaaattttattttgtcttaggccccatatatcttaggactggccctgcatgatttgaatgtagcaatactttaaggctataagtagttttgtgttatagctagtctcattataaactttagttgtttttggtattcttagttgttgtttgtctctgtctagtgttgtttgtgttgttccttttcttagtgtcatataagcttttattagtttagcggcaggtcatttacttgtgcacaaacggtacagtttaggtattacatatatatagaataattagtatttttgtcaatgaactttctgattctaccttaaaatatacggttggttaaaatttctcctgaaatataatagatatataattatgccccttatactaagttttgtttcttttaccgttaaaaattagcatttttaccttctgaccaatataaaattttgcattcttttattaaaaaaaaaacaactttaaaaattataatgttttattaattctaaaataaaaaatataaattattaaaaaacctgataaaagtatttaattaattataaaaatattaagtttacttaaaaaattttgaggggtacgatttgatagttgtcaaagtttaaaaggaaaaattgctaatttacaaaaatacgtcagtatttaaacaaaatgatgagacacaacctaatagaatgactaaatttctataaatgtaaaagttcagggggaatttttaacaagtcgtatattctaggggacataatcgtttttgtcgaaagttcagagggaaaaattgctaattattcttatatatataattgttatccatgtttctagatggagaacacgtgtaatttcgagatggttttagctcagtttcttcaggcccaatcgtaggcccaaccaagataatggattgacaccactacaaaattagcctttagaggcagttattttaactgagtaatataaaaagggtagccaaagaattttggtctcatgaaaaagcctatggagtcggtttttatgaaataaccgactccatagaggacacgtgtaattttgaagggcctacggagtcagttattatgtaataactgactccataggggacacgtgtatgtgtacccctatggagtcggttattacataataaccgactctatagggccttaaaatcccttcaaccaaccctaatgaatcacttcgtctcctccaacatccatctcctgccaaaatacccaatcgaaaccctcaccaaccattgccgattcagccctaaattcccatttctccaccattttttttccaaaatttatcattttcaacacccaaaaagatattactggtattataataacaatatttagtcttataagtgcaaagtgagtgtgttggtgcggttgtgttggttgtagctccgacgatcgaatttgacataaaaatattgaatcttaacgtttattaaggtaaaattttgatctttaataattttattgaggtacaatgcattatttttggtttagtaaattttattagggtttttcttgttaagcttgtgagttctttgggggttgcggtggtggccgaagtttttattggtattggtggcagatttcggtaataaggtaaaaatttaatctttgatagttttatttataaatttttttggattggaatgatttttgtattagtgattgtgtttgtgttatactaatagttttgttacaaatttattattttcctttgatattaatatattaaatattgtgattgaaagatgaaaagtgaaattgagaatgagataggagagtattgaaacaaattttagaaattaggttttaaaaaatatgttagtgggatataatctattataaatgcatgggt

SEQ ID NO: 228155 - DNA, 785 bp, Cannabis indica
ctaaaatacctctcgaaaatagatattttttctctatttttgtggcctattatggcccaattcgtggtttgtcttactgtccacgtataaaacatgcacaccaaaatcctgttaagtcaaaggctggtcagccatgcacctgtagagtgcatgttggcaagccatgagatgttcagaagctagacggcctatgctggccatagcgcggccaagggtgatcggccaacccctttgaggtagctggtaattcgtcacttcgtcatcccgcctgagtactaggacccctcgttggttgaagtgctgagtagatagcttaacctattgttggaaagctgtactgctacttcaggtgactaaaaataggataacatactccttatatgtttcgacatttgaaaagaaaaattagtttaatttttttttcatgtttgtctatgttgtagttatttaggacattctgtaaaattttaagaaatttaaaaaaatttaacacattgaaaatagggttcaaacaatctatttcacatgctataaaataaaagagtcttgcatctgtttaaatcatgtttttctcgtgttaaattttcctaaatcatttaaaattttgtaacatatcttaaataattagaacgtagacgattatgaaaaaattaaactaaaaaaatatgttaaatatcgaaatagataagggtacatcaaaccttttataagtggctacatttgtagaagtttccgatattatatattgctattttttatttttttaaagacccttaatatggcaa

SEQ ID NO: 228156 - DNA, 1879 bp, Cannabis indica
tttgacaggatcacttccaatggcagagagcttttccccctgtcattggagttggtagactattggcaaattggagcttggccctgcacagaacatcagtaagatatttggtttgagagaggtgtaaaccagtagcagtatgagtcacttggatgccaagaaagtagttgatatcacccaaatctttaagagcaaagatggagttaagttgagagatgacagtggctatttcagtggaatcattccctgttataagaatgtcatccacatacaccaaaagaaaagtggtgtgttgaggaagaattcgaataaagagagatgtgtcagctcttgaactttgaaatccaaatcgatgtagtgtctgcttgagttggtcaaaccaggctctaggagcctgctttagaccgtatattgctttatgaagcttgcaaactaaggacttatctgtgtcttcaaaaccaggaggctgctgcatatagaattcttcatgtaaagtgccattgagaaagggattattaatgtctagttgtttgattggccactggtgagagagagcaatggtgagaacaattcgaattgtgggtgattttacaactggactgaaagtctcctgaaagtcaagaccatattcttggtgaaaacctttggccactaacatggccttgagcttggaaactgatccatctgtgttttctttgactcgtagaacccatctgcaaccaattactttcttaccaggaggaagtctaacaagtgtccaagttttattctttttgagggccacaacctcagtacccatagcggcattccatttggggtcagctagagaatctgcaagtgtgagaggttctttggaacttatgtaaacctttggtttatagatacctgcttttgctctagttgtcatgggatgaacattggtagtagaaggaggaacagagggagcagatataggtgaagacaggggacatgatgaggacaagggtgaagaatcagagagagaagtggtggtggtaggaaggggaggtgcagggggatgaaaaactgtaggttgaagaggaacagggacagaagtgtgagactgagaactggggttggaatgaacaggtggaatggattgagtgagtttagcataagggaattggtacttattaaaaagaacatctcgagagataaaaattctaccagaggcagattgacacttgtagcctttatgtttcaagctatagccaaggaatgtacattcctcagatcgaaaggcaagtttgtgtctgttgtatgggcgagtgttaggatagcatgagcaaccaaatacccgtagctgagagtagtcaggttcaattttgaataatttatgaagaggtgtatcccctttgagaacagaggagggaagacgattaattaggaaagctgaggctctcacagcttcatcccagaaggacaaaggaagggatgcatgagcaagtaaagtaagggcagtctcaatgagatgcctgtgttttctctctgccacaccattctgttcatgagtggtagggcaagagagcctatgatgtatgccatgctcagtgagatatggagagaatgcttgaaactctcctccctagtcagattggagcattttgatgggtagattgaactctttttcaaccagatttttaaagttaatgattgtctgaatggcatcagacttgtttttgagaagataaacccatgtaaacctggaaaaggcatctgtaaaatgcacatagtagtaataaccatttgaggaaatcattggggagggaccccatagatcagaatgtattaattgcaagggtttagtatattcagtagtggatctaggaaaaggtagtttgtgtattttgcctagacagca

SEQ ID NO: 228157 - DNA, 1010 bp, Cannabis indica
gcaatggcccaaacgtacttgaacatagctgccatattccaatctgaaatgcttctaaaacccaaacctcctgaaaatttagtgaagcaaattgtgctccaggcaattactgttgaacctgtaagtatatgatttccattcctcaagaaactatgacaaatagattctatttccaacacaatcttctttggcaaaagcatgacttgacaccagtaggaatgaatggccatcaacattgagttgatgagcaccactctccctgaaaaagacaagtttcgggtactccaacttcttattcttgccaccattttttcaactaaggtaccacactctgctgttgagattctcgtaggacatattggaacacctaagtacttgaaaggtaaatcgtgtttcttgaatcacgaagcatcaagaactctttgaaccttatagtcactcatattattgcaataaaagacagttttagatgggttaggaaataaacctgaagtttgtgaaaataatttgagccttggagcatgaggtagatgcttttggaatttccattgcaaaagagtagtacatcatccgcaaaggtcaaatgatttagcttcaagtcaccacatcatgaaacataaagtcttacctcttcctaattttctgcatgatgcgggagagatattccatgcctaagacagaaagaagcggagacatcagatctccttgtctcaaccctctcttggattcaaaaaatccatgtaaatagccattaaacatcaaagagaactgaggaattctcacacaagtcataatcaacttaataaattttggagggaactgaaaagcgtaaagcatctcttcaataaaatctcattcatgaatagtttcatatgcgttttggacgtccaatttgagcatacagtttgcttttctaaacttccttccatagtgtcggataagcttttggcaaatcataatgttgtgaccaataaatctaccttgaacaaatcttccttaattttgagcaa

SEQ ID NO: 228158 - DNA, 2398 bp, Cannabis indica
ctgaggtggcatgaatacatgtatattgtggttgatttgtgaggaagtctctagaaaattcctagggtacatgcgaaattaatttttatgaaagatgtttttgtggaaaagggggagaatataacctagcctccattacaccatttaaggtggaagacaattcttgacaaccattattcaaagaaactcaaaaggatgatgaagaagaaaaggatgaaatggaggagaagtacaaaaaaggaaagagattgagattaggataatagaataggacaccagggatgtatagtagttcacccccatgtcgcgatgttaatggggctacgtctacttatttttattaattgatttcaacacaccagagttatgttctcaggagtgtgtggataatagtacaaaaagagatttttagacgaaatttatatcaaagattatgaataaaaggctcatgggagaaccaatacccataaacttgataacatgggtggttgtaatattctttggaacaataaattgatgaagacaagaacagagaatggtctcttcttcttggtaaatgagtgtgtcaagggtgataggataatggaggcttgctgtcgtaccactatgaagaacatcaagaaaaagatgaagagagaaaaagctttcaagggatgaagtgataatgtggccaagtaaattagaagtgtaggaagcaatgtggaaatctagaaagtgcttcaaggtctagaatgtgatccccaaaccctagcctattattatctatatattggcctaggatttattattgatcccccataagtcagggcatctcacttaaaattctatatcctttttacaaaataatgaataaataaaaatctaggaaaatatgtcataggcaaatatcccacaattattgggatagttattgaagttggttatttcctttgtctcttgaacttgcttatgtggcattgtattttggaataaaaaattggagataagtgaccatggaatggcacacctcggataaggaaagtggagagttacaagtgttgtgacatagctctcctaacaacccttgtggtctacacttagcaaaactaattaattttcgagtaaagtataccagcctgtcttgtagcccaattttgagctcgataactttagaattgttctattaccagacacacttagatctttcttgaaaatatctttcaaataaaagttgaaccaagtcatttggataaagattgagagagttatacctgtttcactaaagggttgtaaggacatttcagctccaaattcacatgcgccatgtcattacgagctgtgccacctcattatggcgcaggtcttcctgcatgttctcagtcacctcagggcgtgttttgattttttttttatggtgaatcatattttggggatttcaggatcccaaaatctcatctcgacgtctaaaaccctaacgggagacttgcaccatcttttggtaggcaaggacttatgagaatcctttgatggtgtttcttgcttagtttagtcatatgtattctagaaaaatactttggtcacattagttcttggccaattagtgagagagatccgtgccatcttttgggtcgcaaagatggcacaggttggccatctagacctcttgacttttcttacttatttttggtaccttgatgttagaaatatactttggccaaggaaactcttcccaatttgatgtgttcgacctgtgccacttgtttgtacacaaagatagcacaggtagactatcttgattattcagtaaaaaatggtttctttcacttattttatactccttggtgttgagggaccacatttagacaagtttcctttggtggtttgagagtagagacatgtgccatcattttatgccaaaaaatggcatagatcgaccatgcattgtggagtggcctctttgtgcaatcttgactttatgttcaagttatagcctttttatacctaaataagtcaagtccttgttggtttccttgttagattgaaatctctaggatgaaaaccgttgcgcgggcacataaaccttaagttaggcacacttgggtgtagatcctggcaccaaatgattggttagtattctcataagtttcctagaggtgccatgggaccctcaaataggatatcttaacttattcgaccttcgtaagtcttgatcaaaatcacaggattgacttgagtgtcttcaagggttaaggtccaggtctagggtctgtgattggggctgagtgtggggccgtgatccggtccctaacctcatgccctttgtaattattataatacaagataacatacatcatttgttatgtattaaataatatattcacattgcattaatatttatagtcgtaataattaatacaat

SEQ ID NO: 228159 - DNA, 1074 bp, Cannabis indica
aacctaatcgttaaatttaactagaatattcttttattttgaagtatattctgttaaaccaagaaatggcgttagatagacacttttaatatataaagatatataaatatatatattaatatatatatatatatgcaatgatatattaagatatagtaaacaagtactagaactataatattcctaagcacaatacattttcaaaagcgataatacacatttcttttgctcaaacaaacacaaacacattattatcagtaaaaacacaatcaactatacaaaacaaattacaaaacacataaaaaaagaatgagttgcaaaacacacaatgttcttattaaactcttaaaactttttgaaaccataacataacatggggatatctcccaaaatgataatacatgaaacaaacttaaaaataaaacaagacaaaactaacacgtttcttattaaaaaaaggactttaaaaggtgactaacacaaatactttcaaaacatgtactttattttgataaaatagtccacaaacttgttccacaaatactcttcgaaaaaccaaaagtaagcacgcctccaaaatccgcataccactaacggaacaatgacacccacaaagctcactccaaaccccattcctatgcccaatcgaaaccaatattcatcgtcttccctttgtccatcttcattacttgcatttgaatgcgttgtgttaggatcttcaatacactttttgaggagcggcggtccacacaatttgtttcccataaagctagaagcatccatgctttgcagttgcgtgcctttggtttttccagacaagttgttgtacgacaagttcaagtgactcaaaaatgataaacttgacaaacttgtaggaatgtgaccagacaaatgattccttgagagatcaagagattctaggtaggtcatactgtcaatctttttaggaatgctcccactcaaataatttcccgacaaattcaatgattgcaacgcatcgagacttgtaagttgttctggaatttctcctgataatttgttgctagatagatcaaaggtacttaagaggtataa

SEQ ID NO: 228160 - DNA, 1789 bp, Cannabis indica
aaaatatattttttatttttatgttttatttacaattagtttaaattagcaagtcaattacatacacagattttatattgttcacgacataaatattagatcaaaaaattagtaagtcaattacatataaatttattaagaaaaatgctaataaactaggcgttcaatttacatataattttattatctaatttgactaagtataatcttaaattagactacaaaaataataactaatattagtcacattttaaacaatgcactccataatttgactaagtataatcttaaattagactacaaaattgttttggttggactaccaaattactaatttcttagtaatgtttataactgtattgctatttctttttaaagaaaaatatatattaacacaataaatcatgtttcccaatttacttatttttagattagtgaaatgttaataaatttcaactcaagaattcaaactacgtgacatggttgcttggctttgcaagatttaaaaattaagcataagtgaaataaaaaactaataacaaatataacggtataaaaacgtaagtcaaactaacatacgtaacatagttaaaacgtaaataaaactaaaatttaattacaaaaataacggtataaaatcgtaagtcaaaccgaaaattaataacttataatagttacaaagaaaaaacacaagattcatgatgtataaggatttaagaattcaaatttggacatttcaattatatttattttgtaatttgtaattgtaactttaattggattataaactagatatgtatgaacttacttctctttttcaacctaatgttaatttctatttcaaagtacacgttggaagaattcttagccgttagtcatacattaaattaaatgaaataatttaaacaaataaaaataaaaaatcctaaaggataggatagaatttatttttcaaaagtagatgtggaaagttttatttatttatttgaaatcacgtggaaagttaatttgaaaaataggatcttttttcaaggtttgaaaaatcatcgagaataataggttagaatttatttttgaataatttgtggtataaatatttaaatttaactcccgttataaataaatacttaaatttaatttttaacggtaataatactcaatttagtgttgagtaaattaccacgtgtcaatctttaattggtcaaagtcgttaaatttttatttttttaaaaaataatttaaatatactaataaaaactaacacgtagataatgatttaatatttaacatgtatattagaaatataatttaagtattattacccaaaaattaaacttagatatttatttacaatagaaattaattttaggtatttatgttgcaaattactctatatttttcaaagtaaaaatagaaaagttaaattaaaaaaaaagtaaggattttttttcattattgatgtgtcccttttattttttaaattttttattatttctttttttatttttccgatgtaatattaatgtgattttaaatttaaatctaatgcaaattcaaaaaaagaatccgtttattttctcttgtaagagtttcaaaagctaatatatgaagaagaaaactagattgtataccaaactttattttattatgtttttaatttttattttttatttttcattatttttaaaaattatatcaacttttataaaatgatgtctccattatagctcataagttaatataaattatgaaaaaatatggatccaactcaaaaaaaaaaaaaataagt

SEQ ID NO: 228161 - DNA, 3306 bp, Cannabis indica
actcccagtaatgtttgaagaaagaactgacattccatccggccccggtgccttatgactgttcatggcaaacaaagtattcttgatttcctccctcgaagggcacagaagggtcccctcttggtcatctatagacagcctctcctggaatagctgtctacaatccaggctctggtcaagatctgagccttcaaatatactttggaagaaatttgtgaattcgagtccaatagattctctatctgtaagccagacattatttttgctcaaaatactttcaatggcgtttctccttcctcttattgcagccgagaggaaaaagaactttgaacatcgatcaccctccttgagccaagtgattctggcacgttgcttccaataaagcgctttcctggttaacatttcattcagcgatctgcgcatttcactctcctgggtccactcccgagcacccactgggagtctctggagtctatccagtttctgctccaggtctttaataacccaatcaattcttccatactgcaccctattccacttcaaaagagcaaccctagtagctcccagctttttgaacatccgggcaggagcccaagagtggttcactgaatcccaagcattggtaactatcaatttactcctatcatccctcgtccaaccctcttcaaatttgaaacttctcttagagcttggaggattaccactagtattcagaaaaagaggacgatgatccgaattgctagtatgggaggaacagataattgctttcggaaacagatggagccacgcttcattcacaatccctttatcaagtgccgatttcacatgatgacccccagatctatggttgtcccacgtcatcttatcaccctggacgtgcaggttaatcaatcctctcatatctaccaggttggaaatgaaagggataaacgggtcccttccggaggaaccttctctttcagagtcgctaaaaacaaaattggtgtctcctaaaatcaaccaaggaccccaaacctgtccccaatggccatgatgtcggaccaaaactttttctttgcatagaggtaaggggggccatacacacacgagagaagccacggattggaggggggatccgagtacacaattccagaaatatgatttcgggtacaagaaatacattcaaaactaaaaccaactttccaagccaaaataatacctcccgcaattccaatagaaggcacacagatattaaagtaaaagtggagggatctaagaatacgtaccagaggagtcgcatccacttttagctcagacagaaaaacaaaatcgggagagcgcgctctaatcagggacttcagttcacgaactgtagaggtctgccctaaccccctacagttccacgcgatccctctcatggctcctgtggaggagcaatgacaatctcctccacagggtttggcgagtacacagacccgctggattctgcctcatcaattacaaaggagccaatcagcagattcttcatgataccttcattgtagctcggggaatcggaagattcctcagacggttcatcataaatcaccttagattctcggtccttctctttagtgtcccacggaaagtctcgaaccacatcaaggtgggttctaataatcttgtgaggtctagtacataaagaagctgagccttcaaatttccttttcttaaaaggagtagttctttcattgatatccgaggaggtcggcacaccaatgtcccctccaatactcttaatctcatacaaatcaagcttaccaaaatgtttcaggtcatgaagcaactcctcttgagcatggaaaaaatgagccaaagcattctcttcattaaaagggggatcgaccgaactcccaacacccagagcaagtggattctcttcattgatcaaaacccttcctttctcattacaagagtaatccccctcacggttattatctttcaacagagtgggtccagaaagaaagcctccatataaatgtttgttctttataagtatctatgtgcttattattatttggtatccatagaaatgtggaaatttttatttgtcaaatatatatatgaagcaatttaaattttgcgatgttattttttaaaaaaagattagatgaattattgaatattaatatctgtaaagataacttttttaatacatgatagatagtcagaccactaaacagtactaagaatagaagttatgacatatttggttaacaaatatgcaaccacttgaatagatcgaggcaatacaaagaaaaaaaactcctaaactatttttagtaaattattaacattttggaaatattgtatttttttttttgtataattatataattattattttttaattattttaattatttactggattggacgatttatatatatttttctaaaaattatgctttttttgtatgtggttagttttccttaaaaaagaacattataattactcttatttatttatttatttatctatttaaataagatattttttaataatttattttcaactattttattttcgaattttacaactaaatattttattttaaatttttgaataggattatttttgattataaaaaaaaattctaatcattatttgtacactcagttacatataaaaaaaatacataaaaatagaaaacaactatttcagtatttttttccttctaaaaactttaaataaaaacaaaacttaaaatttaaaataatatgaatcttagtcctctatatggtaaaatatcataatcaatctatacttttcttttttaaaaaaaaaaaagaaaaatttcatatagttttagaagtaaaatatgtatattcaactaacgtttttttggtaaaaatatattcataaataatgttatgaaaaaaacttcatttattctaaaaaatttcggtaataatatgttctcatttattaaaaaaaaataactttttgcctatcttttatatcttgatcttttggcttgatgcattttaatagagtttctctgtttactttaaaaaaaaaaaaaaaagaaatagaatgtccttattatattttagcagaagtgaatttttcgattggaagttggtaaaaaaaaaaaacttttaaaactataaatcctatattttgtgactaatatacattataaatgtaaatatattttattagccatatctctaaattttttaggttttagtcacattgaaatatgtaattataattgttataaagagttccaattaaaaaaaaaaattgttatacaaagagtatatcatattaaaatgtataat

SEQ ID NO: 228162 - DNA, 3715 bp, Cannabis indica
ccaagcaaatcaaccccaattcaaaccaaactttccaaacctgctatatagaccacaatgaacatattccaagcgacaaaacaatcatccactcacagaaacgaatttcaccattaaagcctcaagattgagttcaaaaactcaaaacttgactaacctttcaaacaacctataattaatgcataaatcaacatattagcccatatctaaacctcagaacacaacaacaactaactacagcagctacagcaacaaaacatcaaagcatgcaaaattttcatttcttacaacttaaggaaattaagagaaagctacaagaagcttaccaagaacttgggatcactaattccttgctaaaaccagcttgaaaatcacaaagaaacccccacaccctagctgctctaggccgaaagagagaaagagagagacttgagagaaaatgcaagtgtttgtctaacttttgatttttcaacaaagtgagaaagaattggttttcttgcttaataatcagcatataacttaactaaaatcagattaataaacttaaaataaaatccacaaaagacaaatctcatttaggcaaaatgactattttgcccttccaacactaacaaattataaaatggtactaagggagtaatttgggaaattctaaattcccgaccaatcccgacattcccaatgtctaattataccgccccgctatactaaaatattaagatgtaattctactgagccgtacaccgcgttccaatgttgtcgggcactaaacatgcaatatatgaaatttctatatttgacatataaaatgcattctgaattcaagtaaatcatcataaataattatttaaatatcaataaataattttcataattaaaccctaattatctgctaatttccaaatttaaactaagcggtttttacaccagttctctctctctctctctctcagatatctctctccatttctcactctaacttctctctctattgtgttgcgtctctctcttgtgtttgacttgtattccccttttttcacacttattatgaaatgagaggagtagttctctttatataggccaagggacccaatatgcaagttgtcctttttgatagttaagttagttaaagactaactagctaactaaccgaatcttggttgggggttaaagaataataccacaaattccaccttatttcttcaagcctcaacaagctaagcatatctgtccaatagaggtggtaatgctttcatgtgtagctacttagcaactaaggttgagtaagtcttagcaatgcctaaacttactaagaggtaacaccttagtgctaatatcagcagggttgagtaagtcttagcaatgcctaaacattaatgccatttaacatttgtctgtatgacacagacccgcgtgttacgctcacacgcctatttatgtctatgtggcatagacctacgtgttacgctcacatgtctaaatacagtaaggccttagaacggttcatctcagttctagttaccgagtccaacccgattatgccttgaacacataaccctaaatctcaatacacacatatatttaacatgacatagtatttacacattaattatcactaggataatccctatgccattaaaccgctcatgttagggtaataaccctaatcccagtttctaattactcacatatatcatttttaatataagcgccaccgcgcataactctacgtgctaactactgtcttacctaatgtcccacaaataaggagattctaaatcctcgggtgctcctgaccgagtgctagtaatcttagtcacaatttctaagattcagaagtatagggttaatacctaaatccactttcacataaaataaaattggcattcaaaatatagataaacatatagagctcaaaacttgctttccaacgatataaagaacatctcaaacggagtctcgagtcaaaagttatgaacaaaacaagttaaacatgcaatctgtgtccacgcgagcgggccgcggcgcctgggttgaaaacccagaaactccattccagtagctcaaaaaatgcatcaaaactcacccaaactgaacccgaacatgcatatatctcaaaatcatttctcatataatataactaacataacagaaagctaatacacacatttaaagctctaatccaccacaaacatgcttcaaaattcaaatttaaccaatattacaaatgagcttaacacttaagcaaaaatcatcatattctcatccaaaatagttgcacatcaagatctcaaagacaaattcagaacttagcatgctttccaataaactcaaatcaatttcaccaactaagaaatcttaaattcacaatctaaagtatacacaaagcattatcaactaactcaaaacataactatgcctacaacaccataaacaacccaaatctcacaagcatgcaattcaaggtcatttgaagctcaaaatcataatattcaacttcaatttcagcaacaattaaagacaaaaagagataaagactacctcaagatctcaaattcacacaagctccaaagattgccacaaatcaagcttgaacccaagctatttctcaataatttcaacaaaacataaagatggattgagagagagagggtcggttttgggtgaggacaaaccagaaaatggttatcattttttgtcaaaattcctttagttgaaaaataatccaataaagcaaaagataaaatgccttcaagggccatatacacacccaagcacacatataagggcaacatggtcattctcatcacaaatattctctaacaaatttcatattattaacacatcaataaaatgccagtatataatcccaaaattgtatttcggcccgaaatacttggttgtgattataccgcaccaacttgttagaacacacctgaaaaaggacaaaataggtttattatataataatatagtccataagtacattataatataaattccacagctttacccttctcgggtcaaaattactaaaatacccctggctcaccaatggggtcttaacctgtcatttattaaattaattcagttataataaattatataattatataatatacaattaactagttagggtttgctaatccattttcttaatcttagggtattatagtgctactacggattggagttgtgatttccaactaatacaatctccattagtttaaaacacataagaggtactataccttctaatatccttgcttgatgcataatcagcatccacatatcctttcaatgttactttctctgaaactctcttgtaagtcaatccaatatctgatgtccctctcaaatatctcaacaaccatttgagtgccctccaatggtttatcccaaaatttgacgtgaacctactcaatatgcttcaagcataagcaatatcaagtcttgtgctaaccatgacatacatgagacaccccaaagccattgcatatggaatttcttccatctcttctttctctttagctgtcatagggctttctaccttggttaatacaaactgtcccccaagaggtactgaagtgctcttagaatcttgcatcttgaactttgtaaggatcttctcaatgtaattcttttgctttaaatgcatgactctatcactcttagatctatgaaaatctaaaccaagtatctgttggaaattatt

SEQ ID NO: 228163 - DNA, 1863 bp, Cannabis indica
aacataaacaactgctaatttccaaattaactaagcgggctttacaatgtagttttcacattccctcccatacataaggtaagtggcgctacgtatggtagggacctcgtatggacctaggcaaggtgggggaggccttgcgtggggcttttcgtgagtgatgtggtgaggtggtagcgagggggcgggggaccttgctcatgaggtggtagtgaggggggaccttgctcatgaggtggtagtgaggtggatacctcgcacatagaaagggtagcaagggggacctctctcatgaggtggtagcgaggtggagacctaagagggtacgagaggggacctcgcacatggggcttcatctaggtggaggtgaccttgcatcccatgcaacatacctatagttttgatcttgcatacccccttgtacccgcttctcatgattaaaggtacctccttgtatgtctacgtatatttaatttgactaaattgtggtcttagccatattaatgtggcccatctcttagcgattgagagtgctaattttctatatcaagagaggtcatgggcatgaaagatgtgttgagttgaattaaagataatgatgttcacattttggtggttgaatttgatagcttagttactattcaagctattagaagttctgttagtttcaattctatttttggcttttatattattgaatgtgagaacttactttcttgtttacataatgtttctgtatactttgtaaagcgatctgtgaaaaataaaaataacataattagggggtttcaagatgaatggaaggtccagtttaggtcacaaagtcattcgaggatgacttgtgcaattatgggtagtgttgaccattgatgttctcggtcaaactagtgtaacttctgtacatcattgagaatcatgtatcgagggggaaggtggacacccattaataaaattagggggtttttaagatgaatggaagattcagttttggtcccagggtcattcgggaataccttgtggattatgggtagtgttgaccactaatgttctcatccaaagtagtgtcacttatgtacgtagtttacaatcatgtattttgacgaaagggggagcccattaaaataattagggggttcctaaggtgaaaggttcagtttctgtcctagtgtcatttaggctgccttgtgtggttatgagtagtgttgatcactgatgttctcggtgaaagtagtgtcacttttatgtggttgagaatcatgtatctagacgtaatatgggcacccactaacaaaatcagggagtttctaagatgaatggaaggtccgaattaggtcctaaagtcattcgagaatgccttgtggggttaagggtagtgttgaccacttatgttctcagtcaaagtactatcacttttgtacatagttgagaatcatgtatcaaaacgaaagagtggaacccactaatataattagggggttcctaagatgaatggaaggtataatttcagtgttgaccattgatatactcagtcaaattattgtcacttctgtatgtggtaaagaatcacatatcttcaaacataatatgggcacaaacaaacataattagggagttcctataatgaatgaaaagttcagtttaaatctcagagtaatttaagaatgccttatgtggttatgggtaatgttgaccaaagaacttgtcaacaaaaaataaccaaacaaggaaaaaggaaaaaagtgagatttgtagtattcgtgtatgaaaagatccgcaaaacattcatctcagacaaaaacaaaaattactggaagaattgtaaaccaattcaataaaacaataccgcaaaacaagtcttttggg

SEQ ID NO: 228164 - DNA, 1357 bp, Cannabis indica
gtagcgtgccttagcattagggcgttacatcccccctctcttgtgttgaacctgttattgccctcagaaaccattgttcttttttcaagctccttggcttgtttatctgttaaatcaacatcagtagaattagcttcagcaagtacactgaaagcatttattgtttttcgtttcagctgattcctcctattctatcaccttccatcctttagtcactttcaggaagccttcctcatcagttagcttcttgtcaacgttcttccttttatcatctttaactacccatttttgcttgggtttcgagttctttctacactcaacagccatatgacccatatcagagcaattggtacaagttattggcttccattcatatttaatgcccacatgagtgttcatgccatatttattctcaaattctagtaaacctggaagcttctggtttattttaacctcaaccagaactcgagggtaattaagtatgtccctgcctttcgttgcatcatctaccatgatgggatttcccagctggcctacaattttgaacagggatttctacccccaatatttgagatccaagtcctcctgttggatccatattgggatgttcttcacgtcttccttaaaatttgtgtttagatccaatggtttcatgataactggccttctattgaagaaaatgtacccaccattcaacacagtgtcccgatcctcaatagaattaaacctgataataaagatcccataggcaagcaaactactttatcgactctatctttccagattctcttcgtaaagccctatagaataatgcaatggtgggttcggacccaaaacataacatactatagaaggcttccaaaaattaacttcctcttctatatcctctagctcgatcttaactttactactattaccaagagacttaagaaacttttccaaattacgaactacagaagcagaatgaaggattagggggggttgtgttcataccttgagcaagtgcactgttacattgctcattagcatggatgaacaacttgaaatcttgacatgcatcttccattctttgaatctcctgtagagacgaccgaggagacagtagaggctaaaacaagtcatgctgatgattcgaattcaaactccttctcccctgcaattcgtcaatgccatcttcctcctcctctaaaagctccaatggatcaatttcaattgcagcatcaatggatttggtttgagtagcatcagacacagaattagatccttttttctttgatttcttgattgtagatttaggtttcccattcatcttgaatcttgtttttgccatggctccagctagaagctgcaagagcaa

SEQ ID NO: 228165 - DNA, 2181 bp, Cannabis indica
ctataggcttctcttggctggccaaatatgttggtacaactccttgatgactcacttcactcctttcagtttctacttgatggttttgccataccttgtatggagaccctgtcttgctattggcaaggctatatttcacatgtactctgtctttggcttacgtggacatgccacgtcaggtggccaaaatttgggatgacaaatatgttgaccttacatttggtcagctgacagcatagccttatttaggattaccaattaccacatgtaaataataaaatcaaataaagaaattgacaagggatttataaaggtttgacccctttgtttagcgagtaatgaccgacttccctttttgttgtgttgattcgagagataatacgacacagatcataggcttttaccttgtaatttctagtatggctctctatgaatgtttcaatagtgagacgggaaacacacttagtgtctaatgaactacaggtggtctgttagagagaaagcaagagtgctctagggctttaggggcttagaactcaggtccccttacatttagcctactgttctttatatagtttagagcttacaaaaggtctacattgaaaataggttagtatcccttaaaaaataggaaatatcatctttttatcatatatttaacctataaaaatgtaacatcctaacttaagaaacgccacgcactgcggctaaacatatactaatcttgctaaactggaatctactagagctaagagtagaaattaaactttaaaaacacgaaataaaaatgataacttgtaattatcaaacgttataaaacatccaaaagatcacattttattttgggatcccgtaaaaaattttcaaaatattacaagttattagtacacgtcgacctaagcgacaaaagtggagattacaacattttctcccggtagacccaaccttcgtggtctagcttggcctgagcatgtacaatacaccgcaaaagccctcgacctcatggctgatcaccaactaaattatcctttcctgcacaatagagcacccgtgagccaagttcaagcaagacagtataaacatcaatatgaatatcaattaaaatcacttaagtattgaggccactgcacctattgtctattagccatagacctacgtgttacgctcatacgtctatctacagtaaggccttagaatggtttatctcagttctaattatcgagtctaacctaattatcctttaactgcataattctttatatcaatatataccataaaatattgtattcataatcacgtaaattctagaataataactctagataacataaccgttgaatttagggtaataactcttatctcggtttctcacatagcatacacttaaatacatacataagcaccattgtgttaatctctatgtgctagttactgtcttatctggtaattcaagtatatggagattctaaatgcccgggtgttcctgagcaagcacaagtaatcctagtcacactttcccaaaattttacaaatagggttaatcctaaattcattttcacacatatacataatttgaactccaattatagattaacacataaagcgtgaaacgagatttccattgatatcaagaacatccaaaacggagtttggaatcaaaagttatggcaaaaacaagaaaaatgcaaaaaccgggaaacatgggccctcatcgcggcaaccaaagctcttgccgcggcagccacaacctggtggagctcgctgcggcgagccataccgttgccgcgaaaacaaccccaaaatcccccaaaatcacaacttttcatacattcgatttgtacccaatctcatacaaaatttcatcaaattagcatccaaagctcaaaatttactctacacataattaatcaaacattggagatcaattgatctcaataaaagcttaaaacaaaaaattcacaaatactacaaaccatgctataaaaggatcaacaaagcacactaatcttcaaactatggtgctctgttcaaacttaaacgcagaattcaagtgttttcccagaaattcaacctcaatgtttcattccaaaatctcccaaaataatctagatgcatcaagtataaacctaataacacaatcaaaccaatgttgggttttgtgccctaaataaaacccattac

SEQ ID NO: 228166 - DNA, 6663 bp, Cannabis indica
acaatttagatgaagagaaattggttaaccaagtatttcttatcattgctatgtccaaacgtgcttctatccaactagtagtgtctctactcttctcccaagtataaggatggccacattactccaaatcaatcaacccacattgttgaaccgcctcttgaaagcattctatcagccacgaggggtaaggtagtccaccaagctcctctccttgactaagcacattgtgaaaattccccattaaacaccaaggagtagtagaacgcccatgaagggtccttaagagatcccatgtattcttccttaagcttctataggctccccatgtatcctagtaaacagaaactccctttgcccatcaatcgaaattacactgtcaatatggttcgtagaaaacaactccaccttgacctctacttggtttctccataataatgctaaccccccactcctaccttgggctccacaacaaaacacccctcaaaacccaaagtcctacagacctgatccatcttcaaattattacttaaagtttcacacgggataacaacattaggccttttttgaaccacaagttcttttaggaattgaacattccatggtggcccaagcccacgacagttccaagatattattttcataatgattgatgagccccattgcgaaggcccgccaatgatgagttttttgaaatgtcactaactaaatgtgccacctcaaaattttctttacttccctcactcaacacttttcattttttattgtcaaaaatggccaagctgtcatttgaattatccacaatatcctttcccgtatctttattatttcctccttgattgactcgagtaccatgaagagaaatagaagctttgatctgattgtcagtagtaatgtctccaccatttacgtgattgtgtcttgagtcaactcctgcattcacgacttcactaccgccagaggatcttcccacattaactaccgttgactccatcccttcaggcccagcaccaccagtcgtctttgcggactccaccccttggttctaagccatcgagaaccaatgttctgtgccttcgttgggtaagagctctcatgaactcaccataaggtttcacaatctgatcaattggcaacgaaaattaagataacacagaagttttttttttagctaataaaaatcatcagcgaaattcatattataaaaattttaaaaaaaatatcagcgaaatttcaagaaaaaaaataaatattatcattgaaaatattttattgttgtgcttgtacgtacttatatctcaccctcacattccacttaagccaaaccctaactctaaaaaaaattggccttaaaggattaaccttttatattcatatattccatctaagagattaagcttttttttcttctctttcttgttatagtgatatcatcatcatcatcatgacatcatcaatggtgggaggtgttattgatgatgataatgacataattttaaaacttcctgatgcattaatccatcacattctttcgtttctaccaactgaagatgtggttcgaacatgtattctttcaaagcgttggaaactcatatggtattcagttcccacactactctttttcttcaaaaaggttaagtatgtcattacttggagacaagacctagaaacgttttacgattatgtctataatttttggaaaatcgcaagaaaggtatggatcttgttgttgattcgagcataactagttttaagtttaacatgcctagttattatggatgtcgtaaggcttggttactaaataaattgttatcttttgttgttgagaataaggttaaggaaatatatctattcctaggaggaaaatatcttgatggggctaagactttctattattgcatacctaaaataccaaacaacgcaagatatttgactattttggaattgagcacagtaaagttggatagtactcattcatttagttttccatcactgaaaactttttcgttgttacatgttacacaatcaaatactaaagaggataatgtggtatttaagggccctttcgtacttgaaattaatccaaaactaacttccatcatcctttgttagcttcatacatcgtcgtagcggtttatcaatattcgaagtgactctaatccgaagaaaatcccttcacactcctataaaattcttaggatcagattctagatacttccccatagtattaccaaccttttcaactgtactttcagacatacacccaggctccatatcatggagttgaacccagatgtcaagagtattcaatggcaatgccttcagatcccctccaatttgtaatctttctataatcaattgcattttgtcataagtctagggactcccattgatgactctttgattgtccacttcatgatagaattggaaaagaaacctattattagccaatcatttgataaatatccccatacctggttgtcataatgaagcaaatatattttgcattttctcaaaattgatcacacgattagtcaaaaatcatccaaccaaataccacctatcgtcgataccatcatctcctccccctctaatcactgctacttcttcaagatcctcctcctcaatctggaaccgcagtgtttcctcctctgtacttcctctgttccaactagttgatgccatgcttactcccagcagcaacaagcaaagacaagaccacccacgagaatctgaaaacaacactagacttaattgatagaaaccttaacactgaaccttagaaaccatgtcaaaagacaagaccatattaaaaaaacttgtcgcttccctagttagagcatcaacaaaatgtaaaagttctgttctaacccaaaccactcaccaagatggttctttgctaccacagtgatacacatgctctccaatccaactctaatatcataattcagtttgagccaatcttgaggggaatggcgccaaacatcaaccaccaacggggtgggagagataaaccatgtcttttcgaaattagtgtttataaatggtattttttaagaaaaaagatatatagtaatagttttaatatagaattataatactatgttgtacttaaattttattatcatttatatttttatatatttaataaaaattttgggctaatctattcatacatatgtgtcatatcgtatttaaaattatatttttcatgacatattatgccaatttatattgaatcgtgctcgtacctcttaaatttaaacgaatttcgtgtcatgttaaaatattcggcatgtatttacaatacccaaatgcttggagctggggagacaaacccaacatttttcatggaggtgaggcatgcaagcaatgtgtagagaacaaggttgttgatgtgcgttgtgtgatatttaccatttcaagcttaagacttatgggagacaactcgattatttctttctaattattacaattaattcaacaaaacttatggtatagtgttaacaaatgaaaatacgaagagatgcagcgaattctttccagtgtacctcaacatagtcactagtattattacagttgtaccaccttatcactgggcacctttatttttgttagaatattctttttgtattaatgctaataataggaagatatttttgtaaggattgttctaaaatattttcctgcatactataaatacaatgcaatccatcaagctccatttgagctgattttatcattttttttctattgctgctaattttctaacttggtattagagtaggtttctgccctctattctttttcttgtatttcaatatgtctacagatgacaatactacacccagggcgactacatcaaatccaactagtagcaatggtgctaaccaaccactaggatcaacaaattagaatggcagactctctaacattgtggtacctcagtttaggagtaccttgaatcaactttttaactttaaacttaacgagaataaattcaacttttgggaaacaatggtttcaaccattgtaaaaggacattgcttggatgatttcattaatagtagttgtgttcaacttgcaaagtttattcctgcaatacatataaatgatgaagaacctagagtggacattgaggtgaatctagagtttgaacaatggatttttcatgcccaacttttaatggttggctatatggttctatgacagaagtcatagccactgaatttatgggatgtgcattcttagctgagctattgactgcactagaagaactatacgaagcacattcgaaggctaagatggatgagtacataattaagattcagactcatgaaagggagcttctataatgccaaaatatctccaacataagtgtcagtggttagacattttagcacaagaaggtgacccatatcttgaaaaaaaaatgcttgttgttaatgtactttctagtttggatatagaatatcttcgtattgtttttatctctgaagcacgcccttccaccacttgggtagaattacaagatttttgctgcttagtttaaacaacaaaatggagaggttggttgctgtttgaggtgctaataagacacagacaggtctaacctctcctcctgccaaccttgcaaataaaggttctatatcaagtggacattcaacaaacaatcaacctgtaagaaatagaggagactacaacaacaataaccacaattgtggttgatttggtggtcaaggaagagatagtaaatttggtcctactggatctaaaccaacttgccaagccaataccaagtatggtcacttggcaactcactgctataatagatatgatgaatcttatatggggttttcacctgataagaactcaaactcaaataagcctactcgtcttggttcctcagcttttgttgctacccctgatattgtggaacatgatgtttgatttgctgattcaagtgccatcaaccatatcattactgacacaggacacatgaagcaaaagatggagtatactggtaaggaaaatctcactgttggtgatggaaacaaattaaaaatttctcatgctggtactggttctttatttactacaactagaaataatttaaatctaaatttcaaagaatttaattagtattacaaagctaaacagtaataataaagtatttattgaattttttgttgattattgttttgtgaaggaaaaactaacaaagatgatggtacttcatgggaatgggaagcttaaggaaggattatatcaattcgaagtgcctaaccccaactccaagctcaacatccattccactctccaacttactctattttttggtgtttcttttgtgtctcagtccaatgtaattactcagccaatggcagagaaattttccccttcaatgaaggacaaatagcataaacatttatgtcatccatccaatcgtgtcttagatcttgttttaagtaaaattagtgttaaaagttaaaaaaatactgatcaacatttctgtgatacttggcaacttgggaaaatctcattctttatcctatcaaattaatgaaaaccatactcagttttctttagatatgattcatacaaatttattgaggccagctcccattatgtccaatttaaactacattttacatttattttatagataatcataccatatatacttaaatatatccattaaaagtgaaatcatatgctctttctacatttattcagttcaaaactttagtggaaaatcagtttgaaagaaaaattaaaatctgtcaaacagattggggaggtgaatatcaagttttttcaaaattagttgttgagcatggtatctattttcaacactcttgtctccatgactcagctcaaaatggtcgaactgagaagaaacatcatcatataggtgaaatgggtcttactttgttagctcaagctagcatgcctcaaacatattagtgggaggcattttagcatttttctatttaattaatagatttcccactctcatactcaacgatatatctccatttaaagttgtttattctaaacttccaaattaccaatttcttaagacctttagtaaaacttgctttccacaaatttcaaaatcattccaccaaatgtgtaaactttggctatagtgatagtcataaaggctataaatgccttaacaatactggtcgagtctacatttctcgtcatgtcattttcaatgaatttgaattccatttcaaactagtttcctcaacacacgccaacctgaacacccaatccatattcatgtccctttgtggtctgcttctatattctctccctcttccccatctctaaagacatctctaaacactccttcacaaccttctgatccacctaaagcatcctctaaaataccatcacctaaaacacccttcttacaacaaaatcaagtacaataatttcactcatcacctgctggctctcatatgtctactgcagcatcactagagttgccccaagcttctcctaaacttactcctcaggcatctaatcccattacaaaagttgcttctccctatggtgctcctttggccctaacacatcccatgattacacgggccaagcaggggtattaaacctaagacttacttgcgtcaatccatatggaactccattagt

SEQ ID NO: 228167 - DNA, 1774 bp, Cannabis indica
ttcctgattttctccttcaagaatgagtcggatttgtcgagaattgtcaataaatcaccgtggatgctgaacaatggagtgctgattcttcaacacttttcaaaacttccgtctatctgggaggtggagatgaatcgttttccgttgatgggtagagttttgaatctttccactaaagcaataaccaagaacaacatgctacggctagcgtcaatggcgggagaggttattgaaatccaaaaagaagaggtaactaagattacagtgaatggttatttttggtttaaagtgtggattgcgatcgataaaccgttatgcccggggtttctttatcctaattctggcgatcgtatatggctaccattccgttacgaaaggttgccctttatgattacaggtcttgtgcaaaacatcctgtgactgtagcggatggtgagggtcgttcttcagcagctttcggtgcttggttgaaaatcgatgataaatccatgaggcaagatggaagaacgacgaacacagaagatggggagaagggtactaatttcattcaacctgctgcaagtttgaaggcgattagcgaagtggaaaagtctcaatcgatggcaagaaagacttggaactctggcaaaaaatctgggggaagtcaagaacctgactctactccaagaattaccaaccagaattctctgcgtggggaggtacaaatatctaaaacttcttttcctttcgaatttgttaatttaatggatttctttgatgccaatcgggttggaaaggagttagaaaaagaaggaggatcaggggtgaaaagtagagcggacagttgtgagattttgaacaggggatccgggttagacaatgaaacagggaaaaggttgcacagagatgacagtagaggtaatgtgagatcggaagtgattgtttccaacaaagagggggagtggatagacatccctataaccttggacaggagcttcgggagtgagaaaaccggtcaaaagggagggaggaaaaagagagtagtgaatagaaaggataagaagatagatactaagctgaaatccccagcggtgacccaaggagacgaatggacaagaagctcgggaaacatggtgaaggataaagcatcagggaacatttctaagtctttggatttgtcctctggtttgattttggaagcggcgcactcggtcgagccgagtcgccgagaacaatgagtatcatgttttggaatgttcaggggcttgggaacccctggacattaaaaactctttgctcccatgtcaaagattatcatcccgggatgatattcctttctgaaactagacttaatgaaacaacgatggaaagaattcggaatgtgttgggctttgaaagttgttttgtggtggcagccaaaggaaagagtggtggtcttgccctcttatggaaagatccttttgaagttaatataaaatcctttactgtttcctacatagatgctatagtggaaaatggttttaggcttttcttggaggtttacggggttctacggcagtcccaatccgggcggaaggaaattcacttggcaattaatggagagactacgagatttgattcaaggagcttgggtttgtggaggtgacttcaatgagattcttaaggttgaagagagaaagggggctgtttgaaaaatgactctcagattcgggatttccaaagagccatctcatattgtaacttttaaggagataaagatgagcgggggggaattcgacttggtgtaatgggcatc

SEQ ID NO: 228168 - DNA, 3144 bp, Cannabis indica
caagtagttaaaacgatctgtagaaagtggtttagttaggatgtctgcagcttgatctaaagaaggaacatagcgaactgagagctgctgagcaagaatttggtctcgaacaaaatggagatcgatctcaatgtgtttgcatcttgcatgaaacacaggatttgctgcaagagctgcagcactctgattgtcaatccacaaaataggagcctgagagagtggtacttgtaattcagacagaagtgatgtaatccatttaacctcagcagtggcattagcaagggctcgaaactcactttccgtactggatctagcaacaacttgttgtttttttgcagaccaggatactaagttgttgcccaaaaacattagatagcctcctgtggatcttctgtcatcgatgcagcttgcccaatctgcatccgtgtagccttgtagttgaaaagtatctgttggtttgagccataatccatctgtgagtgtaccttttaagtaacgaagtagtctcttgcatgcctcccagtgtttaacagtgggagcatgaaggaattggctgagtttattggtaatgtaggctacatcgggtcgagttaagctaaggtattgtagagctcctaatgtacttctgtacagtgtgatgttgtcaaaagggtccccatcaagtaggctcagtttggaagtggaactagtaggattggggcatacttttgctccttccatttgaactttactgagtatatccgtgatgtacttgctctgactgagatacatacccgtatgatctcgataaatttcaactcctaagaaatagtgtacttcccccaagtcttttaatgagaatgatgtgtttaactcggagatgaagttgttgatgagagttggattcggacccgtgatgagtatatcatcgacatagaccaagagatataccaatgtgtcaccagagccatgaatgtaaagagaagaatcagatttcgagccatgaaaaccccattgtagtagtgtttggcgaagcttctcattccaggccctgggggcttgtttcaagccataaatggctttgtgtaaaagacacacatgagtaggtttagatgtgtcgacaaaacctggtggctgctgcatatataccacttcattgagttcaccatttagaaatgcattactcacgtcgagttgcttgacagaccacttggcattgactgctagagataacacaattctgacagtaaccggttttacgacaggactgaatgtttcttcatagtcgatcccaggtgtctgaagaaagccccttgcaaccagccgagacttgaatttatttaaagaaccatctttgttgagcttaattcggtgtatccatttgttggtaatgacttgcatatgcttctcatagggaacgagtgtccatgttctttgctttgtgagagcttgaaattctgaattcattgcagctagccattttgggttgttgagggcagactttaaagattttggttcagttgggagaagagattcagggagaggatgtttagtggcaagataggatttcggttttctaattccactttgagaccgagtcttcatagggtgagtacgagtgatggtggtggtaggattatctgttgacacagggatggaaatattggaaacaagtggtatctggcttggtgagattgtgttatgtgagataggagctggtggtggaatatatggtgatgaggtgggaacacatggtgagacaggtggcattgttgcatgagtggaggatgactcaagattgatcacgggtgagacaggggtggagtggagtggaacatcaataggatcaatcacaataggattagtaggtgagatagtgggatctgtattaaatgaagtggaaggaaaaattgatggttgatcagataatacctgagtttgagatacagaggcttttgcaggataatgattttcattaaacaccacattccttgctatgtacagtcggccctcagtattttcacaaagataacctttgtgatgtgatgaataccccagaaatagacatgattgtgatctaagttccatcttatgattattgtatggccgtaggtgtgggaaacattcacaaccaaaggattttaagatattgtaatcgggcttgctgtgaaaaagagtctcatatggtgataggtagtttaagactcgagtagggagtctgtttatggtaaagacagcagagctaaaagcataccaccaataggttaagtctaaaccagattgggctagcaaagtcaaaccagtttctgtaatgtgtctgtgtttcctctcggctcgtccattttgttcatgtgttcttggacaaggatgttgaaagtgaattccttgatcctccaagaatcttttgaaagatcgatattctccaccccaatctgcttggacagatttgacaggaagattgaattgtttttccactaaactcttccatttgatgaatacctcaaaggcctgagacttgagagtgagtggaaagatccatgtgtatctgctatagtcatccaaaaaatgaacataatacttgtatccttgtttagaatcaacatgagaagggccccataaatcagtatgaatcaaggcaagtggttgattggctcgggtgtcagattttgggaatggtaaggtgtggcttttgcctaattgacaagcagtacagaacttgagatctttaatggtgccaatatgggaaacaagtggtaagattttactcattgtttgtggtgctgggtggccaagtttgcaatgccatgtatttatgtctttactgacagatgagagaaataatgcaggtgaagatacattataatcagcaaaggtagttgttttattaattggcaaagtagtacaattctcattgtcaattgtatctttggtggaattacatggattacagtcacaggtacattcagctacagaattcgatacaagattacattgtaatgttgcagctggagatgatggagaatcagcacctaattggtagagtccatctttaactttccctttgagaagcacctgcccagtgtgtttgtccttgacaaagcaccaatgtttatgaaattcaagaaaaacattgttatcctctgttagtttagaaacactaaccaa

SEQ ID NO: 228169 - DNA, 2103 bp, Cannabis indica
acatttggagttgcttgttatccttgtattagaccctatcaaacacacaagtttcaattccattcagttaaatgtgtcaatcttggatatagtgattcccataaaggttacaaatgtctaagttcaacagggagaatatacatttctcggaatgtcatcttcaatgaagacaacttccctttccaatctggttttctaagcaatttccaacctgaacaatctgtgtgtgttagtgttccatcatggtctgccttgtttcaatcctctaagagtcaatcaaacattgttacaccagattccgtgtgccaagtccctgaagcagcagccactgagacagactttgactccactgatcctagtgatcaaaatccacatcaggtattacactcacccgcatctattgattctcagtttcatgattgtactcccattgacaaagaacagaacagtagcagttctccaattagtgttgcaagttcaattccacagcctgaaacacatgatactgctggccaaattgaatctgcaactctgaatccctctcatcctatggtcactcgatcgaaagcaggtatctttaagccaaaaatttatctcagtcaagctcaatggcagtggaaaaatgatgaaccagctactgttgaggaggctctatgtcatcctggctggaactctgcaacgggagatgaaatgtcagcttttagaagaaataaaacctggtatttagttccaagaaagctaggtatgaacatcattggcaataagtgggttttccgagaaaagagaaattcagatggtagttttcaaagacttaaggcacgtttggttgcaaagggctttaaccagcaacctggaattgattttggggagacctacagtccagtaattaaagcttctaccatgagaataattctcaccattgctgtctctaaaggctgggaaattcgacagttggacattaataatgcgttcttgaatggcactctacaagaggatgtttacatgttgcaaccgcaaggctttgaagatcaaaaccaacctgatgcagcgtggaaacttaccaagtctctgtatggtctaaagcaggccccgagggcctggtatgacaggttaaaaggaaccttgctctgctggaattttacaaaatcaagagtcgattcatctttgtttttctacaaagctgctggtacaataataatggctctaatttatgtcgatgacataattatcacaggaaatgatgtctccaaactcacgaagttcattggaaaattaaatgaaatgttctctctcaaggatctcggttctctccagttcttccttagaattgaagtgcacagggatgaaactggtttgtatatgaatcaagggaagtatgtcaaagaactcctgctcaaaactgaaatgcttcacctaaaaccatgcaacactccaatgacagccgggaagcctttgtccaaaactgatggtgaaccactttcaaacccaacagaatacagaagcatcataggaggtttgcaatatttgactcacaccagaccagacctgtcctttgtcgtgaacaagctgagtcaattcttgcaatctcctactacaacacagtagagtgcagccaaaagagtgcttcaatatttgaagggaacagcctaccatggacttcatataaaaccttcagatcgattggcaataatagggtactcggatgcagattgggcatgttgcccggatgacagaaaaagtgttgctggctattgcgtctatttcagagacactcttgtatcctggtcgtctaagaaacaggcagttgtatctcgatcaagtacggaattcgaatatagagcacttgctcaagtggctgctgaaatagcttggatacaatccttgctcaaagaattcgaattccctctgccttgcactcctgtcacttggtgtgaaaacatgggggccagtgctctggctgccaaccctgtttatcatgctcgtacaaaacacatcaaattggatttgcattttgtgagagacaaggtgatcaataaagaaattgaagtcagatatgttccttcaagtgatcaaactactaattgtcttacaaaaagcttaaca

SEQ ID NO: 228170 - DNA, 965 bp, Cannabis indica
aaaaaaaccaaacccaccaaacaccaaatgaaaataataaaataaaagggtcaaaaaaaaaaaagttacaagttggaggagaaggagaggaggggtgcgtttggggtaggtgagtgcttgcctcctttatatatatgctaatcgctttgagtcagagtcttgaccaaccactgcgcccaccaacttcttctttctcattttcatcttcaaattttgctgtaacacccaacctcaataatggcgtcgtctctctcatcgaacccctttttgggcgcttcgcgtatggaaggattctctgctttgggatctctttcctctgatcttcgaagcctttctttgtctccttctcttcagttccccactgcttcatctacctcaaagaagctccgtgagtccccaatctgatttcttttgttttgcttatgtttatgttgagttgaccaattatatttgaagacttttttttttctctttaattatgtgattgttatttttcaatctaatgcgtttgtattataatatgatctttgctattgaagtatattttgttagctaaatgttatctttttattgtcaacagtttgcagagcttaaaatgggtttcttttgtttgagttaattatatgcagattccttgtgaaattttgattggaagtgaattttcaattatgtcattttgtttagactaatgaaagaatttaacatttttgttaaagcctttgcttattctctcacttgcactgttgcattttgatattgagatattacaatatgcagcattttcacatatagagttgaagatagacttcctgggtttttgttactgagttaagataatagtaattaggattaatatgtttaaccaagtaatcaccttgagcatgaaagttgaacgagtgctttcttgctagcttatggccacgcacaaaagatgagacttgaacatgaaagtagccaaaaatgag

SEQ ID NO: 228171 - DNA, 1309 bp, Cannabis indica
agtaagcatctctcttttgctggtaaaatttagttgattcattcagtgttactaggccttagaaactactggattagaatatttttgttgcctcaaagtgttaccaaggagattgagcgtttgtgcagagggttcctttggggtttaaatggtaatatatagaagtaaagttcatgttgcttcttgggaaaaggtctgccttcctaaagcctatggaggtctggggttcaaagaaggtgtaaaatggaaccatgtgaacctggaaaagtttgtttgggccctttctaataaaaaagacttgttgtgggttaaatgggtcaataccatttacctaaagcaaacttcttattggtagtatgatttaaagcccgatactagttggtattggtgtaagctttgccacttgaggaagaggttcacggaacaagaaataaaggtggctgagatttcaggtaaattcaaaactcgtatttaatacaataacttagttgatcaaaatcagtttcattgccataaaactatttggagttctcttaatttaccaaagcacagatttgtgctttggcaagtagttaactcccatttgttaacaatggacaatatggctagatttcacatacctatggagtcgaacaagtgcccggtgtgcgatgagttcaatgaatctcatgaacacttgtttttctcttgctgcctctctcgcaaagttgttgagttagtgtttaattggcttggtaaccgaatgtggcctttggattttaaagggtggataggctgcctatctttgaacttggataactggatgagaaaattcaatatagcagctgctacttgctattacttctggatcaatcataacagatatgtttttgaggggtacttgaatacggatactcacattgttgctgatattaaaaacatagtgaagtataaagtctaaaatgtaaagtatagaagattggatagagtagagagtagattcttacaacagtttcaaatgtaatttactctggttgatttgttttggataagggttgttggttcttatcttggctatttgtattggttttgtccttgattaatgaagttcttccttcttgataaaaaaatgaagtgtgacataattttcttaattatacaataaaaatttgtacattctagatgaagttatcagaataaattttggaattttctactagttgtgtagaaatatatgaatagtgatgtaataaagttacgtaattattaatttttagttttgaagtttaaataaatcatgtttttaccaatatataaacatgcttaaata

SEQ ID NO: 228172 - DNA, 765 bp, Cannabis indica
agaaaaaattctttacctcatgtagagtatatatatggacagaaagaaataaagaaattcatggcaccaaacccaaaccagctcctaccattttatttttgctgaatcttacattgaccaatacaagaaagctaaagctcctgctacaaatttgaaagcttcaaatgatcaaaccagttgctctacctctgctgtaccattaacgatagactccaacacttcacctccaattaaatggcttccaccgccatcaggtttttacaaaaattattgatatgggagcagttgtaagagattatgcaggagatgtgattgctgccttttcaaaatcattaaagggatgctactctaataaagaaatggaagctaatgccattatttacgacctacaatgggcttttgctaaccaattggctatccactatgttgaaactgattccttaattgtggcaaatgcaatcaacaaggcttcttcattgggttgtgtatctcacttccaagatttaatagattatatttctcttttgttattcttctttcttagagttaaagtctctcatgtaaaaagagatgctaataaaacagctcatggcttaacaaaatttactctttgattggataataattgtatatggttgggggaaattctttctccaatctactctgttgttattcttgattttattcaataataatagcagtgttctttttttttttttgaataaagaaaattcattaaaattaacacgtttcggcctgaacaat

SEQ ID NO: 228173 - DNA, 1740 bp, Cannabis indica
gccacctcacgaggaaagaaatagatgttcaacagattcctcaccacttccacgaaaggggccagtttatgtcgccataagtgttgggttaatcttgttaaataatatatatgtctttgattcagtgtataattctttttatatacttatgaatcttatattttcttgttcatggatcattcatcatggccatgaagtattggtcttttaagtttaagttgacttaagttttcggtcttaaatttaataaattgtgttcattttcattctttctcatttcatatctataacacaaatagaggtattttttttaaaagtggtaatatttttactaataatgtttaatattttattttttaacaaatcatgacatttttattaatagcaatcagctaaaataataaccctacaattcaatcgagatatctcttctaaaattagaattagaaaaacaagtcaaataattaattgtctaattcccaaatcgtttataaaaaaattatcaaatcaaatgaaaaataataaaaaaaaaaaaatgtagcatcacaggtaattaccttatccagttacaacagtaaaaattattacaggaagttcattcaacctgattagcttgagtactcaagtattgtacaaagtacgtaattacactactaacaacccttcggtcacatagaaattattattcacaaccactaacaacaatttgattgcgagctatcaaagaacaaagaagaaacaacaaacaaacaaaataaacaaaaccatatcacacaaacaagactaaattactcaaaactatgtcgcaaatacacgactaaaacactcaaaaccctaccgctgagaaagcaccactcgatggtagactaattgtaataataaaaataaacacaactccaaccaagccacacatgtgcccaagaaaaaccaacaatcctgaccgaagaaaaataacaaccttctgtaactataaatttagcaatgaaaaattctaaatttttaatttagttcacaataatgtccaatattaataaaaggtaacgttttaaattacatcaagtgtgatatgttacttttagggtcggctttgagtaaatttaagccttagaaaaataatttttttagccctttttataaaaataaatatatagtatttttataagttatttaaaaatttatttattattttttttttttgggccctaagtgtgagtctagcccgctttagcctagggtcgaccttgctgccaagccaacctcgaactctttgcagcaaccttaaagagaaagtacactaaaaaaaaaagtaggtttccttatcaagattacacactagatagttaatgaagaaaagacacacatctttgctccaaatcgagtgagaagatgagagtgaacaatctgccaaagaattaaactcgagtttcgataaagagacctgacactaaacaacatgtccataagagaaaattggacttttaagacaaaaaattctcatatagttttcccattttaaacctaccatttttccatgcttcaagcacttcctccctcgtgaaagactccattaacttcatgaattatcctcttaaacaagaaataacatatgtttttttttttttgagaaaatactataaaaagtattgtagtgcagtagttcaagatagggggagttttgagattcgttgggatttgcctcgccatggaagaatttggacaaatgtagactacttcaaaaga

SEQ ID NO: 228174 - DNA, 1497 bp, Cannabis indica
ttttggcagttcagaacttcgaggcacatcattagcatttaatgctctaacggttctcattttacaatgtttccatccgttaaatcttatttcctttgatgatacagtaattattaattgggtataaattcaaaatagagcatctatattgttattttcattttgtttgaaccctcaagctcttctgtaaattgcaagcagttcactgtcctttacttatttcttgtgcattttagtcgacttcatctatagttttagagatcttcgaaattcagttttagaaccttcaaaacttcaatcgtcaagtttttctttacctagaaattctaaccaaaatagtaagtgatacactctcattttttttaatggttttccttttctatacttgtagttttgttttcttgattgatgtttctttatctgtattttttgtttattttttggtaattttgttttgattgtttggatagttatagggctaaggaaaattttaggttattcagtttatagatttatgggttaagtcatatttgggtttttccagaaatcgggataacattcgttcacaagtatggcccaattaattctagaaattacgatcttagaattcttagaaatggattgtcctcagaatttagccactccattcagacccaaaacaaacataccctaaatttttttttgagataaacaatgcaaaaattagggaacatcttattaagagcaaccatgatgacatttcaggtcgatataggaaacttttgaagaaataatcgagcgtaaacattcttttttacgagaagcgacctgaatccctaaatttatctaatattcctttagcgagacctttatttttacctccagtcactattaatttttcaccagatgacatatatagactttgaaatcatgacttcaaaagctcaaaaatacaatagccctcaagatcccacaattacttttgagccagagctcattgaatcaaaagttagatccataggagcttacgttggcgaggtactaaagtcttgtggcatcaagtatgagcaaggatgtcgagttaggttcgttgctccaggagaatttagttgttttcctcctgaacgggtggttcgagaagaaggctgcaatactagcgaaccatctaggataggtgcttggagctttgtacatataagagatggatcagtactcgctcataaggattattacaaggaattctgcaactacctcgaaatatcccccttttagctgattccgaattcttacaggattttagctgacttgaaagttctatattaaattctgaagtggcaatgtccaaccccactagaaattttataatgatattttgtataagcctgccttggaaggaagcgaggagcagcgggcttctattattttgggacccacacaaatgatcaaaggatcattgtgaggtagcccaacaaaaccgaatttaagggcgacttcttctggacagtaggcctcacccct

SEQ ID NO: 228175 - DNA, 1996 bp, Cannabis indica
ttagggcgaacctctataactttttggtgtttgtttttccttctatctttactgtgttttggctagatctgtgtgtgtatgttttatggtgtttctggggttatttctaggtgagatcgatcaagagatcgagaaagatctctggttctagggtttgagaaccagagagaaaggagagaacgagagatagagtttgagaactctcgaaggttcgaagttgcaaatgagctagggttagctctgattgaacttgattttgttcaagtgagaacgaaaaattgtttgcgcaaaacgatctgtcgtgcaggaaataaacgacaagttccattgtcgtttggatttggttttatattgaattttctgggacaattttgtccctgtcgttttgacattttgcttgagttggtgtagggacaatcttggaatttcaccaagaaaatcctacataagtcaatactaaatgtagtattgtattaaataatatttttgacaatacaatacaacacggcgtaccgaacgatccctaaactaatgatacgacaacttcaacataaggcggtgatgtagtgatgtcgcggccaacatcagggagcagccctaacctccatgattcatataacctcacaataagaattacatatttaactacatcataacatgtctttacagagtaaaatgcccaaaataggaaacagaaccacccaacaaatggaaatataatgcacaatagcaaaatggcagctagagctccaaaccagaggttgattctttcaatataagcattagtagtctttgctgattctttcaattttactatttcagtgattgcttatgtattaaactatgctttccagattttgatatctaccaaatcatgctccttgaactttgatatgtactaaattatggtccctgaactttcatctatgttaaacttttttactaaaattagaaaaagtccttaaatccaacaatctcaatagttcagggagcatttttaacgaccttaaaagttcagggggcataatttagtacatgtgaaagttcaaggacaaaaatcctaattagccaataaattatatatatgtgtgtgtgatacaaggtagatgacatgtatgtaatgttttcacttgtgatgtaaaacttgtattatataagtaaattaaaaatcaagtgtgcgtgaagtattatatggaaagcatcacatcaataacatatattatatatattagtagcattttgttcctttcttctctttttctttacgaccgacccaaagaaaccaaagtcaattctactcatttatatatcttcataatatataaattagtcaccatcatttttaataaatgacatacatttatatattaaaaaaataattagtctaaaaatgtatctgtacgttataggactatatctaatgctaaatttgtatatggaatgtaactatatgaataatggtatacatttacatgcatatgttcattattacatcatatacaaattatttatttttaatttttaataaattttttgtcttaatttttggaaatagatgtgttaattttttttcaaaacatgacatggactaattaagagccatacatctagcatcttatttggcaaataacggtttggcaaataacggtaagtagtaataattgccaataaatgatgaacttagatattttagccgtcaaaaaattaaagaaggtatttaagtattacaaatgtaaaaatttaggtatgttagacttattatttggacttacattaatttttattagttttattaaaatttaagttgattggatggttctttgtttagtccatataatgttagtctagttgaaggagaagtttgactgtgcgagtttttctagttgactaaagtttttgataagcagacccagttcaactagagttgtgtaactaagtgcactccttaactctataaatacatattgtcttatcacaattctatactttttataat

SEQ ID NO: 228176 - DNA, 1199 bp, Cannabis indica
aacttttatcgaagcattgggacgctgttgccctcaatttaaaaccttgaaactgaaccaccaagcttataaatacccagacatggattctgatgaggagaatgagttcaatgcatatgagattgaaattggtaaaaacttgccggggttacgccacttgcaacttattggaagcagtatgactaacatgggcttacaagccattcttgatggttgtcgcaacctcgaatcacttgacttgcgccgatgtctgaatatcgatttgaagggaaatttggggaaaaggtgtggtgagcaaattaaacttgttaaactacctcatgattcactcaagggctatggatttattgctgatccttatatggctgatcctaatgtgttctttggaagggaagactttgattttccgggtggtgctaattctgcttggcttttcagggattactttggttatggatactcaagtgaagaattggattatgatgattttactaggattaattactatgaagagttagaattagatgatatctttaatgatgatgatgatggtttcttcttttgaaatcatgatcatcatatggggggagagatgactatacgaggatatactatctgtgtttagcctttcgttctggtcagtttatttcttttgttagtacatatttgaaagtagtttggaatttgacaaatgagttagtaattacatagtttcacaaatgagttagtaactacgtttagtagcattaatttttattgtgaagttcttttttaatagatttaatcacactaaaatagaatttaaataattttttattggtccatgtgtacactgagtccagtccaaggacacttaacacttaaaatggacagaaatattaaattgctaatgggttcttagttttggaggttgtactacccaaatttgggttttgggttaagttaaactaaaataaaagttttagcggttttgccgccattcctacaatatataagagaattcttattagaaaaactatgtaatgatgattacattacaaaagattaaataaaataaaactaaaatgactctaatactttttttgtcaatttatcatttattccaatattctttctaataccaaaccaaatattttaattaattttcattactattcttattccattactattaccattattattactttctaccaaac

SEQ ID NO: 228177 - DNA, 2969 bp, Cannabis indica
atactttgtaggctatttaattacaaatatttaaattgataaataaaatataatattgtatatttttaataactttttcaaaaaaaaattgatttatttttcaaaaaaaaaaagcctacaacaaaagctcattaattttgttttttgtaatgatgatataatacttattatattctaggatttaattgtgaacctaagaatttcacattcgtttaccattttttatctaagcttgaaactcacccaaaatttaaaattttatttcaataattaaaaattaaattaataaagatttattcttatattctttttttattattatttccattccattccttactcatttgagattcaatgtttggcatttaggagagatcaactaaggggctttaagaaaatctcaaatattaaagttttttctaacctattgggatcatttgattttttttttttttttttgttacttatgttttgtggagcagagaattattttgcctatcattttttaaaaaaatttccttttgtttcttgtctaaaggtttattttggtttgggtgaaaaagagaaattaagtttgataccatcttttttcctattttttggattttataatttttatgtgaacattttttagattttactaacaagaaaacttctcttacagaatcacacaatatagaatcaatgagatgtgagatactagtacataggaattctaaaaccatatctacacaaaaaaaagttgaaaaatcgtctcaacatatatactattacataccatttttttgaatggaaacgaccgaaacaaaatacagcaaaaatgggtaggggtcattgctattccaatgccaagtgttatctagcccaatagccatttgagctaagttatgtgcggctgtattctcttgtcgcggaatgtgttgaagagaaacagtggggagtgaagataacacctctcgtatagagctcacaattgctccatattcagtaaactagtatcacttgcttggatgttcaaaatgaggtttaagtagtttgattctatctggtaaatttcaatgttgctctctcgacgccagcgcagtgcctgtaataatgttcaaccttcagctatttttttgggcatcttcctgtgatggttcttagccatagcagccatgacttgtcctaaagagttttgaaccaaagcgccaacacctgattttctttccctggttgaaacagcacactctacattaagcttttgtttccccgtctctggaggtagccaaagccactccttgctttggtttagactatgaggaggaagatgagttctttaatgttgttgagcctgctggtaaaaggccaaaaaatcctctacttcctaacatatcttggagggttgtttctattgattcctgaacacaaaagaattcctattgttccaagtcttccaaagaatgcacagaaaatggttaaaagtatcacttggaaagtggtatttaatgtataacaatatatcaatgatgtttttttctctcaaaatactaagagtgtgcttaaaaatcgtacctgaccacaccctcttaacacacttatagtcaaaagaaaagcatgctgaataaactcaggatacaggtcacaacgaggacaattgggggagggataactatttctacgatgtaggttaacagcagtgggaatggtgtcataacaaaggcgatagataaagtgcttaactttggagggaaagttctgcatccaaaaggacttccaccaagtattgaggagattagtgtttgaagcagaaggcctggaaacattagctatggatttggctagaaagtaccctgttttgacagtgtagtggctagaattgatatgctgccagaaaagagtatcaaggtaattagtgtcaggagggggaggagacaggatatcatgaacaatatcattaggaaagtggttgttaaaaagggtaatgtgttagaaattattttaccaggatctagatttactaacatgtatgtttgattgttaactataatgaaaatgaacacatataaagtttagtaaaccgtacattgattatagtagaataacatatcttcttccgcttagatctcaaatccttgttcctttcggtcgtagagtaataacaagatctgagcctggatctccttcgggtgttggatttttcacaatcttccaactatgattgagtacttaacttgatatgagtgggcatggtactctatcactacaggcttcaacaattgatgaagaacaagaatacgaatataaatatacaaaggaaggagactctcatttactagttgtctgataaagaatgaaaactaggttgtttttcataaatggatgagaatatagaccttacaaagtctctcaatctaaaagtaaatcctaaaacctcttttcttcacaattaagtccttgcttagtgaaaatttataaataagacatagtctaatttaagaattataattgattaattaaaaccaattaactgtgtctacaagcagtattatctcaactagtgtggggaccatgggcctatataatcaagcttccaataaatagatctagaatttaccaagtaaattctctaacttattaattcttcctgacttcatcatagattcggaataacactcttaattatatagaacgctctatatgttctaagatatagatatattattaattattcattgttataatctaaatggtcaaagattctctatatatgatctccatcgagtacggacaaatttactgttctacccttcaatgtatttatccttagaacacttagctagttgtaaaagatatttcagtaaactaatataattattgaaatgaggcctcaatcatttatcgcgttaagccaaagcttggacttctttcggctttgttggtgagagcatctcgattaaggcctttatcttttctagattggcttcaat

SEQ ID NO: 228178 - DNA, 1497 bp, Cannabis indica
taaaataatttccaacataaaggtccttggcccccaaaagcaaccttagcctgggcaatgttttggttgatggagcccataattgacttcagcattgttgcctctagtgcctctacaacatgaaaaatccataatattgttagaaaacaataactaaatattgaaaccaagtatatgtaattaggcgtaagcataagataggactctggcagattcaaccattaggagagctattatatggctttatgtgagcaaataaaactacgtcctctcgattcataaagattccatgctctctaaaacccgagaaagacattgactaaaaaggatctacgtttaccatttcgggcgatattgggattacttggccttttaaagatttcatctatcctatcaacgtaactcttcataggatacttaagaggacctgaagtgcaaaaaataataatcaaagcccccttgatccactcgagccatttggtccaaaatgggggtacaaagtaagaggaagggcctattacctcttccggaggttttggctataggggtgcccttgtccaagtatgcgacatcaaacctttttgcaatttcttcttctttggtcatatagtttggatggcgacgtgctcagtctgccatcatacgtacgtcctctttaagggcccccttcatgatctgagagatcccaacgacgatcttttccttgacctccagggaaatgtaaccaaggcccctatggctgatattattgacactctaaaatttggctatgtgcccatattcacagagcaacttagtggtaactaggttactcacatttagagcgatatccggaatggggttgtttagggtcaatattttcatcaaactctctcacaagagtttgaggtataggtgttgtcacaaatgagaaaaattccattagtcataaatttaaagtgagaaaataatattaaatggagacaaaggaaaaaggttcttacctggagttttgaagtccaaagagaggttcaacaccctcttcattgggaaaccagtggagaaaaaccagtactcctggaggttaggagaatgtgatgttgtgctgataggcaacacacgtctaggtacttctcagtttgtaaaacccaaccttgaactttttgttacaaatgggttgaggcttgatgtcataacaatacaaaatctcttttggacttggaactccagcgttccccatctcacataacacgtaccacccatataacaactcataagacggtggaatcaactggaaaagagcaattctgatctttgtgtagtgtttcgcaaataagtcctcaggggtagtgtgcccagcttgagatgtgggcccagctccaggcgttgaacccatctgtgcttcaggaagagattctcctgtgacttataacctgttcccacacccagtcaggtaatgttactgactcctccctcagtagaaaatttctccatcatgccatcaccttgaatttgttg

SEQ ID NO: 228179 - DNA, 2034 bp, Cannabis indica
agtggcttgggatgaggtctgcaagcctcgaggagagggaggtctgggtattgggaactttggagatgaggataaaggtttgcttatgaaatggctgtggagatttcctttagaaccaaactcgttgtggcacaagctagtgttgagtcgatatggtaaggctaataatttatgggacacaaaaacgaatataccctatctcctaaaggcccgtggagagatatttcagatctatatgatgaatatcttggactggtacacttcaaaattggtagaggagacagtattcggtttcaggaagatgtttggcttggtgattcttccttaataagtgctttccctgacttaatagagatttctaagacaaggaatgtgactataaaggaactgattgtcgacaagggtttgccagttgggtgggtagagagttgggatttcaagtttagaaggaatttattggagcgggatgtcccaagcctttatgtcgttattgcaaaaggtggaacatgtcaaagtgcttaatatttcgagtgatagccgaattcggaaaccagatctgtcagggtttttttcttgtaaattagccttttgttagtttacattaaacccagatgttggtggaatgtatcggacgaggactttatggaaaagttgtgtaccattgaaagttaaagtatttggctgtcttgtgtcgttagagtaagtgaacgtccacgataaaatgcaaaagaggaagccttacctatacaattcccctggatggtgcgtctgctgcgaagtcagtggggaagatgttggacacctgttcttagaatgcaactttattcgacaattatggattaatttgattgaggaatttcagctaacatgggttatgccaagatctgtaccacaagtgatagtagattcattggcagtaagcgtaaaacaaagttatggagaacgacaattttagcaataatttgggctgtgtggttggaaagaaatgttagaattttcgaaggggctgaaagtttagaagaggatgtgtgggagaaaattagttctgaacaactacatgggtttttaaaaccaaactttttgaggagttgttctttttagatttatgaagagaatggaattcattgttgtagtggcagtactttcttagtctatcctattttgtttcagcactgtcgtgtgctaaatgttttaggcggactatttgtgtaaccaaggttttcctctgccaaaaagtaaggttttaaaaaaagaaattaaattttttcttttagagaaaaagagaccaaggtcatgtcttagattgacctcctatagaggaaagccatagtagcaaaatgatacatgccatatagagttacacgttgatatcaatcacaaaagcaaaaactctaacatgtacccgtaaaccttatcaactaacaaagaaattagttagagttagagcgtgagtgggtaggtccacaattatattggggctgttgtgattgtgtaaagttggttagctttgaggagaaggttttttaaatgagattttgcttagtcttgggagaaaggaggctctcgaattaactcaccattataattgttaggcttcggtacttgccaaatatgagttgaataatatagagaatttcaacagtgtgatttttgtgtgatttgttcagataagagagtaagaatcttatcacaaggttcaaagtaaatttgaataagagccaattgttgggtgtttgcttggaggaggaggtagtggctcaatgtgttgaccaaattgggtgtgtagtaggtaggtggcccatgacctatttgggaatgccacttggtggttcacctaggaagaaaactttttggatcccaggtttggacaaatgcgcgaaaaggttggatggtggaaatgttcgctcttatctagaggaggtagaatcactcttatccagtctgttctctcttccctaccaacttattatctttctctttttaaagctccaaagtgtggtcattatcgccttagaaaaaatgatgagagacttt

SEQ ID NO: 228180 - DNA, 2120 bp, Cannabis indica
aaaattactaattagcctattaaaaatttagagacaaaattagtaattattaaaaaaaatgaaaagaaaaaaatgtaatatctatttcaaatcttaaaccgttaaaattttcctactcgatctctctctctccggctccgtcgctccttcatctccagccccgccgccgacgactctgtctccctcacctcagtccgtgcgtccgtcctagtcccacccaagacccaatctcgagtgctcgacggcggcgagtcgcgataaagcttcaagctctgacagtcaggtacattcaatctctccatgttttccgtgtgtatgtttgtactgtttgtaaccatgtttttagttattaaagtatctatacaaaggtaaaggtaattgcagtttgggttaatttgaatttcagatttctaatggttctcacaagttgtaaattgtgtaattctttgtagccttgtgctgtgtatgcctattcattgtgaatggatgcaactgttaagattgtgttaaaacacaaaaatctgttaaaatcacaacaaattaaggttataaggtttaggttaggtgaaatttaccaaaataacaatgtcaaatactaaaatttgtaaaataatttgtttaattctatggttgttttacggcaatgatcgtttatggtcgtagtaatttatttatggtcatttctgcgatcatataagataattttgctaaagctatttttgcaaaacactcttaggttagataggtaagatagctgagatttgtgtatgacttcaattcaatcaatattttttgctgcccaaactgtgatctgaaatttatttatttttggcaaagatttgggttgagtctttttgtttggctgaaactgatttgattagattcttcttatataggatcagaataagaactcagaaagttgatattatattgggatggcaacactaagaagtttgaagatcaaaacaagtacttgtaaacgcctagtgaaagagcttcattcttatgagaaagaggtcgagagtgaggctgccaagactgccaagatgaaggagaatggagctgacccttatgatctgaagcaacaggtttcaatgttcttgataaagagataaatttatatgcaatttcgataagaaatatgagaacatgacattgggttgattgttttgcaaacaggaaaatgtgttgggagaatcaaggatgatgattcctgattgtagaaagcggctcgagtcatccttagccgagcttaaagctactctagcagagttagaagagttgaatcagaaggaaggtacagaaattgaagaggctcgaaccactatttcgcaagttgagaacttgtttccaacaagctcaacttcggaatcttgaagtctcgcgctgcggatttggggtattggttttgaattttcctttggttgatttggatgaactgagtgtttctacctatttggctattgaacttgttgtgtcttcaaattaccaaatctgaggtttctatgttggaagttggaatgaatttattatccatttgccaattgtgttcaaattttggatttgttgaagtgcattgcaacattggattactttaccaacaattactcaaacttaattaagttcatctaacttcacagcattttcagagctcatatcttgctctgtaacctcaactagtttagtccttgtgacattgcattctctatcaaagttcatctttagattggttacaattagcttatacttttcaatcccattttgaataattgaaaattttgaagtgcagtcattgaaatgtaactgaagaactcagtccttttctattctagtttccaaattcattaagttaaaactgtttaattgatctcaatcatttcaatacttgtataggtaaattagttcaaaatttggtaaatttatttatttttatttgtaaaagcggaaactatttcaagccaagtgtccctatcatgcttcgtccgctctatctatctacacgatggcatgtaataaaattatgatttaactagacaatatacccgctctttgtacaattgcttaataaaaaaatccaatatataaaaaaattgaaattaaattatttaagtgcataatta

SEQ ID NO: 228181 - DNA, 1777 bp, Cannabis indica
aataatgaaggtgtgtagtttgggtttgaggttcttctgcattattgctctactaattttctatccttctattggagatgctcgaccatatcattcattccaaaggtcagattcgtaattttatactcataattaacaaattaattaagtttaattaataataatcaattaactaattaaatatgctatgtcttaattaaacttgaaaattagagcatattaattggttattaactgcatattgtatgtatgttatatgtaaggaaatattattttccaatcttttattattttgaatttattactatataaattctctatacaaagaagatgtctcaaattaaataattatgtgtagggatttgaatagatattgtccgagtagcagaggacgtaaagattgtacgcctccgccagccactcgccccattatttcccctaaaggtccaattccataacatcacgtgtctatacataggcagagatcaatgatattttgtacttaaccaaacagtcgatcattgtattaaatttataataaaaagatataacgaatatacacaagtacaaatgtgtaacatggacatatttatgactttgataaaaaaaaaaaatattttgatttcataaatatgtttaagtgacagatttttctgatctaattttgttacatcttcttatacatttaatataattaattgtaccatataattaattattttattgcaatagtatatgttaaaattgtgatttgtgatttgtgtgtaatgtaatattaattaattgttttacacatgatatgatgttggcttttaatgggaaccgtcgagagtggactctatcagagcggacacacgaaaccactcagatagtccaattttctgttagacaaatatgatgtaatattaattgtaatatatgttaatattgtgattatcataactctgtgtattgagatataattaaagaattgatctcaactctattgaactctgttcgtactaaatcaataaaagagaaaagagattcgatggtgttccaaaactggagtactaaagctataaatcacatcgatctataggacttgaacgatatatatctttgtgttgattttattgtcttattgtttaattaatcgtttctagttttgagtactctatttatccttgttttatctttgattgttgtgtgtcatttgttaatttaatcattgttaattgtttgttgattaaagttttacttatttgattctgcacttaaattgtaatctttctacacccacattgtgcgtttagaagaaactgtaattactgtaagtagtgtaattactaaggtagtaattacacattataataataattacactatataatataaagtaaaacataaagtgtattttgatataaggtgataattatttatgaattcttaatattttatttagaaacatagttaataattacacaaaaaataatacattttagtaattacatagaacttaatatttaaaaatgtaaaattttgagtaattacacagtttacttacacccaattcttgtagggacatgagaattagaaagtgtaattaagatctctcaactacctctattacgcaattatataatataattacgtggtcaaataaacaaaattgtgtaatattacattcaattcctattttctcttggctttccaaacacgcctaataaaatataatcactactccagtaattacacagttggttgtttgaaacaccttagaaaacaaatcttatcc

SEQ ID NO: 228182 - DNA, 2529 bp, Cannabis indica
atatattgaaatatatatataataatataattcctcaattattcacaattatctaattatggttttgctaatccattacgtaattctagggtattacactggtcatccttcttcgcctgagaaccagatgccttggcgttagctcccctttttgcaaggcccttttattcctgtaaggccttcatttggtttagccacattggcacagaattccatcaccaccttcattgcgatcaattttgcaagcaaggaaaacatcaaatgttagcaaaagtcacatgatgttttgtgcataaaaaacaaaggagagagcaaagtcagagtgtgaattaaaggtccgagatcgacccccaaagtaagaactagagccttctgaattttttgaagacaaagcaagtatgtcttcacgctttaagaaactttcgtatgcaaataatctaggataagtaataagtaaacatgtttaccctaattttctgagagggaggaatgaagtgtgtgggactctattatctcatcaacatggagaagaaatcccttggcaggatattgggacaaacttatattgaggaaataaggatcaaatccattctatcttatgaaggagaagtcctctagaaaatgagcgttattgatggtaaacggagtgttacctgctcctgacgtactggcacccgaagcgccaatattcagaagcatagccctagaacagttggctagctccacatcatcgctccaaaccaccccttcttctcccaactagtgaagatgaatctcgtcacgctttacttctttagcaacatctttggccatgatcttgattagtccatccttaaatttctctgaaatcacttgcaggccacgaaaactaggaggcacaatgctctaatgttgagaaatcaggccataggttttaaggttgacatccaacaccatgtggccaacctccagatcatccttgtcatattccttgtacactacttcataaggaaaaatgtggacgggaggagttgtttgcgcataaggccctaatattaggataaacgcaatgaaaaaaaaagttagacttttatcaagggttcacaagcaccgcccagtaaaggcgagaaaatgaaaggaagataggaacttaccaactctctggaaaatcaaacatcagtgtcaaatacctatggagtaggaccctggatgtgaagaaccagtgttccctcatgtccaaaaggtggctacaggagatgtgaggactcttcaccttcctgctccacctctttagccagtaaaatccatctttgctacaatcaagaacttcagctaggtgggtggatcaaagtctagcattttgcaaaatatatactaacctgcaatgagtttataaccttgcgagatcagttggaagtggctatgccgaaaaatgttaggaagtcagtgaaataattctgaagagggagatgcactctagtagtgatgtgggaaatgctccacatgttggttttatggtactaaatcaggtatgtagtggaagagtttcatattatttgattatcattgtaccatagctcctagaatctccatatgtgtgtacattaaatcaaaacattaaaagatataagtttagagtatacctcttgaagcctattagggtatcctcgaaacttctcgtaagttgtatcccttaatccagttgatgaggaattaacaatttggactcacaccagtgtcttctaaattgatcaacaacacacaaggaatagtgtgggctattaagataaagtgtataaccttgttcttgttgagttcttaacacatgagcaagaataattgagagaaaaaaacaatttcttttttctctctatagatattgaaatttacttggtaaagtgatgttctgatttctcaaattaggcttctatttatagtagttaaatccctttaattaaatcatatttaattatttaaataaatcaatatctataacaaaattcggttactaatatttacgagggaatctctcaactacttgggagaatatcctaacaaccttgaaatatctttaaccatttttcaaattagatattcctaattgaattaattaacccaaaaagacaaatcccatagggataggaacaagctaggcacctactactgtctttaggacaaggttggtgtcttttgccctgataacttttttcttgacaaattttggcttagcaatttttgtattttctttatttaattatttttaacaaattatctatttattacaaaattaatatttattattttgccaattaaaaatagattttctttgaatatctttatacaattctttatccctacccttgacgatatttcaaggtggtaattcagggactatggacctataattctaagctccaataaactagattatttattgagtctcatcgaccaaataatcccttatttattaattctatgattactccactataaatatgaaattgcactcttagtaattataaaattatatttactgagtttaactgcaat

SEQ ID NO: 228183 - DNA, 2009 bp, Cannabis indica
gaacatataatcatgactatatttactgtggtgacgacactataatcattaacaaatacatatgttttggacttaatagaatttatacattaaagataatcatgaattaaatcatgtgaaccatgcaacataaaagcgatttctgatctcttattaattagtaaatttgattatattaaaatgagtttttttagggcacaaaacccaacaattcatccctatgacgatccatctaagacagtccatgctattgaatcgacctataaatactctagagaaagcacaaagaggggattctgacccgtccttcgaaccttcacttcgagattgaagacctattgttcatcaaaaaaatacaccactaaaatcctacttttaactccagaatattcctactaagcttcgtcttctccaagaggaacacggtgggataagaaaaaagtccattgtatatgtatttgtataaacaatcaccggccaaagagcctaacaaaatggactcgtggactaaggatagttaacgcttgatcaatgtaaaaatctcttgtttgttattgcattatttataccttcattactttctgaagccttaaaattattcgattgccaaaaaacatggtaaatattttagtgctttcattgagagctaaagaaagagatatgcacggttgttaaagacgcaagactattgggaagaaggctagtgcatgaaaagaaggaagacctcctaatcactcgtcaaggttcagccgaaggccaaaaatgtgaagatttgaggtagtgcccataaaaagatttcatgcctccgtttgcccaagaaaggcagttgaaacaaacacacgcactcttaaaaaacctactgcactaatattcatccttaaaagctcaaatctggccaaccaatttctgggggaaagaccgaccaccgatatcctcaggcggagatccccaactacgtcactatgcataaacaaagcagtgcgtaaagtgtcagggtaaaataaagaagctacgactcgatgcggttacgatgactaactcaagaggggacgtcagatacaacgactctatctaactagcaacttcgacgctagtgccggttggagggctagatttgtcttccgacaactacttcccctaccttttctcaaggtggtaaaatttctcagaaattgatcctgcgatggcggccgcttagaggagaccatcagtactgccaatgtctactgagccaccagtgaggcatggttatagtacgggttgttggaggaggctatttttggcagagttcgctcaatgtcgttcttgtcgcctggtgtagttgcaaccctggagttacatcacaagtaaagaacttgatgccccgcatttcgccggagggggtagagtgcctaggatatcctgagggcgtaaacatgcacctcctagagcttctcggagctcaaagaacatttgcgcaagcattttttggacgtgaaatatcattgagcataccgcacatcttcaactctctttcctagaagggaaggactgcttgaagtctactttactttcaatgactctttcacacattgaacttttcaagcgaagtctaagcttgaatttttacatgtgctcttctgcttcctttctttttcattttgcaaacaactttttttcttagggactgttgagaacgtgacacagttttcatacttacgtccctactctcttttttcttttctcttctttctgcttttgctgcctttgggatatttgcactcgatgtttgcctaggaaaatacctggatttatttctgccagacatccggagggggcctctttccagcggttaggggaaccccattcccttcttttatgttagggcttggtttgggggctaactgctggatttctctttttcagaatcttactaatgtcaaggcatgtctttcccagggactggagtgaaatcctccggcaaaggatgttgggtttcatgccctaaataaaacccattacaatctgat

SEQ ID NO: 228184 - DNA, 1358 bp, Cannabis indica
agtttagtagtacttaatccaattccctgtggttcgacctcacttgtgtgagatactacttgattgcgtacacttgcgtaataaacataaaattcgtaacaacaatcaggctgaagaccattaccattggagcaaacaagcttggaataggctcaatattcccaagcattattttgtggtgtggatttctttgcggaacagacttaaaacaaaggataggttgctcaaatatcatattgtatcagatgatagatgtttgttctgtcatgggaattctaaaactgttgagcacttgttctttgattgctctttttcacaggaatgcatacaccttttagagcaatggtttggtcggaagatggctctcactccactacaagggttgctttggaaattggacagagttaagggatgaaaatttcgaaagagagtgattatggctggtatagcagcattggtgtacaatatttggctgaccagaaatgatgtattatggaatgagggggctgctagtgtccaaaacatttttcagcaaacaaagtggcaagttaagaatataatttcttttgttatgccaaagaatgtaaagaaagaagaagttgaatggtttgagaagttgtaagtaatagtggaaattgtatagaatcttatgacatctcttgatggtcattagctgtaaaattgtttgtgtggaatgaaagtctgtttcatcaaaaaaaattatgggtccagtccaaagtatagctaataaatctaacacaagtttactttgctaatatcctagaaaagacattctacttatccaagtgtaagtaaaccacatctatatttatcatgttagtgtaaatcctaagcattggtaaatcatgagactaaatagttggaaatattttaccaggatctagatttactaccatgtatgtttcattgacatcctaatatgaattctaaaacaatgaaataaacacatataacgtttaggaaaccttacattgggtccggcggaatataatcactccttccgttcagatctctagcccttgattcctttctgtagcagaacataatcaagttctgaacctggatctctatctctccttcctttgatgctgattctccttcttgttgattggattctacacaatcttccacactataattgagataccacttgatgtgtgtgggcactactctatcactagggtatttcgaaattgaagagaagaaaagagaagggagaggggcgactatagagaaagaataggaggctcagatttttctctgaaaggaataagatgcatgtcattatttcctaagccatcactatctatttatagtaagccatctaggtttaggtt

SEQ ID NO: 228185 - DNA, 1641 bp, Cannabis indica
ccgtaaatgatgatataacagtccaaattaacttttgagattgataatcaattgtatgagcccgggccgcagtgatgggacttgctctgggtaagttggagcttatttttgtaactccattggagtaaaatttgaggttgatgacttcagaattgggattaaagtgtgagacatgacttaataaaagcgttaaaattaaataacttcaaaactaaaattgaatcgcgttaatcggatcaatattgagtgagttatgaccattttactgaaggttgttcaaggcccagcatccaaattgacatcccaatgcagttgacatctaacgcctaggttaacatccagcgtgcatattgacatataacatcaacctggactttgggtgagtgaaaaaacgtcctagggatgtcttttttgatgcctaaattataatttgacatcagttagtttgttctgtgttctggcaaaactggtcaccatctcttggagatgttgctgatctgcggacatgaaagactggaaactcttcattaacaagtggttttcccatgttagaaatgagaaatgcaaagttgtgaatttgacttctctgaattcatggatcttagttattgtgaaaaactatacggacattcgaagtagaatcagataagcagaacccaacgcagcaggccatttatcaacttgggggatgggtacttatttcagagcttcctggatgtcgttttgatacttctaagattatagagcttgagattaaggtctccctcttcgtttttgaccattctggaaagaatgttcagaccagatttgacatttggatcatcgaaactagcacaccaggttgattgtcaacttgagcgctaggcccaacaccagctcaacttgggcactgtgctctatttccaggccttcgagtttgtggttttttccccgagttttcttgaatcttcattacttctgatgaaaaaaatgccctgaacacttttttgagaacttgattagaaaggcccaggttgacaacatgtaaaccggggcactgggtctcagttttggccccttggaaattttgtttattccctagaaatagttgaatcttaatttttgcaaaaaacggagaatatgctaagaagagttcttggaaaacatcatcggaattggccaaggttgacattgggcgctatgccttgcttttggcacccaggaagtgttatttcttccccgaaattgcctattttcccattttttatgaagatgaagatgatgcaaaagtcggatcattgatctgataaatgaaagtcgcctagactgataaattgtcaacctgggtgatgggtgcctgggcaccgggtactctgggtgctcaaaaatgaactttcttcgaatctgattctgatgcctcaaatatgtctgatatttctagttcatgtccaaatgcaaagcttgacccatttgcactaagacggtcacagaaactgaaaccctagttagggatgtcaacctaggcacagggtgaaacagtaggtgcccaagttgactttcagggtgtaagttcatgcaatttcggcttccgagcctagatttggttgctccaagtcttcatggtacaaaataccaaaatatagttagttggaaacgagttat

SEQ ID NO: 228186 - DNA, 872 bp, Cannabis indica
tttttttaaaaagtaaatttttatgattctttgccagacttttcaacagcagccaatattccaccggccaatggggccaacacatcattctatagaagctgtaaatagcatgaacataaacagagtaatattcttattcttattaaatatcaattgagtttattgtcttgaatgagtacttgaaatttttgctacagtgaggtgaagccttatgcttttttgtgtttcttaaagaggtagcttattgttatgttgataatttgctatgcataactgtttcccttccaccaggatttagaggatcctatattcacttctttcaaggatcgtcttcaccatttacaggcaagcttcactgtgcttcactgctggttaattatttcttcccctttgattttgttaacttttatatcttgtgcattcagagaactgagaaccatcgaatttgctttggcaaatctcatatacatggatggggcctatttgctcgtcggaatattcaagaaggagaaatggtatactttactatagctaatcattgtgtagtttttgtatatttgaaattgattctctctttttatctaatagatgatgtgttgtactatttactatatggttgatttgcacaggcttaccttgacttatgtaaagtaattccttttgatttctttttcttgctctaggtggttgaatatcgtggagagcaggtgaggtcttgtgttgctgatctaagagaagcacaatatcgggcacaaggcaaagactgctatgtgagtcaaatatgtatcttggtgtttcgtttccacatactttgtgctatttaatctttaccagctgatcagagtttcaaatcttttcattatacccaaatt

SEQ ID NO: 228187 - DNA, 951 bp, Cannabis indica
ttttctttttacagaataattttttacgctaaggtaaagatcagctacatcgtagaccacttggtgctatgtggtctgcaccaatcatttgtcacagttttgtcaaagggtgacgacagtgtttgtcctattggttgagaccacctaataaggtggtccatatataccttacataccttaataaaggaagtaactatatgcacttatatatataaggtaattttgttttgtgtgtatatattgtagagaatataaagaaaatggtttcatcatctgtttttggtgtgtaggattggatctggtgatgaaagaaacactaagatacttggcaggaattgcaggcccaagtggctatggctccaaatcaactgccgagcaagtcactgcaaattgttcttcttctcatcatctaacagccataatcactggttagtactactattaattaataatattcttctcttaattaattaattagttaccatataattaacaaaactatattaatattatatagtacgtatatcatcacatgatgaagataacaattccatgttaataattatttatttttcctcagtttttcttggtgagagctaagggctctgatgatatgatcagaatattgtctctatcaaattatataccctttttttcttctgatcatcaagcgagtttttctatgtctggctgtttaggattgttgttagattattctttctggatgaatatatatatatatatataacataaaatgataacgcttcaaactgattactttgttttttttttctttcatatcactgttctctcttcttcttgctttttctctctctctcaacaaatattagtggtgaaattccctgaattttcggtattattatatattctgtaggaatataaatatatgctgaggaatcaggataacataaatagatgttcgtattcttt

SEQ ID NO: 228188 - DNA, 3374 bp, Cannabis indica
aaatcttgaactgatcgattagaaatgaagacttcagtaaaaatgctagttaattgttcttgagttgtgtttggtttgaatgatcctagcttttatcttctcccttactagatgatatcaatttctatatattttattctctctgaaaaactagtttggtagttatatgttgtccagcttgattatcacaataaaaagagcatccaaccctatgcttgtgactttaaattcctttccaaaattgataatagccaaattatctcacaagtttcatttgccatggcctcatactcaacttcggcaaatgatcaggacacaatgtgtcgcttcttactttttcaaaatattaggtattgtccaaaaaaaaaacacaacatttcgatataaatcttcgagtatcttgacatgctgccccagtctgagtctgcataagcctttaattgtatcttagaagcatataccttgccctgggcaagattgaaggtaaaagaaaaccaaaagaaagaaataaaagctcaataatgaaatactcagccttacagtgcagacgctagctagctttgtttatacttatatcaagggaaacaatacaaagaatattctagaaatattacatcttatacaatcattacaaacaatggtacaattattgcaatcattataagaaaatattctaatggtaatattagaatttgttacagtgggaccacacaaaatcatgaggcaatcacaccagaatcattcagtaattaggtgtgggtagagtattgtactaatgatgaggaccaatacattttattttgtaacagtctctctcaagttggaattaatgtaccatggtcttcatatcaaatactttaactgtccttaacaggttactcatacgcggattgggcatattgttctgatgatcgtagaagtgtagctggatatagtgtgtatttgggagacactagtatcctagtcttcaaaaaaaaaaataaagcagttgtttcatgctccagcatagagttagagtatagagccttggctactgaaatatatatcctagatccaagctactgaatgaacttgatttcttatgcctcatacacctataacttggtgtgacaatgtgggagccaatgctcttgcaactaaaatagtatatcaggccatgaccaaacacattaaactatatgtgcatttttttcgtgataaagtactcaacaaaagcccgacatcgaatacatacctttccatgatcaaacagttgattgcttaaccaaaagtccacacatcagaaatttcattttttaattgacaagcttgaattggttgagacctttgttccttttaggtaccttagtacacattttacaacactctaatgagttgtagttagagtttggaggagttgactcaacttattgatgacaaatgacagatcaagtcgtgtgtgtgtcaggtactgcagtccttctatcatgcttcgatatgctgttgggttgtgaagcggtcataaagaaagacatcgacgtttatttaataattacttttctggtgaactagtatgcacagatgctcaatttcgtagacgatttagaatgcgcagacacatattcttacacatagtgcagtctctagaaaatcattcagcatatttttgtatgaggcatgatgttgctggtaaaagaggtctttcccactacaaaagtgtactactgccatgcgaatgttggtatatagagtgtctgtcgattgtgttaatgagtatgtttgaattggtgaaagcactgccattgaatgtttgctcaactttgtttgtggaatgaatgagattcttgggagcaggtatttaagacgaccgaatggcaaagacattcatatatctcttacttcacatggggcaagcttaatggtttcccatgaatattaggaagcattgattgtatgcactacaaatggaaaaattacccagttacatggaaaggtcaattcacacgtggtgatcatggcacgccaacaatcatgctgaaggcagtagtgtcccaagatttatggatttggcatgcattttcggtgtttcagaattgaataatgaccttaatgtgttaaatgaatctccattgttcactgacattgcaagcataagatcccagaatcgagttcacgatgaatgacaaacaatacaataaggcatactgtttggcagatggcatctatccagaatgaagtacatttgttaaaattatttcgctaactcaaggggagaaaagaaaactatttgctcaatgctaagaaggggtgcgtaaagatgttgagcgagcatttggagtactttaatctcattttctattgtgcgaggaccaggtcagctttagaaaaagtatattctgaaagacatgatgtatatgcttgcattatattacactacatgattgtccataatgaaagaaatgcatatgcatgttatttttattttaattatgactaaggccctctgaaacttcgagagttgaagtatcacctgaacatatttcctctttcccgatgatgcttcgaagaaatgctaaaattcatatcacacatcacaatttgcaaaccaatttggtggagcacatatggtccaaatttagaaatatgttagattattgtaatgtaatttgttgcactacatttatatttggtctaattttagttttatgtaaaatttatattatattatatggtattcaagaatttattgtgacattatatataattataattttatgatattcaataatttattgtgagattatatataattattaaaaaatttatagtattcaataatttattgtaaacttatatataattataattaatttatagtattcaacaatttattgtaaaaatatatatttggtctatattatattaatttatagtatttaataaaatttaattatttaaatagtagtatgtgagaccatggtgggcaactcttgaagttattaattattggagtaatttttgtatgaaaagctatcaaatcttatgtggatgaaaaaaatattttacgatgatatatatgtgtacttttgacaactataagtgttacctcccatattttagaggagcattagattcaacattttcaagccttttgagttaatgattaatagaaatattgggggcaaaactatcgaaattatacatttagacttgttataaatagtattaattatgtggatgtccaaatcttttctttattaccattaatgtaatcaatattccctttttcttagtttccctttctcttagtttcttaatatttgactcttgtatgtgtataaataggagatcacctattggaataaaacactcagaaaattctcatctcttctcta

SEQ ID NO: 228189 - DNA, 1626 bp, Cannabis indica
gcctaaaaaaattagatttggtccaataaacaccccaccaaacccaaaccccagacctcgacctcggggcccgaatcccggtcttggtctcaatctgagtaccgatcccaatccaaattcggagtctgggtccccgatcccatactctttatattataatacaaactaatagaaataatttattatgcactaattaataatacaattcgtattgtattaaaatttattgtcataataattaacacaatataatattttatccaacaatatatgactattatatacggtctaagaaatgagtcttttaatatatatatttatcaacttttaataaaatatgtacatatatcattttaataaaataatgtatattatatgcttaatcattattgattattgcatttaaagccaaaataggttcatgcaaatttcaaattttctaattcaatatgcaaactcccctactctttgtggattgaagtattgcattgaaatgtgcaattagtttgaattaagtattttgtgagtaccctttacactattaattaataaaatgttgtgtttaagagaataaacaaattgcaaatagtctatcgttatgggagctataagcttggggggagtgagagactttgactagggaagaggaagacttggatggtaatataatattagtgtgtgtgcaaggtaaaaaggtagtgaatttgatcaaaacaatttcaattaatgtatattattatttctttaaactaataaggttcgcaggtagtaatttattaagtatcagtattatctaacattatttgtgtttgaaaacgttgtattaataagtgtagtattgtcgtagtggttagagacaacaaagagaatctacacaagttgaagtagttgaaatgagtcattggtaaaaaaaaaatttggacccttactataaaaataaatggtatatttaaaaattattaaaaatataaatattttaaaatgtatttttttatttgggcctctaaaataagtgagccctaagcacgagcctagctcgcctatacctaaggtcagccctggttgaagagacaatgtctataacaagttgttcgatagtctaataattgaattggctttgttggttttaattttatttttagtgaagcaaattttgttgttcattatctagtcaaatatactttaaaaattgggattagtgatttatggaagagtaatttgcggcataacttttataagtacttaatttattgtaattaactcctaattttaaaattttggtggtaaaatcccttaaactcatgaatagttagcatttaactatttccatccatttttaggtgttaagtgccaagttgactgtccatgtgtacataggatattgtccacatggatatagtgtacacatgacacaatattattcggcccacataaataactaatttaaaaataaattaacttaaaaacaaaaaataaaattaattaaaaataaacttaattttttttctttctttttcttttttttcttttcagccttttttttttaatatcttcatgctttctctctctcccatgtctcttctttcttcttcatcatgtacagaccaccaccattgccaccacaac

SEQ ID NO: 228190 - DNA, 1401 bp, Cannabis indica
aattccgtgtgacagtatttttgtaaaaattaattcaaattccaatatttttgtaagtttcccaattatttaatgcatgttgactcatctacatagtctagtattatataattaatataccatattaatgcattttatttatttttattttaaacaattaatgtacttgaaaaagtgtgaaccattaattacatatattattgttgttaatattaaatgttgtataaagtatgaatagtgtttaatattattaagagatgatgtttattttaccaaaagtgtattttaataatatgttaaaaagtaatataaatttaacacatagtaaatttatgctaaatttagtaaaatatttactgtgatgtaaaatttacaccataataaatatattacttttttatttacagatatttatattattttattagtatatttaattattattttgcaaaatatttaatttttttatttacaccataatattattgttttttgtaagacttaattaataaatatatatacatatatatagttttggaaagtacatttaaagagtgtaattgacaggtcaaggttgttacttgtcacatcaaattaattatcttattattaattatgggataagacactgatgaccaacaaattaagtacatatataactaaaaaaatttattattattttgaacaatatagaaatgttatttttatttacttacatgtacaaaccctaataaatttgttagttgggtttggtgggtgtcaatttttgacataaatatacttattttttttatgatatataattttatggtaggcttttattatcacttgccaggtttcatttaattatttagtctaaaaaaagaaaagaaataaagaaaaaattagatagaagaattatcaatcaccttcaatctcatgatatgcatactaatcattattattattattaataattaataaacaagagtatataaattatttatatatatatatatatataaacatacacaccttcgacagttgattaaattattaatagattaggttatcaaacatggaaccccatcaagactacataattatatgtgggtttttttccttatgaaaaaaatatataaaaaattatgcagctccattaagatgaaaatttcggtatttagaagaattttttagtttaattttttatggttatctataattatttagaatattttgtaaaattttaaaaatttagagaaatttaacacgccaaaaataaaattcaaacagttataaattttacatgcatataaaataaaagaatttcacgtacaatagagtatttgaatgcactatttttttcacatattattcctatacacttaacccccttatcttttttttttgtggcaaaacccc

SEQ ID NO: 228191 - DNA, 1567 bp, Cannabis indica
aaaaatgtaacttgtcaaattttatttatacaatatttaataaaatgaatgatcccattactaaattttgtaaaatactacttctaaaatgataatttttttttaactgatagtataattgtgagggtttagagagaggagtgccaagtgtgaaatgaagtcggtgtaatgaagtggattttgccacgcgtcgagcatcagttacttgtgcatgggatagcgtggacggtggagattgttctgcgggaggctccataatgggcgtattgattcagtgttttttttataggaaaaatgatgtgaacaagggcagtaaaggcggagcaatggcctacagttgtctacggcggccttgtcatgccagtccggaatacaattactaattgccatctgttttgtccactaatttttgctagatgttactgtacagaaagtataattagcaatgttactggaaaattcagattaaaaaacgttactacaaaattttattttatttgattaggtgttacactaatttggtataaaatttatattaaaggattgttattaagtaccagcagtgtctagtattttctagacatataattttgtgattaactagtaatattctctaaaaatttgttatactcagttttcgcgaaaaaataaatggctactcttgcacaaggtcatcacatgccaagagtgctttgaagacattaaagtcaaccttgcgattttgaccaagacttataaatgtcaaatgagtcaaaacatcctttttaagggcaccatgatacttctagaggactcgagaacatcaaccaaccatttggtgctgggactcacacactcaagtgagtccaaactagggttcatgggcctgcgcgagcgttttcaccctagaaacatcaatttgccaaggaaaccaacaagaacttgacttatttgggcatatgaatatgacttaagtttgtgcataaagtcaatatgacatcaaaccatcaaggaaaagggcatatgcacccactgccatatagaaatggtagtgctcatcaattttgatcggcactcccataagaaaatagcagtactcttcaattttgatgggtactgccacaagggaatgacagtggtcactcctgacaaaccatgaaaggacaattatccaaatgggttccctcaccaccaaagaatgaaaaacaagtgagataaactatttcccacctatggctaaccctagtcgaccgctaccataagaaaatggcagtactcttcaattttgatgggtacttccacaagggaatgacagtggtcactcctgacaaaccatgaaaggacaattatccaaatgggttccctcaacaccaaagaatgaaaaacaagtgagagaaactatttcccacctatggctaaccctagtcgaccgctaccatatggaaatggcagtactcttcaattttgatgggcactgccacaagaaaatggcagtggtcggccatgaagagggaaagtgaaattttttgccaacaatgtattttcaccaataatatgtcaaaatcaagtgaaagaaattactaagtgg

SEQ ID NO: 228192 - DNA, 1077 bp, Cannabis indica
ataaaaaattaaatttcccattacttttttaataagttggacagttattataaatcatatattgaaatttcttaacaatatatgactcttaaaattactacagctataattaatttaacaaatattgtagaatatcactcattattggtaaggtctcacatattttaatttaataaatattatagaatattactaactaattgtaaggtatcacgcggtgcctaattattatgctaacaataaaccctatttaattatccataaacttgtctttaaaaaaaataaaaaaaattataaggtggctcagataccaaaattttgtgaataagatagattgatttttttttttttttggttgaaaaaataaaaaaaatctttattaattagaaaaaatagtggtgatcacatgtgaaatcaactcccaaagattaacaaaacaagagcaaggattagaaagatcccatttagcaagagcatggacattctattgagttcacaaaagacccaagctacattacaatcagtgctatcaatggtagaaaaaaatttggcaagagatcgatagaatagttgataagaaataatatttatatatagactatagattagtataatgttttcatttatatgtatagacaattgcctactattaaggtgtttgctcttattaaatttatttattctacctggtttctctttatatttacaagatacgtaatattgatttagaatgatatgttattattattttttaaaaaaaataaatagtcggtccttcatgatatgtatattgactaagcgatgataaattttatttgttcttaatagttgatatatatatatatggatatatggaacacttcttaatgggtattacccatgaatggtaactaaataaatttaactataaatattaattttaaaaatatcaaaccatagaattttgatctaataacgaataattaaatcacaaattttaatttctatgcttaagttaactacttaatttttttttaaaaaaaaatatcaaaaaatatctctttttacactatatcaaaaatatgttcatacaaaaat

SEQ ID NO: 228193 - DNA, 2260 bp, Cannabis indica
aaattaaatttgtttatttaatactctataataactaaaattattattttaaataaaaataatttgaaaaatagaccttttttaagtgcataaattttaatgagatgggtataattttattaaaatatattttataataataaagatataaaataattaaaatatatatataaaaaataacagtgatttagtttttggattctctttcctcgacagtggcccacctcctctctccttcacaacctgcaatcctctccgactcaggaaacatatggttacagcactcccccgaggcgacatcggcaagttgttcacggcctgagtttcctctgcctgcaacgccaacaccgtcacagctgaaggtccaagtctttttgtcattgcgcatgcaagctctattaggtgacgccgggtgtatatttatgaccttccttaggtgacagattacaagtagattggtagttcttcttcaacattattttttaataatttttttcaatcataaatagctttctttgttaaatcattcattgaatgagttttttggtagattcatatattaaagccttgatattttcttgtccatgggtattcttttttcaattcttttaatttagggataaatatatttgttctttattatgattttgatttgatagctgaaatagaatgattttggtttacaataaaagggaataaactttggtattggtctaagttcaaggtgtaaaaatgtaaatttttaacgataaaagaaacagaacctaacagaagatacataattatgtaactattatatttagagtaatttgcggtaaaaataccaagttttatttcgagtagcagataaatacctaagtcgtatttttagcggtaaatatactttcgtcactagtgtggaactttcataggtacctctctattttttgtcttataatgtgccagatggcgtgccatgtcattaaaataaatgtcacatcattctcaccatttaaaactaacccctgccacatcatacatcttaaaacttataatagtaccctaaaattaattaaaccctcttaaaatcaaaataaaaatacttgcatttatatcaataataacgatgcaaattatgtaaaaaaaaatcttttaattaaatttgatgaaaatctaaatcaggaaacaacaaataaaacaattaaagttaaccatatataacaaagactctaaaaagacaatatttactatttttttttaaaaaaaaaaatcctaaactttcttgagagagttgagagaaaacataggattcctctatggttgaggacaatcaatcgtagcttcaaggttgaagacgatcgaccgtaggttgaagcttaaagtgggacagccgaaggttgaagatgatcgaaagttgaagagatgatatggaatttttcaggaacgatgagggtgatccccctggctacgatatgtgctttttttttttgtaatttcttttgtcagttttgaatatggaattcatgggttctctcatacttttagtattgttgtgtgatttagggtttacaaaatgatggggattaggaagtgtgtgtattctgttctaaaaaaatatttttttggagtattattcagttaatagtgatgggttttgttttcttctgttccatttgacataaagaaatgatatttttggaggtttgagttataacacaccacataagcaaatggttggtgggaataagaataagaatctttaaagcttatagttaggattttgtgttgctattattgcaactttatgcatatgcacctactgaaagtggggtccatagttgactaaaaaaatttacttaattttttgtttggaatgtttgagagatgctaatttgttgcttctcatgtgatctatctggtttttttgttgaaattgaattttataggcgataatttagactatttgacacttgcaatctaccatgggggcatgttcttcacaccctttggtaataggagatatgagggtgtcagggttaattactttgatagaattgataagaaaaaaatgagcagggtgttcatagaaggttttgtactgtctctagggtacaaactgccttttagtatgttgtataagaccaaagatagagctctgaaatatggtaccatgattctgggcgataaagatgtcaaagctatcatacaccaaatggaaaggaggaagtggacagagatgtatgtttatttggtgatgcctgaaatgacactagaattggaa

SEQ ID NO: 228194 - DNA, 1688 bp, Cannabis indica
cccatttaacttgttcacaacggtggatgagtacatcaagaataaaacgaggattacagggattcagatgcgaaccgttaaggctgagatccaaatccaatgtatcaccgtcgatttcgaatccaccactggaaggcgcacggagatgtatggcaaagacataggaaatttgagtaaaaagctggtgttcgaagatggtgattttatcaagaaaatttataccagatacgactcttatcttcatcgcctaggcatatttatcgatgaaaatagatccattatcgctggtggtggcgataatgaaacagaacacacgtttaacgtccccgatggttgtttcattctgggattttcgggattctcttccgctgtaatcactcagatccagatcatctatgcggagttccagccggccaaatggtcccaacttatttgaaaaccaaacacacttgatttaataaaacctgccattgtctcctcatcacctgatttggacacaatctctttatcaatgttagtttttcttttccatttaattatatatgtttgagtatgatgagaataagtatgcatggtcgtatattcttatatgcatgcatttaaataattacgtacgtgagtgaatagctgtataatatgcatgtatatttatgtattcatgcatgttttaataatataattcatgattgttatttctagttaattttggtacctaaaatatctatcttcattactaaatattaattgtacgtatgtttctcatcaacctcttttattgcctccttggataaagtaccaatattgtctaataaggataattaataaagtaggaaaaataaactatacttgcaaaattagaccattgctcttaggcatctttacagtaaccaacaccatatatattgatgtggcgcattacaattggttaataattttctatattattaaataaaaatgtgtgggatccaaaatttgcactgtaccacacctcttgatgatgcttcacaccataagagcatgtaccactttcaagattctttgaaagtgttggataataagaagaattaaataagaagctatatattatattatatctcaattgtacagtgatttttgacttggtgcaaaatgatgagattgcatctctatttataagattttatggactaatctagaaatattattcaatgattagcttctacattgttttacataatttcctctactaacacaagtgaaaaataattctaaaacgttcaagagtacttaaacaaacaagaagactctagacactttagtaaatataataatagtctagaaacttagtatcaacaaaaaaattctagaaattaactatattaaattaagtttaatatttcaacacccccttaaacttgatttgtgactccatatatacttcgtaatttgatgatatttctctcttgagtggcttcgtaaaaatatctaccgtttcatcttgagatttgacgtatttcactcttactttttttttctttcaatgtattctcttatgtaatgataacaggtgtcaatgtatttgcttctttcatgaaagactggattctttgctagtgcaattactgatttgctaaagttaggtgttagttgttgagtcgttagtgtgctggtcagcaactaactctatatataaggccccatatccttgt

SEQ ID NO: 228195 - DNA, 809 bp, Cannabis indica
tgtataagtgacactctttgctaggtgacgattctaggacggatgcttgaatcctatgaaggatgcacgatcacaatatggatggaaagtcctaaagtgacactatttgctacgtgaggattctcggacgaatacaagaatcctaagtagtacagaccctgtttgtaacaaagtctaagctacatgaccatcttatagatacaaaagtgaaggctcaattcacagagcacaaacctacatcaaaagaactcaacatagagcattacacataaaatgaaagtccaaaaaataacaagattcccatcataaataagacaaaacatcactcgaataaaataaacatacagatagattcaaagcaaactaacctgaagggagaaaaggactcttcaaacactgtgttgaatacctttacttttgttcacatatatgggatacttaaaagaaagaccaatgtaaggaggagaaaggtctgaaataatagaccacgggtctgtggtcaaagaaaatgagcaagagactcaaaataaacaaagcatgtgctttcgtcacctacttttgcactttatatagaattatataattaaattcaacttcaaaagaccttccattattgggcttagcattcaaaatatcatttttacaaatcaaggcccacaaattttagtcaaataaagtcatactatatatacttttcaaactaaaaatattaaacaatatacattatatgttctgagtacatatatatacatataacaaaatatcaacataaaaatatatatgtacattcttattcttattattattat

SEQ ID NO: 228196 - DNA, 1576 bp, Cannabis indica
taaacttgggaggaggtcaatctgtggaagattttatatatagaacaatgctaaatttatcagctcattggctgtaaaaaaatgctaaattagagagagacagagttttagaaatatgtaataacagttagagatcacaaaccaataaattagtttcatcccatattggacaagaaccaactctagtcctaatcaatcagaacacaactcaacccaacttccacccttttttattatgcatttctataatacaaacacattttataatgcataacaggtcagttttgaaaatgctataaataattctattagttcatttcaactggtacaaacttaaatttggtagctacattgttaaaggcacaacacaagttttgtggtgcgaaagccttcttttcgttatcggttatgagtatgtaaatcatttataatttcaatattttttgttatgacaatgtttattgttgttatagaatgttattttacaattcttttaaaaaattaagaaaatttacggtgtcgaaaatagggatcaaaatgttatgactacaatgaacaccattaaaaaaagactttcccaccatagactctctaataattatatatagattagtattttttatttgtatatatatataatggtgggtcatggtcaaattgaagcacatctaatttattctttctcctaaatttcttttttgtaagcatgttcacatatatgttcacacagtcaaagcagaacaatgtaaatttgtaacaatgttcacacagtcaaagcagaacttttgtagattttcaaagaaaaatcagataagtcatgtttgttaaaagtctttattactcaactattaataagaatctcacacaaaagtcttacaattacaagtgagaaaggaattaatttggtggttgcatatgtcaaaacaaggatggcctacctgagttgaaaaggatggcatgtgaatatgataagcttttatcatcactcatattcctctcattgctctctatgttttctaatccattcatacatttccattgatgtaagctactgatctggattggaacatggctgaacttgtgatcagcgctgttatctctgcttcttttgattttttgctgaaaagggtggcatctccttacttgaaggagttcctcaaagaaaatgaaagttctgttgtttctgagagacttttcaagttgaagtcaatgttaaactgtctagctgcagttcgtttcgaagtggagaacaagagaatcaaaaaccctgctgtggagaagtggctggacgatcttctggatgctatcgatgatgctgaagacttctttggtgatattgaatacgatgctatgaaacccaacaatgttgatgagtcaaagaaagctagaggaaaggcaagtaagttactctctcgtttctctaaaccttttaactcagctgatcataaaaggaacactaacataagaaagattctaaagaggttagagtacttagctaatcaaattggaaacttgaatcttgaaaagaatgttgatgaggcgaaaccatccgaaggttcacgtgtgaagacttctc

SEQ ID NO: 228197 - DNA, 1336 bp, Cannabis indica
gagcttgcgactccttcttctgtaaaccctctccaaaagagaaagattgaagatgtcgatcctccggtcatcaatttatccaagaagtagcatacagtcacctagggaaaaaggaagaaacctatgatggagccagaaactaaggcccgcaatttcatggtcttacaggacaaatatgtcagcgatgacttcgctgtccagatcaaggggacacatgccaaagaccttttggcacgatgttttgagtatatgattcaaagggtgactgtatactcgtgagctattgttgcagatcatcaagctcttaaggactaggagcttttaaagaagcaaaactctactctttaggaaggtttgaagaagggtaagcttgaaatggccaataaggagaaggacaagggagacaagaagatcaaaaagttagaggatcaaatcactaatcttactcgtaacttgaaaaacgaaaaagaaggaaggaagaaagcttatgaccatgccgttagtgactatgtctatactaccttgaccaagctgccagacttcaattttgctgtctttggtccagaggcaatcaagatggccaacgctttttgtaccatgtctctaactgagactcaaggcctgtccaatactcttttccctgaagaccttgctcctggagctgaagtcgcggatgccaccgagaaagttgaggagaatctcaatgcccatgctccttagaaaaagtatatcttttgtttatttcatttttaataacagtacaagggtactaacattttgtacttaacttttttaaaacaattgggattcacaccttttatgttttcacagtttctgaacaatatatcctttagagatatttatcaaaaatatttgcaaagtattttaatatgcagtttatgattttatgcaattgcaaatacaacttggtgcatttattatttagcactttttgcgatcataattccagcttggtgcaaattttaatttatgcgacctcttataatgtaatttataatatttcagtgttccaaaaataataaaagagttttgaaaattatataataatgagatgtgtgagtaattagtagtatgttttattagccgtaataaaaatacatgcatcctccctacacttagggatttgaaaataaaaattgactaagtatatacatgtgagtactgctgacaataaaacttcaaatgctcgacattccaagctctttcaaaaactgaatcgttaagatcagaatggcgataggttgcagttctaattttttcagcaatgagttatggaccttcccagttatcgccaaaaactccatgtgttgaattg

SEQ ID NO: 228198 - DNA, 1845 bp, Cannabis indica
ttttgtttatatatatatatatagaatatttataataaattaaatttatacatgagaaaatgatttttattttctcttttaaaactccacaaccaaacttaatggataccattgataaaaagctataaagttagtgagaaaaattaaacaatgcaaatgataatatttaaatgattaattaacctagaagattatttatatatatatatatatatatatatatatcttaccacacacatcagttgaagaaagagcaaaaacaaatcagagaaatcagagctaaaacaaacttagagaagatgaccaataagtttactaataataaagaccgagtggtcatgattcatctgatcatgaccacagcaaaactgggtcggttcaaaccgaaaccaggaagcatttttccgaagaaaaggaggtctgtgaagagcatgatggtagattccatactcaaatttttctgctacaacagagctgacccaattccagaaaaagagaccaaatacattaattaaagaaatatttatggataatgggtaagtaattttagtatttaataattaattacttattatgtacgtttaatcagagtcgttaattggtgtgagttccactcttagctttatatatgtggatttacaacaactaaccactctgatcaatattatagatcttaattaattaattactcgatcaattaaatgtatgttttaatagtactactttggagtttgtttaatgtaatatcaattaataatgcttctatttttgtattatataataaagttatgttgatcttaattattagttaatcattaattaacaatggctgcttttgggattttaattactactaattaattattctgctaattaatcaattctagacctacgtactgttattgtttttggcttttttcagttgggttttaattggtattatttaaacatcaagagacacaggttctccttgctattatttttattttaaaaataaaagaaagaaagaaaagctcaataattatgttaatttgggggatttaattataattatgcactcaaaaaatgttgtatataaactaggagtgttcatctaattcgtaattcgtgatttcaactctggttcaatccgattttaaaaatttcggtagcggttaaaccaattcgtataattattttatatatacttaatatgtattttttttggtcaaaatattgatattttggaacaattttaattagaatattgatattaactacttattgttattgtggaaaaattacgactaaatgtgtagaatcaaatcaatgaaactctaaacaatcaaacgattagcattgacaagattaaaaaaacgagaacaacaattgaaaattaacaaaacaggagcaaacagaatatataaaaccaaaaacaataaatgcagaaaataaaaaaatcaacaacaagatatatacaagttcaagtccgatagatcgatgtgatctacgattctactctagttctagaacactaccgtaatccttctttgttgattgagcaagaataaatacaatacagtcgagacgagattttctattgagtcctcacaaagtgtttcaactctcacactttatacccaagaatcttctccatcaatagaagattcttcttacaaaatctaaatccaatctctctcttttctcaggacctctctctctacctctcaattttctcaaactctcattctcatctctaattcgtaagttttgttctcctttcaaaatgataagtgaaggtagtatttatagacttaggatcaagattctaaagttagtggcggcaagaaatgaggttgttaagtt

SEQ ID NO: 228199 - DNA, 1763 bp, Cannabis indica
aaaaaaagtaaaattttagtgagatattttaaagaatagagtggagaagctttagagtgctctaactaaaatagttgtagcctcgaacttgacgttgtaaggtggaattgaattgcacaatcaaatcataaattgcacttaaaagttaaaacctttggtttgaagctcaactactacttctacttggtactactacaaaaacgagttttgataagtttcattccatctacttcccaactactctgcaaaaccaccacaaacacaatgagcttatgggactactggattgaggaggctctttcaaagctccactctttgcaactcctccgttctctcagacccatttacctccgcaatgaaccacaacaccccaccaacactacttcctcaaaatcatcctttgaagatgaattccaggtgttcgacgaaatgcatccatgggaccgttcctccgttgagattcagatttccgatgccaccttccagaattgggtccatcacatttcttcttctggtactttctttcaactcatcatttctagctctgttatcttgaaattttttagattttaatgtttttacctttatgcttttgggttgtgcaggagatgaggctgacagtagtggacatgttttagctgattctgaaacaggggagtgtcctcggcttttcaagaaactacttttattttctggaaatgattacttgggattgagctcacatcctacaattggaaaagctgctgcaaaggtttgatgatttgttatcatttgtggaagcaaagcttcatagttatgcgttttcttaagctaaaagaatcattttatactatataattaatcaggcagctctaaaacatggaatgggcccccgaggttcagctctaatatgtggatataccaattaccatcggctactcgagtcatgcttggcagacttaaagaataaagaggtataataaggtgcattatagatacttgtttagaatacatatgatttgagttaatgcacaaggaattgatcttgtgtcccttgactaatgcagcatttttcttattgttcaataagaaaagccaaaatgaataattaataccataaatatggctatgatctttgtttatttcttcatatttgacatgtcctcaatttggtatttcaaatgaaaaactgatggtcttgtttgaacataatgggggtaggattgccttctttgtcctacagggtttgctgctaatatggctgtgatggttactctgggcaatgttagctctctactagcctctggctcaaagcctttgcagcatgaaagggttgccatttttctgatgcattcaaccatgcttcaataattgatggtattcgtcttgcccagcgacagtctagtgtagaggttttcatctatagacactgcaacatgactcaccttaatacactgttgtatgtcatgctaatttctaaagcattcttgcgtgtcttcttttgagtttattcatacacacatatgtgtatatatttatacgtatatgtgtatatatttatacgtatgtttggggtaggttcaattaacataaaagtttttgcacacactttataccgtgataaacactagttaaaattgaaaaatgaaaatattccatctgtgtatgtatataatttataacatgtgctttaatttcaacagtttgatcaatttggtctaacagtgtttatcacggtgtaaatatatgtgtaaattgaacttatccctgtatatttatgtatc

SEQ ID NO: 228200 - DNA, 1047 bp, Cannabis indica
tattaccataaaaaattaaacttgagtatttatctaaaactagagtcaaacttaagtattttatactacaatttactcttaataatattaccgcatctgtatatgcaaattttgcgtgtaaaaattgtgtaatcaatcattactcataagaaaatggtaaaaccgttaatttgatacagtaaatagtaaattccatcagcccattccgtatgacccggcccaattaaaaagcccattactgtaggtgggttttaggggggtttctttctcctctaacctcagctgagtcccaaaatacctattagccaagaaaaaatggcagcttcaggaagatcaacaatggcggttcgcgccttcttgagagctacccaaagagtctcaccaccaccaagaccttcgcttccatcacctttcctacctcctcctcaggcccaggctcgaatctcatcgactccattgaggtattcatcgtcattttttcgtatcatttttttttagtagtaattgtattataaatttggttattgattaaattggaaggcttttgaggcgagaattgagctcttttagacctctacatagtgccatagcttctgcttgccttgtctcgaagcttcccaacgatgtggattcgtcttctgatggtttgttctttttccctttctcttcaaaattgtgttcttttatgcaatttcgactgtattttttcaattcgagtatagttaattggtgattgattgtacttcatttgaattgtatttcaatttcgcgtaattttactctgatcaacaagccataattaggtggttatagtaagaatttaacttggtaatctttaatattctagttccattatcttacatgagttttgttttgacttagataagttgattatcatgaataatttagacttcaaattggtcttttaccaagcaattttaatgttagataaattaataatcccaagatacaaaattgtatataatatagaacataataataatagagaataattaagtatccgtacttgattgatccataacaatt

SEQ ID NO: 228201 - DNA, 927 bp, Cannabis indica
cttctttttctttttaatccagtgaaatgctttcatgtttgacataataaattaaaaattatttttagttttaaaaacaaaaattatttttttgttaaacaattaggatggtttagtcttgtttttgaaaacatattttagaaaataaaattacaaaaaataagaattttaggaataataaaatgttgttttttgttttaaacaattcactttttcaatattgcttttagaaaacattaatcaaatgtgacttatgttttgaaaattttaaaaattaatttttgttttcatttttaaaaacattttttatgaaaacaaaaaagaaaaaacaatatcaaatatacccgtaatgttttaagctatatttagatatggaaaatgtaaaggcacttgagctgccaaacatcacaaacatcacaaagtgacgtattgttatttgtgtattttaatatgaggtttcacacataatttttttaatgaaaaatatgaaaaaacactaaccaattataatgagacacagtggccgatctagatttaagttaaggggagcaattactttttttttttttttttgtaagtgaggggacgtctttgtttcctacattgtataacatattaaaaattaatgtaaatttatattttagtattaaatgtagtataaaataaataaaaataacaataaaagtattgtattcaataattaagacaccaaatacaagtttttattagtagatgttcaaaaaataaaattcaaatgcttaagtaaatataattttattgggattagaactcataacctctatgtggatgaaatagctttaccattatgtcaaagcttgtgttatattaataaatattactttatttataaatatacattgtaactagctaaaatgcatatatatttttttttcagattatttattt

SEQ ID NO: 228202 - DNA, 1345 bp, Cannabis indica
tagaacctaaaagatctgaaaagaattagttaatttataatctgtcattcacttcaagaaaatgatagcaattaggcattaataacattgtaacttaacaacaggattctcctccctaattacgtagtgatcataattttcgtaacactaattaataataaaaatacatgaatggaaataaaaattagtaactagttactaataataactaattaatttttagtttaattcagataaattttacttaatcaatttcatccaaattgtttagtggtgatttttaatgttttgttattaattcaatccacaatcttgcctatcatcatatattatttatgtgaaatattgcatacatttaggtattgtattaattttgttattatttattgtattaattttcacaatttttttttttgttcttctcaagtctcaaattgcaattaattgttcttgataattttctttgtagcttagatcaatgaattcatcactcacatatatattttaatcaattaacgctcacttaaataaatttatgtaacagacaaacatgtttcaatatagtctttagtaggaatattattttttaattaacttgggtgccacgtaaataaaaatatcaacatattattcttatacgtacatatattatattaaaaattttattgattatggaagctgattttattgaattattaataacacttttttaggatgggacaaattaataggaatattaatatcgggaaaatatctatagttagttcctattcttggggcacaaataatgtaatgaggattttacgtacattttattggattgattttccattaattgattttttgaaattaaattaaaaaagttagttagttttcttgaaaggcaagaaattaacagagttatataaagggatgttaggataggttgggattcatttggtcgatcttctcctttgttttctagcccaaaatatagagagttcccactgcattaccaccatggaatggaagctagccttctgttggtaatgcagtgcgaactctctacgttttgtgttagatcttccctgtccctgcttttgaatattgcagctgagaccacgtacccacaataatggcagagccaacaaggtgcttttttcttttgttgagtgaaaatgacaatcccaactttgtgtttgtaggtacgagggccaattgtgtttggactccttcagacttgtgtacaatctgatgggaaagctgttttctggtattctccgaagagaaaagagggcattgctttgtcatctataatgaaaaataaaatgacgtagataaaggcgtagtctttacaagtattaac

SEQ ID NO: 228203 - DNA, 2107 bp, Cannabis indica
aaaattttaatttatcacgattttcgagaaatcctttgattagcaaaggcgtgtactaattagaaagtcactatagcgtgcttaagcattagggaattacattgctccaggctgttctttagcgtatctttaagagtttggttaaccacttttacttgtccatttgcttgtggggaagcaaccatcaaaaaaactcttaatgatttcgtgtctatcacagaggtcagtaaagagattgttgtgaaactgcatcccgttgtctgacacaattttttatgggagtccaaggcgaaaaatgatgttcttgaccacaaaatcaagaactttctttgatgcgattgtggctaagggttctacttcggccaatttggtgaagtaatctaccgccactacgacatattgaactatgccttttcccttaggtagtgaacctatgagatcaattcctcagacagcaaacgactaggaagttttcatactcttgagctcatttggggcggccctaagtattttggagaatctctaacacttgtcatattttttgacatagtccatagaatcttcaatcattatcggccaaaagtacccttgtcttaatatatttttcaagaggctttgcccccagtatggttgccacataattcttcatgaacttcaatcatgagtaatttggcttttatgtaacaaaaaataattttaatatttaatagtaacaaataattattttttcattaatttgaaaagaatttttttttttgagaatattaaaataagggcatttagatatgatattttgggcctcttactgtataatttatcgtattctaatagtagcaattcagaatatattatttatgtgatatccttttaattttttttaaaaaaactataaactgaacatctaaaatataaaaaatataaataattttgataattaatattaactgatagtcataaatatttgttactattatttttcacttattgggggcttatacttagctaaagaagttaaagttcaaaatattgaaatttagagcaattcccaattggtagtaaatcaaatatctagagattaacagacaaaagatgagaagatagacgcttacgtttctggatccaaagaattttttcaaaactttaagagatataccatgaaacaagtccctcgggaccagaatgcattcatggatatgttggcaaagctagcaacatatccgacgattaaatagtacagagtggttcccatagctcacctagttgttccaagtacagaatcactgaaagtaaatgtcattaacacttatataaataaacacatatatgtataaatttctcaattttaacttgaattttgtatttttaatgggataggacaagttttgcacaataataaattcttattatagaggtgtgtatagaatgcaattgtaagtaaacgtcgttaatcattctacctcatggatatatcctatatatatgaaaatcttagcttttaaatataacgataatccttcaaacaaagggttcacaatttatttctttcaagctaaggctgcgaataaaattcataaacagtgcaaaaatacttgtgtaatactcaaaggcgccttttctagtcaaataatattgacttgtggaccagagtttgttaatactcgaaccacgtagaaatcttcgtctaaatctcaatattttatctattttctttggctttattatattttacatcgattgtagaaaaattcgataaacaaatgcatattcatgaatagattttttttttattaaatagtcatgaatagattaaatgtattggattagttgaagttgcatacttgcaattgcattctaagcacacctctataataaaaacttattactgtgctaaacctctcttatcccattacaaatacaaaattcaagttaaaattgaaaaatttacacatatatgtatttatatatactaggttcccatgaatgggtaatattagaaaaatttgactttttatgattattttttctatttaattagaaaaaatttcttatttttacattatatgggctagagttgttacattagttgaaaaaaataataaaaataaat

SEQ ID NO: 228204 - DNA, 2172 bp, Cannabis indica
gtatccaaacaaagctacaccattgtcaaccttgtaggattccacaccacctacctccgatctaacaccaccacccctaattggaagcacaaaaccttaaaaagatcgtcgagtcttcgatagagtcacacaacacgtcgaagaaagctcacaagctaaataatattaaaataataatctttgattggattttttttttttggaaaaaaagattttcattaaacaaagcaatcgttcaagatacaagaaactagcacaggcaaaacaaaagactatcaaaacacgatcaacccataattgagaatttttggcaacaacattgtaacgccctgatccttagggacgccacatgtatgcttttacaaacttattatcactaatatattagtttaggaaaaaaaatgtggtttaatttaaaacctttggtaaaatttaaactaaaaacttttattacaaatacggttgtaatatggggatcccctgctaataaaattcttttacaaccaatttaaaaaaatcaaggttacatttccaaatatagaaaaaaagggtcaatcttgcttcccggaagccaagacaccacggctgatatgtacagtgctggaagacctctggctcatggctaaacacatttgctagtcttcttacctgcaccatgaagcacccgtgagtcacaatgactcagcaaaaaacgctactagataaaatttcatggaaagtgctagtagatttcatgataatataatacacataccaataggtcatacatattcaatgtatacataaaatttaacgacaatgcgagcacacttattgcaaaattatgaatatttatagctattcataatcaacaatctcagtgtttcataaaacacatgcatcattataaacatttactttcagtgcttcataaagcactataattcacacattaccataaccacataatttcaatatcacataatctcagtaccacataatcatagtgccacataaactcaatgcttcataaagtactctaacaaaacatcattataaacatgtattcctacatcctgtaaatttttgagactgcacgaaaagtgactaatttcgtaagcagtatacaatttgtttagtcacactgtacaaatcatatttgattacaactcatcacataataacatgcttaatcaagttcacaacattgcaatgacacaatcttggtacttcataaagtacccaccacttattaaccacgagctacgtatgtcactatcgttgcccgatacagcgaacaataagtaagaaacctatccgcggtttcaggagtaattactcatagccgtaatgaccgtttcttttactcgaacataattgagtcacaacgataataattgtttcatatcatttccctcgatcataatcgagtcacaacgatgataattgtttcctatcatttccctcgatcataatcgagtcacaacgatgataatcttttcctattatttccctcgatcataatcgagtcacaacaaatacatatcattaagctcgattaagattaagtcacaataaacacatactagaatcttgaccatactcgagactgtaacaatcataactttaaccatatacggtgcttaatacatttcttacctcagtccaaaaattaagcgtgcatgtcagcctaagtggaaaataaagcttgatgaccccgggtcctatgtcacgacaacaaaaaaccaataaataccttaagccaaaactttgggaactaaccctaattctcgtaatcggacaaaacctaacttccattagctctaaaataagccaaacaacactcaaatagcctaaatagatattgggtacaaccccgagccaaaaatcagttccaaaaaacccaaaaatttcccctgcagggcaaccggtcgacaggttctggcaaaccagaaaaattctgagttttctttcccagctcaaaaccagaaccaaaccagacttgtttaacacttccagaacagttcaaaatcacagaaataacatactcagactatcgattcatcacaacccaacgaattatacaaatacctatattaacaaacactttaatgaccactttgccctttttacacctttaaacttaaaataaaatccaaggggtaatttagtaattttaactaatccacaaaa

SEQ ID NO: 228205 - DNA, 1389 bp, Cannabis indica
atagacttgtgttattgtgtgatttatgtgttaacctatcatcactcaatttttaattttttgagatgaatggtaaaatataatttgcttttttttttcaataattaatttcattattggatgtatgacgcatcccctacctaactcttttgaggaattccattccttaaatatgttttggcttttagcttaaaccagtcaaaatcgtgtcagtttttacaaaacgtacggtcgtggccaatcttcaatataattacactcataattgtgttcttttcgccataaatgaataaataaaatttgaagaaaaagatttcttcagaagactgacgtcacatccagtaataaatacagccacttccaaatgaagaattcaagcagaaaaaaaaaaaaagaaaaggaattctctacgggtgagatggggtggccacgaaagtgtagccaataatgtatccacacgtgtacaataacacttcgtatattgtccgaatttagtaactcctttttttccttcttaaattttttaaggaaaactaacagcacatccaatgcaggtgcctaagcttggtgatgtggcaatggagattgacatttcgtgaagggtgctttgttcattctggtgtgaagtgtgtcaagccaataaatgttcctatttcgcattcatgccactaaatctttctttgataaatatcacatttttaagtttgtatgttatttatggcaatttattacttttgattttttttttggatgagatttgatatgctacatttatgtaaacttgaattttaaaccctatttttcatattttctagttgagtcataagctcaacccaaaattatagggcaacagtttcgtctctctcaatgagatgatgccccaccttcttcatcttctatttctttttttattaatttaaacaactgtcatgctcttgtgagtattgtcattatctaaaaatttttatgtggcttcaaaagtatgttgacttggtgcatggtatgtttaatgaaagggatgctaacttgattcttaatatttccttgtcttcaagtcgtttatgtgatgtttggtattagagttgggagagctcggaccatttctcagtaaaatcaatttatatgttcttacaattcagcaaagagttgggtgcacaggatgataatgccgtcttttagaatactctttggaagctaagggttcctccgaaagtgaaagacttgttatggcgtgctgccactaactgtttgcctacgaaatccagacttcgttctagacatgtgcatgttaataccatctgccctgtgtgcaaggtaactgatgaaaccatctaccattgcttggtggattgttcttttgccaaagcgtgttggcaacaattggctgct

SEQ ID NO: 228206 - DNA, 1280 bp, Cannabis indica
ttcggtttcttcagtttaggaatgagagtaataagagtcttattgattgctgctgggttgcctccatgatttaagacattcagaaccacttgtgtaaccaacgagccaaccacgtcccaattgtgttgataaaacatagcagacataccatcgatacctggacttttatctgctcccatagtttgtaaagctaaaaaaacatcatcctttgagaactcttgcagaagaaaatcattatgagcatctgtaatagtggttggaattgtagacagaacatgatttagagcccaatgatcttcatcagaagccttgaagagagcctcaaaatatttcgttatgattgaagcaatatcatcttttgaatgcaaaatttgaccagtagcatcctgcaatcttctgatatgattattttcttttcttgaagatgccttagcttgaaaaaaatttgtgtttcgatctcctgaagtgagccattccactctagaacgttgctgccaatattgttcctcattagccaaaagctcatctaaaatagcttcagtcgagtttatgttttttgaaaaatcactgcctggattcaggttgttatgtaactgttgcactcgtgattgagcctctttaatatccttcttcatatgtctgaatgtggagttatgccattgctgcaaattctttgcacaatcagctaaacttgctatcaattgagaaacacaatgagcactagcagtttcgtttccaatccatgaatcagctattaattttgaacattcaggagaatttaaccacaaccgctcaaattgaaatcttgattttctcctttcaacagtgtgctgattagagaaattaagcaccacagaaagcgctctatgatccgaaccataacaatcttcatgtgagacagtaggtggagtcaaattgtccaaccacacataattgacaaaacaccagtcaattcgttctttaagggcagcaggatttttcctacttcttgaccaagtaaaatcatctccattaaagggcaactcattaaaacagcattggtctaaagtaaatcgaaaagccaccatatgattatcttgtcttaaaggtccactatttttgtgtgtatgtgaaaaaatttcattaagatctcccaacaacatccaagggtcaagaggagaaacatcacgaagtattttaattagagtccatgtgtgttttttattttctatttcaggaaaaccatacacagcagatagatgccaacgaggaccattatcacacaccaagtaacaatcaaa

SEQ ID NO: 228207 - DNA, 4662 bp, Cannabis indica
tgactaagtggtatttttgtaaaaaaaacaaacatggtaagtacaaaagttgatataggcgtgtaggagtatttttgtaataaattgtgtaaaatggatttttcatgtaaaaatttcattattataatatataataaataactaaatacattttagtaaaaagaataatttattatggaatcttttaatcaaaacaactttatctaaaagttagattgtaccaattttagtttttaactttagctttttcttaaatttttcaataagttgtattttaactgcttaccaaaacacttttttatcataatttttttaaaaaataacttttaattttttcaaaaactgtaccaaataggtcctaagtaatacaataacgatttgcaaaaattgataaattcaaaaaaaaattgtcaagaaaaaagttttaaggactattttactaatctgaggcaacatgtaaaaaaggaaaaaaaaaaaaaaaaaaaaagactagttggatttgttttatttgcatagactaatagaagttctttcaatgtgagatatacaacatatgatgaaccaagaatatgatggtttactagctaggcgaatcaatctcataatgcataatcataaatcaacaatggttattccttatacaagtctcaattttgtacaccccaacctcacaattatatcatcactcctccatatcctaatttccatggaactggttgtgtcagcttaaatgtctataaaccatgttacttgaaaacaactatagagaaggaatatgctctttcttcttcacataaaacttgttatgttctcctcctcatcacttggatgaaaaaatagcttctaaatctttgtataaagattttggttttgacttataatctgaagaggaacttacatttggactaccactctttttggctccccaaatctcactccatctagttcgactcgttgaagggtcacttccagttccatctttactaaagctagctttagccatttccctcaattgtttcatccatggtttttcggttgaccctgagctcctacttgaacttttaaattctccaagtgaaggagtagtgaaatcagattctcctctcctgggctgtgagaacttattttctagttttttgatcattttctgtggtgagaatggaagtatgcaaccaattgaagctattttcaagcctgttatgaaagatgtctcagcagggtccaatatcattgtctgtctgtataaggcataccactcactgattatctgggaaatatatccaactaggaatagtataaccatgaatatcccaacttgagtctcatggctagatgaaagttcattcccgaacaggaacaaacaagtagcaaataggccaacttcacaggcaaccgagattatctcaaccagttgaacctttttcttgataaatggtttcttgagaactatgaagaaaagctgaaaagaggttatgcacaataaggttagtgatggagttcttgaagaccaggtctccatatagattccggccatgatcgctagtgaaactcgtttcatagattcaagcaatgtgtagtatattctcaatattccgaacagcttttgtatgaaaggtgcttctgcatcttctgtttcatcatcagaagcaatgatactatcgtcatgcttgtgaggcaatggagttcccccagaaatctgtgagagcatgtactttggagggcctcttagatcttcaaatagggggcctaagatgatcatgtagagtgagtttgattgccttttccaagtccactgacccctcttaccaggaccaagtgtaacacgaataagttcttgataccaatggaatgtctggccttctcgatggacttccttgtactgaagtagcttcccaaatgttattccaaacgagagaaatacgagcaatgacaacagcagaaatgacacgacgcttaacaatagaatgccaactataacccctgataaatccattccttcaatgaacaaatcaaaataaacattaatgagaataatggagagtcctaaaacaagtgaatttataaaatcttatgtagctaatacatagaaacaagtgaatgagtcttaaagcattttccatttttgaaccacaatagtctatgaacaagaaaagccaaaagctgaagggcattgaagcatgtaacattgaaactacctttaactagagcagcagaaacctcagaaagacatggaagtgctagaatgattagaaatatctcaaatcttaggaatgtgagtgctccatagcccttctgattttcagtactctttttccttatcttcagaatgaatatgagtaaaacatgcagaaatactaaaccaccaccaattaaagctaaccagaacatgcttctatagaaattcttccacctacaaaaaaagataaatgttatagataatgaaggaaaaactaaaattgagtaatctattaagcatgaacactgatctttttgtgaaactttgattgatgcatttgactacatattcctttagtctgttatagtgtatctacatgtataagcaataattccaagagtaacatactcatttgagtcttgaggttctaaaagattttcagcttctggtttcatattggggttctgcaatgacaaatgtactcatcattaatttccatttcatactaacagaaggtcaataggaacaagaaaggttagcatttatacctcaaaaaagaatctgtagtccattggcccaagaggtagcccatacacttgagtagtcatatttgaattatctttttctagttgcaggctttggaaactttctgagtcataaatcttggagattaaagaatctgagccggtaaaaggactagagcccaccattacagggctgctgtgctcattttcccaggggagatcaaaatagggaatactccactgtaagcctctagtaaattcataatactcaactggcaacataaccgccaaccatctagaaagtgcgaaaacctgaatgtggcaagcaattctctgaaagaaagaaaaaacatatataaattactgatttagtttctattttaaaattataaggttcagtatcatacaaatagatttcttgcgggataagttgtcaaagaagatggtcctttaaatgtccaaaacttttgaaggcttgcagttgaaaaggtgagaatcccagccacaactgatgttgccaaaaatgaagcagttacaagtgcggaaatcacagaagatcccagaggtactgaatctgtacaacatgttcacacgtaaaacttccaagaagagtaacatcctggcaatatctatcttggtacagttattatagtgctatcaagtgaagtcaaataatattcttacagtgcttcacttcaagaacatttgaccccagatttttgtttccagcaacatctttagtaacattttcgggaacattgacagatactacatcagcacttggttgtatgtcaatgatgtatgtgttccaatttattttctgaaaactggagaatgcaagagaaaaaaattatataataaatttctagaaggcacatctgtctacattatcaagaacattgcttacatagctaaatatacatgcaaatggctacaaaatagaagaagaaatgaaggttggaaaaatggaatattcatgccttttcacaagccctccagtgactgatacatgagaggagttgaagccaaaaacaggtttcatgaatataattgatacaggtatgttgtgttcttttgtccttgtctttatagtagatgttgttctcaacttcacagcaggcctatgacaatcttgagttcatagcacaacaatgaaatcaggaatcatataatttaaaataaaatacataaattgtgtaactatagccaatatcacagtcaagatttgagttctttactttcttttgtttctcgaaacaaaagcagcaatttttaccataaaggaatgttacaggtgaaatcggagaaactggagttccttgtctgcttattatgatatttgggttgatgctcaatgtgactatggaattgctagatacatcattaacctgaaagaaatttaacaggtacacactaaggattataacttagtacacattggcactaagagattataagaatcagcaaatacgccatgtacaaaaaagtaagaactatgaaaaactgaccataaatccaaatctttgattccctatgttctttccatttataggaaggagtgagccctggcttatgttcaaagaccttagaacttctgcagatgaattcaggattggttgtgagaaatacagatacactttaaggtgattgaaattatttgttgccagcactgatcttgtttgaccatcaagttcaagtagctgctctggaattcgaatccttatgtcgacagatacatctcttctgtctgcacataaacccatcaaaaaaaggggattttgaataagagacaatactctgctgcagaaaatgaaaatgaactataactcacttcacttcacttccagaacaaaaccatactttcacttatcatggacaagcatactcaccaaaatgaacaaagaaaatcgaatttgctgttctaatgaatctgtttccagcaatatcagtgcagaaactttt

SEQ ID NO: 228208 - DNA, 661 bp, Cannabis indica
gttggtgttagtaattctttaacaatatgcaaaatcaagctttaatttcagagacaaaaatattacagcatattattataagtgtttaaaaattgatctaaagaaaacctttgatgattcaaaaggaagaaactttaatagccaatgaccacagttactaaaataatcacttaatttcgatcagattttagatagcaatacactaatacatatgagctaggattttaatccaacagttgggttttggcttggacaggcaacacttgatgcactttcgtttgagctgcctaaagcagcttcaagatttggaggggtctcagataaatgcttggtcattgctggtaaagtgattgaccggtttgtgtcattgtgtagtcctcgagagatgcttcccattctctgtgaggtatgttgttttgggattgataattggaatagcttagcttaggtggtagagtaaatttatgttaatacttttgtttttatgggtctagtgttttgctgatagtttgattgtaattggagcaggcattagattccccaagtgaaatgaacagtggttctagttattttgtccctcttctaaatgggctttctcaaggtaataaggatgttgatgttagtgattaattggttggatgcgttattgttctgataatgt

SEQ ID NO: 228209 - DNA, 1917 bp, Cannabis indica
cattaagcactaaccaacactacaaaatgatcttaaatttgatggttgagattaaagaatggtccactcttatgtcatcattctcagcatccaacaattttttgtaaacccttttttttataattattattattattatttttgaggtaattttttttttttttttatatatatatatagtcaaaaagataacttacaagaatgtcatgtgttatgtgttttggataccttgaaagcaatagaagatgccaagggaacactcaatcatgtcactattttatgtggagaacaatatcattacccaaaaagctgagttgagctttaactaactagggttgagctttaacaaactaagattaattaattatgctttacacataccaaactaacccacttaattaattaaagttcttgcatgtttataacattaattatttattaatgaactctatatagattagatgaggttttcaacaagtcccaagtggatgactttttttaggtcatggggacatgttattagttatgggtctttactaataggatgaaaacatcatacttgtggattgttgaaaatgaaagcttgacttttaataataaggcaacaaaatttacttattgtacttgaaaaatttctccttttgaatgattgtttagtaaaatgccaagtagaaaataaagctttaggaaattgctagtatatgagtttgtttagactttaaatgacattttaaccctttctagaatggtttaaatggaagactaatagtttgacttttattggagagaaaatatagtcacattacatggaacttgtagaagagacattgattaaattgattatcatattaattactaagcatatgatgtaagtgatatttaggcttagggtgtgtatagtaaaatgaaatttagtttagttgaagaagaaatatcatatcttgtaataaaagctaaaaaaaaaggaattgttgatatgatatgtaactaaagaataaaagtaggtaagactaaatataaaccgaagaaattaaatttgagcaaagaaagacttttgatagtgactattgggagaaaggttagattagaaaggaagaacaaattataaacatatgaaaggaaacttcttttttcaacatttcaaggcagaaaaacagagaaagataaataccaagaacctcataatctgatactccaaaatctcacatgtaagtacttgttgttttcatttggtttttaatgttaaaatgttacaaaaatcattattgggtgactatcttaaaaccaagcccaaattttttaatcactaagcaaaattttttaggtacctatttctccctagtggaaattacaattaattacatataatttatggcaatttagtcttattaataaaatttggtgaatttgaatctagagtatcaaagtatatgtacaatttcaaataacatgtacccaatgagcattattaagaacataacgtatcaagtatatatttcaataaatacaacctgccactttttttaaaaaaatcgctttggatcataaggtggcccaataatgagaaaggccagatattcataggcccagtagcctccatacaaaaatccatttcttccaagaaaaggtgcttgagtttactaactgaaacaaacatgtcgtacaagtatagtaaggccaactccaatagtaatatttaaaaggacataataattttgagtgtcactagtggttggctagagtttagatgacagaactcttgcctctaatattaactcttggttgttgttgttgttgttttcttatggtaagctctttaatttagagttgccaacttcgaaccactgtcctattttgttggagccaaactttgagcattttgtaattcgtgtttgtgaaagcaatttacttgtttgg

SEQ ID NO: 228210 - DNA, 1885 bp, Cannabis indica
ctatagtcatctataaaatgaatatagtaacgataaccatgtcttgatatagttggggaaggaccccatatatcagaatgcatcaattcaagaggctgtttggattcttttaaagcagcaggatatggcttgtgatgagcctttccaagttgacagctttgacaaaaatgcaagttagaaggtaaagattttttttcattatttaaaacatgtttgagtacattaaaggaaggatggcctaacctatgatgccacaaacttgattcattgacagaaattaaaaaacaagactcattagacttaacgctagggctgatattaggtggtttaggtgtaggttgatggctgtgattgctgtgacttttagattgtgatgctggtgttgtgagttgataaagaccattgttaagtttcccttgaagaagcaccctcctcgaatccatgtccttcaaaacacaagagttagcatagaattttgcataagcattattatctcttgtaagttttgaaacactcagcagatttttagcaatgtttggaacacacaagataatgtttaatttgactggtttggatctgttgctggtttttataaccgagttgcccatatgagaaatagcaagagattgaccattacctactgtcaagcgagtcttaccattgtattcagttgaagcttgaatgttgttgacattatcagttatgtgattagtggctccactatccacataccagctattgtcatctggccgagggttctgagttgagttagcaacaaaggcctactggttcatgttgtgatgattgttgctggtgttgaaagaagggttctgactctgattgttgttgttgtttgcagatggtgtgaagctgatgtcgaaacgataataacacttgctggctgagtgtccaggcttgctgcacagttgacatgttatacgcccctgatttccacgtccacggccacggccacggcctcgagaaccggcagatctgcctgagttagaaagaggaaaggttctccttccacgagcagcaaagtttgcagatggggcaacaagatctgatgcagcagtggtgttaagttgatcaatgcgcatttcctgactttgtaagaggaactgcacttcagacagagttaaatggtatgcacgagatgtaaggttaataacaactgagtcatattcagctccaagaccccctaaaatgtatagaataaggtcatcatcactgaatgtttgaccagcagagttcaaaccatcagcaatggacttcatcttgaggatgtagtatggatggtcatcgacccctttttgagagattgcaactgaaaacggagctgcagtatgcgagctcgagattgtgttgtaaagagattttctagtaaagaccagagttcataagagactcgacagcgtaagacatggccaagcatggcctcggaaatagagttcaaaagccagctcaagatggcttggtcagtgcgaacccaaagagtaaattgaggatttacctgctgttgttgcaaatcgggatttacctcatctggaacatcgatgtactgaggtgggactggtcttgtaccaaaaagaaagccgtctaggtcatgtgcacgaacagctgggacgacttgagagcgccaatagggatagttatccctgtccaaacgaatactgatgggtgccaatggttgcagcagaggcacgagcttgactggtgcagttggtgcgagagctggagcttgaggaggagcttcaacagcttgggatctagcattattgactgaggaatctcctggagacgccatacccgctctgataccaagttaaaacaggaagaacaatactaaaggtagctaaaaaactaaagcagagtaatattgcag

SEQ ID NO: 228211 - DNA, 1736 bp, Cannabis indica
tatataagttaatttagaattttgtatctaaattttaatgtatattaaatcatattttttaaattttttatgtcgttaaaaattctccctaaactattaagattattaaatttaatgacttttgtttaacttcattcaattttgctaatatgtcgattgtctatatattaaatcgtgccctcgaactttgatactttcaaaatcatgccccctgaaatttaacatatagctctaaaattttcattcatgataaactttttttaataaaattaaataaaattttttaaatttaacaatctcaataacttaaaaaaaaaaaatttaacaacttaataagaaaaatataatttattacatataaatctaaattagcatattataattattattattattataatgaagaccaaatgttaagtcagcagtcaaacaataggaatctaatccaagattttatggtcatatcataactttgtagtttgttataagaagcatagagtggcggttaagtttatccacaactagctattatatgctgcggccacctctatttttgttcccctgcacctttcccaaaatccggcccattcgaagcccaagaccaagtccaacgccgacacaaaacacagccccaaaagtccatacataggtaactacgcattattatttatataaatatttaaagaaaaaataaagtaaaaatctttttaatatttaattcagtggttgaactaatttatgaaaattttatctaaaaggtgtttgaaaatttagattaatttgattcttttgacttaaaaggaacattagtgattctgtgattttctatgattttcctcctttttcttttctttttttttgaaaaatctagaaacaatgaaaaattagaaaataaaataacatatcaaccactagtttccatacaaaatttatgtgcattttgtggttaaccgttaagcttttatacgtaatatttatagagaaatacagtagaacttttatttaagaatactctattcaagaataatctttaatttattatgaaaaaaataaagtcccaatttgggccaattataaataagaataacctctctaatgtaattagttatacattttttaagtctagtattaataaaatatacctccatataagaataattatatcttaaaaaaatatatacatatattttataaatttaattatgtagaattaataattttattttaaattatagtacatgtataaatattatatgtactcgaaaataattctaatataatatagtattaagaattatttattgatatttttgttacattgatatattttgatattttaatttttttttcaagtgtaactctatttagttataacttctcaattagaatattattttcttggttccaagtgtattcttgggtagaggttctactgtattaagaaatagtagtgttgtctagtactcttatatgtgttagtattgttattggtctaattaagcatgaagttctatatagttttatataagagaaatactaaaaggcaccagtgctgccaagtaccctcttacatgtcaatatcgctattggtctaattaagtatcgggtccaatatagtttaatataatagattttaaggagtatcgctagtcaatcgcaagacgacacgtcttaagggtactaggcaccattggtgcccaatagcaatgctctatatttaagaagtatcgctagcc

SEQ ID NO: 228212 - DNA, 1201 bp, Cannabis indica
aaaaagaaaaagaaaaagattttaccagtgatatccagctactggtgaaaacttgggattaggaccaactctaacaaactctccatttaaacactcctgtatacacaattaccatagcttaaacacaataaaagcactcaacaaagtgaattccaatccaagaatccataaccagtaccagaaattatggtttgaagctataaacacagtattcaatcattacaactctaatcaacaattaactgactaaaaatcactacacaaatcaattgaggtttagcaaaaccacagtgattcctttccttcctattactgtaacagagaaacagtgtaataatcgaaatgtaccgggaggtaaccgatgacagggaggtctttgatcggaggagtttcatcgcgaatgggagcaaagttaccggaaagatagtgttgaggctgagaagagtcgtacataaacttaacgatgaggctctcaaggaaatctacgagcttagaagagagacctttgttaggttttggattaacagagacgaatcctccattagcgcggtcattgtcggagctagtcttggtctcatcgagtttcgccattgttgtcttcttcttcttcttcttctttttcagtatttaaagctcagaatttctgataatatcaactttttgttcagtggagctttggtgacgagtttgccacgtggagctttaacagccaatttaaatttaataattataataacaataattaaaaataaaaaagagtgagagaaatgttaaaaaaggcatctagaactatacgatgttccatataattaagataatttaattgcagccttaatacttaattacaataatttagtttacgattgatctaatacttaattatactaatagcattataatactgagaagagtattaggcactagtggtattttttagtaattcttttaaatttttaagtagcattgttattgggcaccaattgtgtctaacactttcaagatgtatcgtcttttagctagcgatcctccctacaagttattacattaaactatatgagacttgatacttagttgatacggtaccttttaagatttttttttaagttatatgtatagaacttctgtaaatattagtcattaagtgttaaattattatctacgtgcatttttattagtataatttaattaaattttaaataaa

SEQ ID NO: 228213 - DNA, 1448 bp, Cannabis indica
ggtagttaaaagaacaagatacaacaaccaatacaacacaatatcttctacatgagaactcaaattgttccacaccaaagcatttcgagacttccagagagaccaacacaacaaaacaacctcactcaatttcccggcctttactcaaccggattcaccaccaaatgacccacgatcatcgagttccaacgtagagcaaccaccctgcattccattaaaaaaaatatcttaaatttataacttttaatttttgcttttttctttacatttttttttgtgaaatcctttttatactatttttcatattttctagaaataataatctatttttatttttattttttattcaaaataatttatttatattaattaaaatacatctattaaaatatatcttacttcatatatatttttataatgtgagaatatatttaaaaaaagtgattgtaaatctttcatgtatattaaaaataaaaacagggcatctttatatttttttaatactttcatataatttttagaattatgtctttcatataattcattcaaataaaaaaaacaggtgcaaatatataatactctccttttaaatattatttactttgaccaatatttaccctcttgggaatttcactttcacccccatgtttgaaaacctacctaataccattttctttttcgaaaacagacctaataccatttagatagcattaatttatcaacaaaacacatgcacatacttatttaccatttattttgggattacaatatatttatgtatatatatgattagttgcactttttgactctcaaatttgctttatgtgaattctttgtcacacaatatatatatgatgtatatataaaaatagtactccaaaacacatatgtctttttttttcttctctctttttgctgctataaagtaaaatttgaccattaattagtctatgagctttgatcatacaaaatttattatatagcaactatatatgaaaaccaaaaaagtatagtgtgaatatctaggacctttttagaaaattgttaaaataaaatgtatgaatcttttgtccattttagatttcttgtcttttaattcttgttttcttcacgactcattcttggaatatttatacaaccgaggagattgtgtaatatatattttatacatatatataatttactccaataaatatatatacatgtgttaattaacatgtccaagtgatcaattatttgtggggccaggccatatataatatagatgtgtataattattttgagatagtttaaaaaaccaattatgttcttgcatgtcaataaattacatatatgtgctatttacaaacacactaaactattttgaaaaatatataattcagataattgactgactctactatacttgactcacatgatggaaaacactaacaatataataatatata

SEQ ID NO: 228214 - DNA, 1086 bp, Cannabis indica
ctagctagtcatcttatattatagtgcatgctatatttgcaagagcaatttgtcgcgaaattattttttgttctaatttctatatacttaactctcttatttttttagtagcaaaatttctttaagtttatttttctttgtaaatttgacatgccagttaaatattaccgttaaatatcaactggatgatcactgtatacacctatgtatatgtaatagtttaactttgaagtcaatacagtagtaatctaattagtatttaatggtaatatctaactgaaactttaaatttgcaaaaatgtaaacttaagggaattttactacaaaaaatttaaaacataaagggagtagttttgccgcatattcctctatttgtaaacgtatatggcgaggtcagccaaatataatagggggcaaaatttaatttattttttaatgaaaaataataaatatatattcaggaagaataaaaaaattcttataaagataaaataaaaatatgtaggaataaaaatgaaaaatataaagttttattatgtgggaataaatataaaaatatgtaagaataaaaaaaatataaatttcataaaaataaaaatacatgataataaaaataaaataattagttttatgtgagcaaacattaaaatatttaaaacgttttatataaaaaaaaaaaaattgttgggtcatgtcgctcctacatgaccccttgtacttgtacatatttatttcattttaacttaatatatatttactttccagcaatattaacaatatctaatattatattacctttggaggtgtttgatatttaacattttttataaaattaattcatcaggcatgtactttataaaattgagcaatccacggcgaaattatcttgtgttttaatttttatacactttatttttttttgtggggttttttttaaaattttgacacgtcagttaaatattatcattaaatatcaactaaataactactatatacgcatgtgtatatgtatacagtaaatctcaaattagtcgatacaatatttaattggtatttaacagtaatatctaactgacactttaaatt

SEQ ID NO: 228215 - DNA, 2132 bp, Cannabis indica
gagagatttgagccaagcaagtttagcaacaacattagctaagctcctgtactctgcctcagtattggatcttgagactgcttgttgcttttgagacttctaggcaatgagattagatcccagaaatatagtaaagcctaaggtagaccgtctgtcatcaacatcagatgcccagtcagcatcacagtaggcttgtattttgaaactagaagcctttgtaagatgtagaccatagggagttgtgcctgccacataacgaaggatccttttaactgcattccagtggtgttgtagaggtttttgcatgtactggcaaaccttgtttacactgtaagagagttctggtctagttatagtcaaatactgtaaggctccaacaatggacatgtacatttggggattaggaaaaacttatgcaaacattttctgaccactaaccattggtgtggagataggttttgcatctgtcatatcagctctagagagaaggtctgtagcatatttggtctgtgatagtgtgagtcccctggttgtttctgcaacttcgatcccaaggaagtatttgagttcacaaagatattttaaggagaaggtgcaattgagggaatcgatgagtgaagcaactgtttttggatcacttccagtgactgtcatcaacatacaccaaaattagtgtaatggatgatgcattttgtaagatgaaaagagagtgatcagatttagatgatgtgaacccaaaggacagtaggcactggtgcaacctttcaaaccaagctctaggagcttgtttgagtccatacaaagccttgtgtaattttcatactaggttaagttgtgttgtatcttcaaaactaggtggttgtgtcatgtatacctcctcttccaataccccattgagaaaagcattgtttacatccaattgtctaactttccaacctcttgtaatggccatagttaagacaactctgatggtgattggtttgacaaccgggccgaaagtcttagtgtaatcaaagccaggttgttggtgaaatccttttgcaacaagtcttgctttatatctattgagagagccatctggattttcttttattctgagaatccatttacatactatgggttctcttccttcaggaagtggcactatagtataggtcttgttccttattagagctaatatctcctcagacatgactttcctccatttttcatattgcattgcagatttgaagctcttgggaatcttttcagacaagagtacttttggtttgtcaatccatgctttagccctggtggtcatggtatgtgtgtttgtggaaggaattgaagtggaaacagtgggtggaacagcagtggactcaacagatacatttgggacaggtgtagaggacatgttgtgttgagtactggtgatattatttgggagagagggtgatgaaggagtttcagatggttgtgaaggtgtaatggttggactgacacacacaggattaaacagaggacactgagttggaatggagttgacaggtggggtggtttctggtgttggaatggtttcagaaatgtgtctggtgtcatattgggcagctggtataagagcagaaggatgatattctattggtgtatcagtttggttttggaatgttgtggcataaggaaagatatgttcatcaaacttgacatcccttgagatgtagacacggccagtggaatctaagcatttaaaacctttgtggttaatgctgtagccaagaaagatgcagggagaggatcgaaactgtagtttgtgcctattgtatggtctaatgttgggatagcattgacatccaaatgttttaaagttagagtagtcaggttttatattgaacaacatttctataggagatttgttgttcaatataggtgtaggtaacctgttgtggatgaacactgctgtcctaaaggcttgatcccagaactttaagggcatagaggcttgagctaataaagttagaccattttcaactacatgtctatgctttctctcagcaaggccattttgttcatgggtggtgggacaagggtgtctatgaatgataccaaactgattgagatacggagtgaaagacctgtattcacctccccagtcactt

SEQ ID NO: 228216 - DNA, 2821 bp, Cannabis indica
agaagcttaagaatgatatcttgatttgaaactgaagaccctgcgtcaataagagagtttgcgatcgattgggctttgtcaacatagtccgagatggaaagtccacctttgcgaatcatggagaactagcttttcaattagagaagagtggcggagattttttgttcaagagggcgctagacagagtgggaggtggagaagttggaaactgaggcaaaaacaccttcagccatggaagatcgaagccaagacagcaatagttgatccttgtgcttccattggctatatttagggttaggttctccattaaccaaggtggacgacggaggaattttgatgagaaaaatgtcattaagatcatgacctatcatggtgagaaccacctacaatttcaaggacaagaaattagtgtgatcaagtttggtcgttaacgcgtggaggtgagggagctggagaatggattccaattagaattggtttgatgttgcagcggtggtttgagtaaggaccgcttgagtggatggagctttggccagatttgtggaagaagatttcatgggcaacgtcaatcaaaggcatctaatatcatgtaagaatttcagaacagggaaagaaaaaaagaaaatatttagctaaaacaaagcctaactttattaaatgaaagaggtccggtgtttaaaccaatacactgaaccataatcaagaaagcaaaccaataaaaagttacagtgacaagtagaaacagttaaagaaagctaactgatttaactaatttcactaactctatttacatgttagatcccctcttgatggtaagcttgtataaatactcagattgttggaataagagtataagcttcttctccaattatttccatctttgtctttcattctttctttgcatttcttgtctttctacactttagaaatgtggagattattggagaacattgtcccacataaattaaatgtaaaagtattgagacatgagctactccacttattactaatttgttttaagatggaactccatgattctcaatatggtatcaaagtcatatctcttccgggctttcgatccatacctatctagatggttagccagccgcgcgcacgagatccagatggtgcaaagacgcgcttgatatccgaacaaaaataagcaagcaaatgacatggcttgtgataagttgattgaagattggtgagcaaaaataaccaccatcttgaggggaatattggagaacattgtcccacatgtaaaagtattgagcaatgagatactccactcatcaccaattaattttgagatggaacctcataattatcaataaagataattcaataatcctcttaagtagtgaaacattttctcttatttgattaataatggcgtagaaggaatggaacactaaatcatatataatttaaatggagttcacaagaggaaaaaaagaaaaaagttcacgagattgtgtatattaattaattaaacacaaaaagacggctgtctaagaagccttttattctattctcataaaaaaatctcattttaatttctttctttatatttattttcaaattaaaagcaataaaagacatacaaatacgaggccaaagtggggttctaattagaagactattaaataccaaaacacaagatatcttttctgactatatatgtctccacccaagtacatgattaatattaaggtatttatatatacacacatacattattgttattattattattagattccactttttgggtcagtaggagatttgaaagagaaaacgtttatatatataaatcctatttgcacctaataaaaaaacaaaacactctcatacatgttaattttgttgatataacattcataatttgtactatctatatatctatataatcctgttgttagggatggtgatgtggcagcaccaataatcttctttctctattctttgatttctcatttttcttaattttaaaacttttgttaatatttttttatattcaatacaaacattaacttataataatctaataataatagttttattttattattattatattaaatgaaacaaatttgtaacagtcaaaagaaagcatcaagaaaggaaaataaatgcttctatgactttttcaatctcattcattgctttcttaaacttttcacattttacatttatttgtttttaattatttttatttaataataacaacaataataataatattgctttgctgcaacttttatttttcatccctcaccattaaaataagttgttgatgtacattctataaatttttaaatatcttatataatgaaaattacaatgttaaaatcattaaactatctttttgtctttttgttttgtgtacatgaaaacgtttttccaatcattaaaacatacactcataaagttgtaatttttaaacaattaattaataagttacggtatttgaaaagtttaaggggtttctataaatattatttgtgtaacatttggtagagtatattttctataaatatgtcttctcttttgagtgtgttgtacgtgtaaggtggtgaaacgtctttgttcttgatcagattgtttatgtgtgtgctgtgttttttttgctgcgtttaagattgttgagcgtactcccagtggtgtttgtgtcgggtggtatggcttctagcagtcatgtgttgggtgatcttgctgatcaatacgagaatttccagattgatgatgaagaagaaggtgtattgatcgagggggagggtgagggcgaggagcagatctttgatgataggtggtgccttgt

SEQ ID NO: 228217 - DNA, 1286 bp, Cannabis indica
tcacatcagctctttttagctcactatctctaaatcaaaatttgttcttttggctcgtcttttttagatcgatttttaaattttgatcagatatttgttagagtttaggttggctctgataccatattagactttgtacaatgtatatatttctatcttaaaattcaattggtaatgaaaggagtagtccgtgaatcttatatattttattatctttcaacatgttagcaatatgagactctttaacatccctcctcaagaaagtagatgttttttgctcaccaatcttgaacagctcaatcacaaatgactctttttggcttactatctccaaatcacaagcgactctttttttagctctacctttttggatcggtttctttggattttttgcggctgtttttcttggctacactttttttttctcgatctgctttttgtttttggatcgaatattcgttaaaagttttttgtttttgctctgatatgatgttagaattgtaagatgcatgaggttctatctcaaaatcaattgacaatgagaggagtagctcatgcatcttatgtacgatatttagtttccattcattatcaatgtgagactctaacaataaccactattccaacactaactttgtcgctttcaatatccatagctacaccaacatttaaattcatctttcctcgtagggatggcttccattattcctcaacagctgagtaatgtgcctctgtattaggaactattttttaattgagcctccctatactcattgatgtaatcaacaacccactaaaatacctctttcgcttgaaagtactttgatccaaaaagcttcgaatttatgtcattcttagtcattaaaattacacctaaatagttttcacaatcagatttatttatagtttttaaaacatttaacatgtaatctttaatatcaagatgtttgttttcatcataaaagctcttaaatggtgatatgttttttttttcatatttctctagctctaaaatgggtcattatttttgaccaattggtacaactagattagatggtcttaaaataacttttttatactataaatttagatctgtaggtaagagatgtttgtaagtcctccatatcaaatgttttattttggagttatccttgtatgcataacaaaaccatctcctaattatgttaagagatgaggttggtggtacagaaattgtatttttaaatgataggctaatttaatagtggagttaccagatagatcatatccccaaatggtatagtcag

SEQ ID NO: 228218 - DNA, 4965 bp, Cannabis indica
atagatcaattaaaggatggccagggcaattgggtcacatgggaagcgggcctggaggatgttatgaaaaattattttgagagcttatttgattcggctaatacggattgcatggaagttgttgattgtgtttatccaactatatcgactgagatgaatacagatttgggtcaacctattgaagaagaggaagtgaagaaggcgttgttccaaatgcatccggataagagtccgggaccggatggcatgactcaggctttttatcagaggtgttgggatacggtgaggcacgatgttgtggcgggtgtccgatcgttttttaacgatggtagtttggaggatagttttgatgaagcaaatgtggtactcattccaaaaaagaaaaaccctgaagctatgacggatcttaggcctattgcactttgtaatgttatgtataagataattacaaaggtcatggtcaaccgaatgaagccattcattgattctattgtgggtgaaaaccagagtgctttcatcccgggtcgcttaatttctgacaatgttctggtgtcttttgaagtattgcattatctaaaaaggaagcgtacaggaaaagaaggatacatggcccttaagcttgacatgagcaaagcttatgaccgtgtcgaatgggcttttttggaagcaatgctaaggagattaggcttcgcagagaaatgggttcaattgattctgaaatgtgtgacttcggctcaatacaagattatccatgggagccatgaaattggcccaatcactttttctagaggtattcggcaaggggaccctctttccccttacctttttatcctatgtgcagaagggctctcaacgttgttgagacaatatgaaagaagaggatggcttcatggttgtaaagtagctaatggcgcgccaaggatttctcacatgcttttcgttgacgatagctatttatactgcaaagctactgaagatgaggcaaaccgagtaaaagaagctctgcacaagtttgaattagcatcgggtcaaaaggttaatttctccaaatcttccattttctttagtaggaacacttctgaagtcttgagaaatcgcctttgtggtggcttgggaatggaacccgctttggaaggaagcctttatctggggttgcctagttccatgggaagaaacaagacagctgctttgaactatttgaaggagaaagtgaggaaaagattacaaggctgggggtctaaattcatctctagagcagggaaagagattctcattaagtctgttgttcaagcactccccagctatgcaatgaatgttttcctgttacctgttgagattaggaattaattctccaaattccagttaatattgcttctaaccaagaccatctggtttggagtggtgaattatctggtttatactcagtcaaaagcgcttacaaacgcattcaggagatgaaaggtttggtgaatatggaggagtctcaagtaaactggttctggaagatcttttagaacttaaaaatgcctccaaagatgaaaaacctggtgtggagggcgtgtacaaactgcctccccacgatggtacaactcagaatcaaacatgctgtaagtcatgttctctgccctgtttgttcacttcatgatgagaatataacacatgccttagtcacctgtccgagggtcaaaatgtgctgggaaaacgttggtatttccacggttatgtagcagaatgaaggttttctggactagtgcgtgcgaagcttcaaacagctggaccgagacaatagagaactgcttgtagcagttgcttgggcggtgtggaatgcgagaaatgaccgtgtatggcaaaataaaacgaagactgtggagaacattgtctcgtcagcaaaaggttacctttcacaatggaaaaatgctcactctgctggtgcagagctcttggctgccggtttaattcaaggagatggagccgagcattgggtgcttccaaatgcaaatgaagtaaaggttaatgttgatgcagcaattttcgaaacaaatcgtcaatttggagtgggttgggtggcccgtgaccatcaaggcttcctcattcatggtcaaacaaaactgtttgatgcttatgctactccgatgctagcagaggccgtgggtattagggaagcactaagctggataaagaccagtcgattacagaaggtggtgctcgaaacggattgcttgtcagtggttcaagccttaagaagttcaatagagatgatttccacgtttggtcaagtggttaacgattgtaaggttttgcttaatgatttaagaaatgtttctatctattttattcgacgatcagcaaatgcggtagctcatgagttcgctcaagcttctgtatgctaccctgattgtaatttcaatttgaattctattccaactactttgttacttgttttggtaacagatttggttatctaataaagtttgatttaccattcaaaaaaaaaactaattaataaaaaagatgtgtatgggtgtgcatatgtagaactaacattgttttcaattgagaaattattttgtatgtgtatgcatatgaagaataaaatggcgtttctctttgatcataattagatgctttaattttttgtattgaaagaaatatataacttataataaataaattttatctatcaagaaatataaataattaaattttaaatctaaactcgaatgattattcctcatgactataaacaattgaacttaatattttataaagtaaacgtatttataatttcatttgaaaaaaatatctataattaacttttttttttttgagaaaaagaccattacattaattatagaaatttacataacagtcataagtggaggtggaatttcctccaaccaagaacaatcagcatccaccgtaagagcaaacttagccaaaacatcggcataagtattagcagatctcctaacatgagtgacctgtgctcgtgggaaaaaggatactaaatagttgacatctcttaacatagaatgaaaagcagaattacaatgaagtgcagcttttaacccctgaactactaataatgaatcagtttcaatgaagtcagcagttaaaccgaggttgatgagccattgcagagataaagccatagcagtagcttccatctcttcaggtttgaaacacccgataatcgatttggagaaagcagctttgatatagccattggaatccctcaatacagcacctataccaattaatttttgagatctattgcaggctgcatcagtattgagcttccatttgcccaaaggaggtgcaatccaaagagtaggagagggtgcatttgttgagacaaatgatggagtttggtcgcaactgaagaaccagcagtatgctggtgcgaattttgtacagattgagactttgtgttggaagaaccagcagcatcctggtgcgaattatgcacagattggtactttgagttgtagccagtagcaaacatgaaaagagcagcaggctgcttgggcagttttccatgaaattcagcatttctctcaaaccaaatgctccaacaaagagtgagaaactgttcaaacgctggtgtagataaattggctgagacatatagcagaaactcctctgatgtagtggtagcagctagtttaaaattcaaatcatgaggaaagagactccaaacctccttagctcgagagcagagaaacaaggcatgatttattgactctctctgcattttacacaatggacagaatggtgattctgcaatatgttttcggtttagttcagcagccacgggtaggacattgtgatatactttccagacaaatatacgaagtttcgaaggtaaatgcaacttccagaacttagtccaccaattttcacttgagaaagtacttccaggatcattaagttcagccaaggaagaggcaaagtagtacccagatttaaccatgtaattgcccgagtttgtgccattccaaattaacatatcatctgagggatagatggcaagagggatggaaagtattctatctatgtcagcttgaccaaagtttgccgagatagcagttaaatcccattgtctatgctgggtgatcagatcagctacttggagtgaattatctctgcctatgaagttaaaaggtgtgaactcagtatgaccaggcagccacggatcagtcttgcaaatgattcgatttccattgcctactctccagcgaaggcccttagcaagaagttctttgccccatacaatgcttcgccatgttaatgaaggacaggcacctaaaccagcagtaagaaagcttccattcaaaaaatatctatgatgcagaatacggctaagaagagagtttggtgattccaatattcgccaagcttgctttgctagtaaagcttgattgaaatggatgaagtttctaaagcctaaacctccatgaaccttggctttacaaagtgaattccaattcttccaatgaatagcattgccagttgatgtgcccaccagaaattagccatcatgctctcaatttgattacacaaagtgacaggcaatcgaaagcaactcatagcgtatgtagggattgcttgcaccactgctttcagaagtacttcctttccaccagcagaaaacaattgctctttccatttactgaggagcttccaaatcttatctgtaatcccactgaagagtttagttttatcacgaccagcaaaggagggaagaccaagatattcctcatgacaaggttgtataggcatgttaagaagctgttggaaatagtgttggtgagaaggccttgtattcggagagaaagagagcacacatttatccggattgattgcttgaccactagcctgatgataaatatgtaacacattttgaatagagttggctgattgttgagttgcacgacaaaaaagcacactatcatcagcgaaaaa

SEQ ID NO: 228219 - DNA, 747 bp, Cannabis indica
ttagtttgcacaagagatgcaagttgaaaattttacttatgaggaggtaaatctttcacccacacttcacttttttggcgatcaacgagaaaggtttaattcattccaatgattcgcgaggtagttcgcattcagtatacatcaatcattcggtgtattcttcgaggagtaaaatattaagatgaagctgctcggtgaaatgtaataaagatccagatcatagaataaagattatttattttaaatgttggttgtaaatcgttcccacctatttgtgaataaatgaaacgcgaggaatgttcacgtttcataaacagttacatagataaaatcaaataactgttatctaattcttataaataacaggttcatagaggtaaaagacatgactaaatttcagatttaaagaacttctaccaatttgtatctctattcataacaatcttagacataacacaaactcgtgaaatatgtaaacttaattacaaaactacattaaaaattatgtcttttattcaatattagaattcattgctttattctagattatatacatttaaagtattaattatctagcctcattcaatgttaacgaagtttttgagttaacaaattatatgtctaagtcaaaaaaatttattgttgtcaatctaattttttttggcatattaatgatatgatacatgtacatagttataaatttgcaaatgtcgtacttattattatattcaattatgtgtccaatgt

SEQ ID NO: 228220 - DNA, 755 bp, Cannabis indica
tttttttctgaactattgagatttttggatttggaaacttgttgagaaataggatttgtgcatagtcagcagtatcatttccatatcagcatccgtataacaactttctgttatggcgtcattatttttattgattctgcaatcattagtgtcctttgtattgtcagaatattccttattcctttttgtatttggctgacagctgtaccctgaccaacggtcctttactgtatgtaatactctgctataaatataatgaatagcagctctctttaattgagctgagaaatacatttcaatcaatatcaaagtgtgcttgattttatcttggtatcagagccattctaaaggcttgcgcctatggctacaccaacctctggtaatggagatcaaaaccctgctgcaaacccaacagcaagctctgctaatagctctgctgttgtgggaaatgcagctaacagaaatgacaacttttcctctcaactcccaaatccatacccacaacactttagcacactcaatcaacctttttccctgaaactagaccgaaataactacaccctgtggaagacaatggtctccaccattgtaagaggccatagacttgaaggctttctaaatgggactcgtgagtgtccaagtgagttcattacatctggtcctgctgatggtgaaactggaccagaaacagggattcgtgtgaaccctgactttgagcagtggattatcaacgaccaactgctaatgggatggtt

SEQ ID NO: 228221 - DNA, 1272 bp, Cannabis indica
taagatcctggtaaaataatattccaacactcttctctaccacaaccagtgttagacgcaactagctccctgttccacatggaattatgtgtgggctggttcaaatcgagaccttcctgttcgttctttcgttccctgcgaacacgattattgtttagacgttcattttgtcgtttattcgtagtagttacccgagggtttcctgaatgcgtgtacgggactcggggtggacgtcgggtcctgactctcccattaacttcaagctgcaatgcctgcatttgttcctgcttggccgtatattgggtcgttgtcagccggataattccttcagaagctacgggcagtgtgaagtggcctacaatggctgttggtgttgatgtttctcccacatggccaacagtttctgggaacaaattgagaggagtgacattggttcgtcccacagccccattaattgtgttagttagattagctccatcacctgggagtggaacaagcattgtttcgacattgaaaaatctagtgtttctgtttgtctggtttgcagccatactgattttcctccaaaatcaatagttagttcccatagacggcaccaaatgttgttggagaaatttggacaacaccaaataaaataagaatttgatatttaactaaaaaaccgcgagatttcaaccgagaatggtgagtactcaaacgaaactgcccagacaaatagaatgtaatgaaataatgaacacaaagaagaataatagttcagtcagatcatggtctgcttagtccactgttgcaaaaatttttctatcttgtcctattcatgttggatcacttcttcatatacaaagcaagtgtccctttagtttacacaaaacttaattggttatagaacagttttacattaaatagaaataaacgtacatagaataaatgaagaacagtttaaatccattttactaaatgcaacaaaatatgcgacttctatagtgcaagttgcatgttcatctactcgcacaagctcccaggcttagggtgtgttttatcacaaaggaggctatcgggcctcgtacttgggtatctgcgtcctaatcaagttgcatatgtggataccttatcaacattgataacataagacatgcgagtccttatcgagtcatcaagtatgctagatcttttggaccaactcgttatgatctttactaagtcgcatcatgagaagtctatgtagtcatcgcagatatcttggtatatgcgcgacttgtataaccctttctt

SEQ ID NO: 228222 - DNA, 1359 bp, Cannabis indica
aaaagccaaaataattattttttctcttataaaaaaactgattattaaatccctttcacgttcatgtcacatcgaggtactgcagaagaaacaattacaaaatctgatccaatttatcttaaccgattagttaacatgttggccaactatattatgtaacacgaaaaaaaaatcagtagcttatcaaattatctatcaagcaatgaaaaagatttaataaaagacaaacaaatcccgactcatttttcaacaggcacacagtcagaaccctaggctcttcccattgcttgggatcttatagtttcatgttctaattcactcacaattgggggttctttttacccttccctcccggtactacttcactatcgattagctaggagtatttagccttgctaggtggtccttgctgattcacacgagatttcaggtgtcccatgctactcgggtcaaagcataagctagtgatactttcagctactagactctcgtcatctaaggtacaacactccaccattttgcctagcatcacgaaacttgtattactctcccacaaccccgtttttagggtttaagtgctctcatttttacttgtcgctactacacgattcacttttgctttcttttcttctggccactaagatgttttagtttgccaggccgatatacttttctttcgtgcctttcttcgttcatggttcgatattctagtgtcctaagcgtagaggaaccacaccaatccatcctgaacttggtggttaaactctactgcggtgacaatactgtagtggaggtcctacgaaaaaatagctcgatgccaggatgataaaaaaagtaaacacctttcattcttattactttcatcgttaactatgaaaaagaaaaaaaaatagaaaatgaaaagttcatcttattcaaaacccgattgtattgtaaatatgcagttacgagaaatctagcaaaagtaataggaattagacctaagacaatttcaaataaaaaacttcaatcattttaatttctttgaaagaggaaaaggagaggtattatgaaagcctttcatttacttctcttcgatggaagttttattttaccataagatatcctaaattttggcctaatttttcttctggtgattgattcaacctctgatagaaaagatataccttggttatattttacctcttcaacaagttaagtaatgatcagcataacaactctattgttctgatagagagtgatgaggaagtggaggggacccccctcggggtcccgtggttgcggcgcgaggaggtagaggggacccccgattggggtcctgtagttgcggcgtgaggagctaggtggaggggaccccgt

SEQ ID NO: 228223 - DNA, 1933 bp, Cannabis indica
gactcacaagccactcgacatgcgtgctacaagggccactcgacatgcgagctacaaggggccacctaacatgagagctacaagagccattcgacatgcatgccacgaaagccacttggtaggcaagctacgagtccactcgatgtacattcactacaattaatcattgtaacaaatcgtaatgtccctcaatgagatgaccaacacttggtaagttgttggacaaagagccaaaaggatagtgcacgtgggtacacaatgctgtctgtaaagtctcaaaacggcgagacgaaaagtagtggaggcgccacatttgcaacctctaacgtcttgacaaggagtacactacaaccatgaatcctacccattgggactacttgacaccaaacaacaatacaaagtgaaagactacctcctacactttcaaccagcaggatcagaatgtcagcttgtccctttgggggaccactagtgtatttcaggccattacaacctataaatacccctttttatgacttgagaggggatcagaaaatcattgtaagaaagacacataaagagtaatacaaaatttctatttcatcttctccattacttctctgcaagttattttatatctcgcctaaaacttttgattattcaaccatagcttggttgacgaggtttccttgtcaccagtttggtggtgtttgtggaaataacaatgtttaaagttgcgttgattccttgttatttcaataacatttgaagatgccaagaccttcccgacgtctaccttgttggtttttatggtccataccatggttagaaaagttgaagcagattttattaaaaattatttaatccagtatgaactataatcccaaggatctcaaaataatatatatagattaatctaagctacatgaaaagaaacaatatctgttgtaactatcaacgtctcctcgctatcttttcgtattaatttatcgaacatccaatccaagagcttgttgaagagttcacaccataatcttccaagtcatcctcaacactcaagaatagagggggctattagatttaactagatgagtataattttgtaattgctatagatgtaaatgttttgcctagaaacttgagagcattttcttaaaaaaaatgacatgtggatccaatctccgaggaaaggatgaactattaaataataactctcaagggattagcctcgcttgatctgaacttgaaagatgatgcgaccttcacaggttctagtcgcatgttatgcgttgcatagccaaagacaagcaggactgagagaattttatacaagtcgcgcatatattgaaatatatgtgatgactaagtagcctatcactcaggacacgggtcgtcagcctgggtggagagaggaaagagcgtaggaggaggaccttgagcgataaaactcgtagagtaaggctcaaccacgaacagaggtaaatgaaggtgattctcattcatcctccagttatagtagcctcttagagtttgtaccaagtcaggatgtatacaaacaaggcgtggagggagatatcatgtgcacagaggtgatctacatgatcacctcaacaaaatatttagggtgcgatcccaaacgccaataaatcacaatgataatgaggagcctcatgatccccatatgggagatcaaggcactaaaaatttaaataactcgactaacccaataaacctaccaatcgcaccagctgcgaccagagaggtggtcatccccacaaatatagctgcggtagccactatacttataataaatcagaccaatcccatatttccaggagcagttgttcaagaaagcctcttgcaagcattgagactaatcaggcagcagagaaagcccatttacaaacttcatgggacatcactctttacaaaagaggtgcggcaagccagattg

SEQ ID NO: 228224 - DNA, 3462 bp, Cannabis indica
acaaaacacagggtccaattggtaacttttgtaaaacggatggtccaaaatggtatttaccctctaaaataataataatgaattttttttttatttaagtatttatatattataatacataaattaagattggaactaaggatctccaatatacacatatctttttatagcgctaacctcaagtggttataatggaatgatttaggttactttttttttttttttgaaagaaacgtcgcaatatatctaaataaatgagttagacctcgcggtcattacaaaacagatagtcaaggatggaggaaatctccaccatacccgaaatgttccgagcaaaggctcatttggctacattatgagccgcaaaattacaacatctagaaataaagaaaaattacaacataggaattgtttagagagatgattacaaatggaaatataattatctaaacaccaaaaagaatctttctcggtaagtgcgttgataaccttttgcgaatcactctcaatcagaacaaaaagatgccttttcccgaccgccgattctaaagccaaccgacatgcctccgtttcaccaatcaaagggtccacaaagtcaagaagcttggcagcaacccacaaaactgtccctgaatgatcccttgccaaagccgccacacacatagagttgcaaccgaccttaacatcgcaattgattttgatctagtctaccggaggaggggaccaaccaggagacaccaaagccaccgccggttcaaacaaacaagacacataatctgtgtaacaaaaggagatagaatcaatagcatgattaatgttactcgaggagttattatgtacctttcattgcaggtcttccagattgtatccacaattatcgaagcatacaagaacaatctgtcagtatccactcctctagactttaagttccagataaatgtaacccaatcccagactcgggcaccagactcaagcaccggataaactgcccaaggggaagatctctaaagatggtacgcgaagctgtaatataggagaaggtgttccatcgtttcttcatccgccccacacagagggcaagttgtgtcttcaatgctcattctccgagagagaataacacgagtcggcagggcacccgagagaatgctccaccaaagaactttatgcctctccaaaatttttgagttccagagtttgttccatctagcaggggcaacaacacaatcaggatctctctctaaagcttgaagcaagtaggcggacttcgtagtaaagtgaccattagcctcttttgtccaaatccacttgtctttcccgatgccactcggtctcccccctttaatgatgttggcaatagtttctgaatcaaagagggttcggagaagcgggatgttccaatctccgttatcatgaataagatcagctactttagtcacccctccttagttgtggctattggcctttgggtagaaccccttgccgcgggtcagtccagatattagtctctttcccatcagaaatctttttacacacacctttcttcaggatatctttggactccgccacattcttccaaaaccaagagtctgaacttttaaaagagcactccaagaacggctttcctcttaagtacttagctttaagaactttacaacataaggattgctcatcattgaggagagcccaaccccacttggccaataacgcttgattcatttcaagagtctttcgaaaaccaagcccacctctagattttgggaggcataagcggtcccaagccttcaagcataagcctcgattcccttgttcacaaccccaccagaagtctctgatcatcccatcaatttcggatgccaattttttttgaaagtttggtcgtttgcatagtgtaaataggcatagctagcccaacagacttgattaaagtagcccgccccgcttttgagagagattttagcttccacccatgaagctttgcgaccaggttatcaagaatgaagttaaagtctgcatccttattcttggatcgaaatagtggtaggcccaggttgttaatgttggaagaggccagattgagtccaagattttgcataatgcctcttttcatgccctccgtggtattgttactgaaaaagatagatgtttttagtttgttgacactttgcccgaccaatcacaaaactgttcaatgcattgccaaactcctttggcctcagcaatcgtcacctttcctacaaggataagatcatcagcaaagaaaagatgtgtgagtttagggccatttctgcttaatttgatccctccaatagtgacagagtccaatgccttctcaagaattcgagacaagatatccgctgcccaaataaagagatacggggatagaggatccccttgccttagcccaccctccgggattatcctgctcaccttttccccattgagatacaaattaaacgtcgaagtggagatacagtggtaaacccaattgcgaaacttatcaggggccttaaaacttcggagaacgtgatcaataaattgccagctttagtttatcataggccttgacgagatcaattttgatagcaaataaaccctccatcccttttttgagcttaaaggaatggatgatttcttgaaccagcacattattgtcatggatactacgacccggaacaaaagctgcttgggtagggcaaatcagtctggagagcactggtctaattctattggcgatgattttagagataaccttatagaccacattgcaaagagcaataggtctaaactgcgtaactctattaattagccaccttggggataaggatgacatttgtcgcattgatccccttatgcattgtcccagaattaaaaaagtcttcaaccgcttcacaaaagtcacctccaacagagctccaataatgtttaaagaagaagacagacatgccatcaggacccggggccttcatactacccatggagaagagagtctgtctaatttcctcatgctccggaaccaaaacaaggtcagttcgctcccttggagagagatgatccataattaggtgatccagacactctaaaggaccctggatcgggttaccaaagatgttacccatgaatttcaagaattcattacccatctccgatctgttagtcaaccaacgaccatttttactcaggatactctccaccatatttctcctattgcggattgtgaccgcaatgaaaaacaattttgaacatttatccccctccttaatccaagagattcttgatcgttgttgccaataaagagtcttctgccttaaagacccattgagagccttcctgacctcaacctcctgggcccaactcctagaacagcaggcatactttgaatattcttgagttggctttccagttgagagatacacatgtccaatttaccaaattgcagtttattccatctactaagactaagac

SEQ ID NO: 228225 - DNA, 810 bp, Cannabis indica
aaaaatgtttcaatatgtctctcctattttaaaaaccagattacttctcccaaataatgattatatttctgttcatcaaagtggatctatagctgttaatgaatctttagttctctctgatgttctttttgttccaagtttcaaatataacatcttatctgtcagctgcttgactaacagtggggctgcttcagttaaatttcatgctgacagtttctctatccaggacaagtccagccagaaggagattggcagaggtaaggccattgatgacctctatgtgatggatacttcaactcagaatgctcatgtgttctctgtgactgctgatctttggcattcaagattgggacatccatctcaaaagagacttgcccttctaagtgacaaattaaattgtactgttagctctttacacaaagataaaccttgctatgtttgtcctttagctaaacaaagaaaaatcccttttcctaataacaattctattgctgtcaataaatttgatattgttcattgtgacacttggggcccttatcacattagttctcattctaactttaaatattttctcaccttggttgatgaccacacaagattcacatggatttatttccttaagcataaatctgatgttgctgatataatacctaattttatctcttatgttcaaacacaatttcagtgcactattaagaagtttcgttctaacaatgctcccgaacttgtgtttaaagatctatttgccaaacttggaattatgcatgattttacttgtgtggaaacgcctgaacaaaacgccattgctga

SEQ ID NO: 228226 - DNA, 1430 bp, Cannabis indica
cgacgtaaattctttaagtgacacttaaaaaaagacgtgaatagtgaattttgtaataatgttaagctctctatttataggaatatgtcttacaaggaaaggaaaccttaaatccttttttcttacaagtaattaaataaataaaaagggaaacaagagagccaatacttgatcaccaaacatagttggacaaaactttatagagcttgagctctctttgtgttcttcattatttctaatcccaatagactcaaataatacattcttttatttatgtcataattaatttattccttccatttaaatactaattttcataaaataattatatcaagataattatttttcataaaatattatttaaataattattattaatttctaataacaaaatgtttaattcataatgtaaagtccttagttgacatatttggtaaaaatgacaaaattaattttatttttggtattttcaaaattagttgtttattgcatttaatatttttcaaaaatactttctcttttcttagtgtaaaatatctttcaaatcatattgtgcttttattggtaaataaatatgagattttcttatttagattatttgatatttatttatatatttaaggaaagtcttaatattaattgaattaattcgattttctagttaagaaaatatatacagctgtcatttaatgtatattttatttctttatttatataaaataaataaagaaactttgctgaaaatctatcaaggtacaataatgaatctgtttaaatggattgacagtttgtttgaacagattctaacattccttttgggaatatttttcatgtttaattatttccttacttgtaaagcacgacttgttgtgtatttattgagaatatattgttactcaggttgtgggtttatatggaaggaataaaatattttattatttaataaatactatatctatatatggtatttatttgtaattgatttattttattccaattcgtatatgatctcattaatctctcaagctaggttatgtgatgtccaaggaaaattttgtggaaatgaacttagctttgatggagtctagactcacaatgttgactagatagattaggattctgtttgctcactttccatatctgttcagacagaatttcatcatttaatgagttttttgtaaagaaactaattaatattttctctttgtatttagacctttggagctcaattttaggggtcatttatcaatataaatatgacctaaaccatcagcaaaaggttgaactcttccagttcttaatttcttatatttttagaagagagtgtttcttttgtaaatgatggttattctgctattcctttgtgagtttgtgtatctttgagagtacttttatgtgaagtaaattccaaagtaaagaacaaccttcgg

SEQ ID NO: 228227 - DNA, 3425 bp, Cannabis indica
aacattaaatgttatttctgatctatattaataagtaaatctgattataatgaaatgagttttatttagggcataaaacccaacataaagatcctgaaaactggtttgatatgtacattggctgtgaagactcgttcaactcatggtttagtaagtgttaattgttaggttatttgttaattactggtttatttgaaatatactagttattacaatgacatggtgttggctgatgtgtatttgtgagcatggaaatacttattagtattggttatggtttgaaatatattaaacaatgtaagttatggttgcaggtgtatagatcatccacccaaggcgatctggtagagggtaatcacgagcttgcaggacttggggttagtggtgaggatgtgaatcctccaccaccaccaaattgagaagagttatatgccatgatgcaggagaccatccggcaacaaggcgatcggattcaagagggagcagcgagctcagcctattccaaatcccattcttgatccttcagcacctcctgtagtgccacaggatgcgtgaaatcatctagaaccattgtaagagtagttcaggaagcagaatttgctagtatttgagggtggtgctgatcacttaaggcggagcaatggatgagcatgataacatccatctttgaattcatgtgggttgagagtaatgatcaggtcagatgcgtcatatacatgttgcatgaggatgcccgtatctggtgagaaatagtgtcacagggtcatgatttgaataacataacttgggttgctttccgaacattgttctatgaaaaatattataatgaatctatctgagcagcaaaagcaaaagaatttatacggttgacctagggccacatgatggtgacagagtatgccaccgaatttggtcagctagcaaagtttgcctctgatgaggtggccactgaggtggctagaaaggctaaatttattcggggattggaagaacacatcgctcgagatgtgattgttgctgctaaaaaaccttggtttgttcgaaacaatgcttaggtggttgagttggcccttgctggtgagatttggaaaagaaatagtgcaagaagatattcatggaagcaaaggcctggtgctggttctggtaagggtactaaccctagtgaccgtaagaaaaggcctaatgatccatcggctacaggatcgaataagagattccaaagtaaccagggtttccgatgtggtggaaataaaaattggcaaacttatccagtgtctgaggtgcaagagacgccatcagggcaaatgtcaagctagagcctgcttccagtgtggggtaatgtgccatctgaaaagaaactgcccacagctactacgattgaaatagaagaaagatgacactcttgttcctactcgagtttttgccctgacccaggcagaggctgatgctggcccttccactgtgacaggtcagctctctattgctgatactttattgagcattttaattgattccggtgcaaaacatttctttatttcaagtagaatgatcgaaaaatttgcatagacttagtgatattttaccgagtggttttggtaccttgctgcctacttggagagctagttatttttagcaggtggattaggtcccttccagtgttcgtggaaggaagagaattgtcagttgatttgattaaattgaatctagaagattttgatgttatactggggatggattgacttgcaaagtataatgcaaccatcgattgtaagagtaagatggtaacttttgaaccagagggtgaggacccattcgtgtttgtgggcaaggttcaaggatcatagaatagcattaatctcggcgcttaaggcaagagatttgttatgggattgatgtatcactttcctagccaatgtagtggatactaagggaaataccaactggaacagaatatgttccagtgatttgagaatttttagatgtctttccagaagagttacaagggttaccaccgaagcgggaaattgattttgaaattgatctaatactgggggcagagccagtatctaaagcttcgtatcgaatggcacctacagaactgaaagagatgaaagttcagttataggggatgttggatttaaaatttactagatcgagtacctcaccttggggtgtctcgattttgttcgtgaagaagaaggacgaaaccttacgaacgtgaattgattactaagaattaaaaaagttgacaatatagaacaagtatcctttgtcaaggatagatgacctgtttgatcaattgtagggaatgaccgtcttctctaagatcgatctttgatctggttatcactagttgaggattcaggaggaggatattcccaagacagcctttcgtactcggtatggacactgtgaatttctggtgatgtcctttagattaaaaaaatgctctggcggccttcatggacctaatgaatcgagtattcaaggactttttagatgactttgtaattgtcttcattgatgacattctaattttctccgattcaaaagagacacatgagaaacatcttctgatggtgttgcaacgtctctgagagcataagttgtatgctaaattcaaaaaatgcaagttctggttgccccaagtaagcttcttagggcatgtggtgaataaaggcagtatcttagtggatctgatgaagattgaagcggttcaggatttgtcttgacctaagtttgcaaccgaggttagaagtttcctagaattagcatgatactacaaaatatttgttgaaggatttgcaaaaatttctaagcccttaacggaattgactcgaaaaaactataactttatttggactgacaagtgcgagagtagcttccaggaattgaagcaaaggttaattaccacaccaatgttaactttgtcggtcaatgatgaaaaattcgtgttttactgtgatgcttcgaaataggggttaggttgtgttctaatgcagtctgggaaagtcattgcctatgcgtctaggcaattgaaggaatatgaacagcagtatcctactcacaatattgaactggcagcattcgttttcacactgaaagtttggtgccattacctgtatggcaaatattgtgaaatctacatagatcacaagagcctcaaatactttttgttatagtgagatttctctcacctagaaactcgagaccgtactcttgattagaggacatgtgtactcagttttccaatgaaagctgagtcatctgcaagagattcctcgaagtttcaaacctcgctcaagatagagtcagcgagatacggcgaacatgaccaaactctgatcgcatgattacaactcatattatgcgggacaagagagtaactcgcgtgtatcgaactatgtgcgagtatcctctccatg

SEQ ID NO: 228228 - DNA, 1645 bp, Cannabis indica
gttacgtttattaactagttaaacatctaaggcccaaaaactaacttctgtaaagcaatcaaaattaaaacaaatcacataaaaacgagttacatgacataaataaattaaaaaccaagttccttgaattaattaaataaaaaattaagttcctaaaataactaaaacaaaaactagattccttaaattaactaaataaaaaataaattctgaaaaaattaagggaaattactcaatatacttttttataacttttttattttaaatttattgtttgggttgctccggtagtttctccgatggtttctttgtggttacggattttagttgcgatctaggttgctctgttagttgctataggagtttctgtgtgaaagaagtgtaaaaataaaaaaaagacccaaaaaataattcaagaactagttcatacaataacgaaataaaaaactagttgagaaacaacacaaataaaatacaacacatctttgcaacttactagcaatccatagtttgagtcaatcttcaaatatgttggctggaaaaaataaacacaatacaaaaagtattaggaaccggataaaattattaaatatatataataagagggatttagttctaaaaacactaagacataaattaaaatagaaccaaatctacaacaaaatgagtaaaaaaaaactaacacataataactcaaaaaccgattataattaaaaaaaaatcttagggaatcaactccaaaatactaagacaaattaaaatagaattggttccataacaaaatgtgtaataacaaataacacacaataactccaaaatcggttataattaaaatagatttagttcaacaacaaaatcagtaaaaataaataacacacaataagtcagaaattgactataattaaaagaaaaataacataaagataccacatcacaaaaactagtgtgcttcttagtagatccctttgaaactagctgtgaaataacaccaataaaatacaacacgtccttcaactaaatcgaaaattagctgaaaaataacacaaataaaaggcaatacgatcatcgcaacttatagcaaacccatggttttagtcaatcttcaaatatatgctggctagaaaaaaaattattaaatgagtatatttttcttcacgtagataaccattttgagtataaatactcataaaagctaccatttaccacttttttaccattataaatttttatttgtccaatattattccaatttttgtcctcatggcagtacagctcaccacaaggaaggccaagtcagcacccgagcaaacaaagaccccggcactcaaatgggaatcaagtgatagaccagctccctctcaagagctggtcggccacccctggccgccctattatcggccaacccagggaaaacaccttggctggccaactttgccaccacaggggcctggctagccaaggagtgctctacacgcctcactggacactcttagacgtggccaagggtaatgggctacaaattgggccccaaaagcccaacagaatggctgaataatacctagaatcaatggtattttggtcctttttaaatatcgaactaactatacgattgttaagggatttgaattgtaaacctatggtttaa

SEQ ID NO: 228229 - DNA, 1508 bp, Cannabis indica
catatccctatatatataaattaaaatgatcggtggatttaatgtaattaaagacacataagagagaactttattacagaaacaaactgcaaacatatatttaagtacactacaaaacccaactattaatgaataagaagaagaagaaggaaagccgatcatatattattttgatgggctcacaaaccactaaaaaccagacaccaacactttatttttgtgggtgaatatatataataagatcacaatcatcacccaactacattatcatgacaaacacacaacacatatatgtaagacaaagacactactattatagctaatttattaatattaatatattttacagtgccaacaccaaaccaggcactgatgacgaaccacacaacatactttgccaaacactctggcacttacagttacccgactgtgatgatgatgaggaagatgatggagatggggatgtaatattattatcctccacgtcagcattaccaaggcgggtgacggtgagggaagtgttgtagtactctctcacttgagtaattacgccatcagagccgagtgtccaagcgtgaacccaagacacgatgtctgagcagtagtgttgttggccttcggctattacggttgattcaaaggcaacgattgagaagggaatgaagggaaacgacaagtcgtttggggatgaattacctgtgagtagcctcttcaaatgttggtgagatggtggaccgtgaaaccaccactccaggtatggtgcgaagatgaggttgggatcaataatagtggtgtcgtttttggatttgttattaaaagcttcatagagtgatttcaccactcttttgttgcgttcctctaattggttattattattattagttgataataataatattgcttgtgagttcgccagtttctcttaaacttaatagctagctctatagctagctcttcgatctatatatatgtatataatatatataaggttaaatattaaaaacccaagatagagaatgatctcagaaggttaatcacttggttgttgctgttgttgttgggatttgacagttgggattttgggaatgtctcggctgacttttatagcttcacaggatctattatggccactattttaatatatatatttagcactctgaattactagctatattgtttagtctattattgattctgttatatattaaaatattataagtattgggaatttgagatgatatttatatatattactatattatttaattactctattatttctgttatatattaaaatagtattgggatgatattgtttataggagacacaatattactagtttttaataataatgccgaccactttaaaaataatgttggatgtgtgcttactatgctgtgtgcgtacgtacgtagtaattagaattgatccttaaaatttaattttaaaaacttagatgaaaatactagagaactgcacatcctcatgtaaaatttgtaacaaatgt

SEQ ID NO: 228230 - DNA, 4096 bp, Cannabis indica
atggtatcagagcctttcctccattaatggcaaatgttgctgttaatggtgtaggcaacacctcttccgatcctcagcccgcacactcgaatccccctgcaaatccatggagtcgaacccttgaaacatagcaatctcgcagtcctatatactttagccattctctctctgtaaaacttaatgaccacaattttctactttggaaacaacaagtcctagctgcaatccgtggacatcagcttcaaaagttcattcaagaagttgctcctccaccacagttcctctcagatgatgatcaagcagctcaaaaatacaatccggagttcttaaactgggaaactcaagatcaactattggtctcttggctcttgtcatctatgaatgagaacctcctcattcgaatggttgggtgtaacactgctcgacaaatatggtgtacactggagaagcactacactctacaagtctcctctaaaatccttgagttcaggactaaacttcagaatctcaagaaaggttctctgtcattagatgagtatttgctagaggttaagcaacatgttgatctcttggcctctgtgggtgaaaatctgtcctctcgagatcacattgcagcaattttcaaaggattacccagcgattatgataccttcattatttcctcaaacactcgaattgaggaatattcagtgggtgaaattgaagctctactcttggcttcagaatcaagaatcgagaagtctgaaaaagatgtggagccgactcttaatcttgccattgctgactcaacatcacgatcctctgaaaatttgctgcaacttgaagcaaatcttgctcaattcaacaggaatttcagaaatcctatgccacaaagaggtcagtattatcctccatactcaaactttccatctccaaattttcctaacttctcatctaatcgagcttcttattctggtaattcctttcgaggatcaccttctttttacaactctgggagaggctctattcctggcactagaggaggcaaaccacctcagaatcataacagaattcaatgtcagttatgcaataagattggccatactgtcattaactgcttttatcgctttgataaaagctttacaggtgctgttacaccagctgagtctactccaatgcaagccaatattgctcaaactactcctattgatgacaatcattggtaccccgattctggtgccacaagtcattgcacaccagatctgcaaactttagtgactccagctgattacaatggccaggatcagatatttgtgggcaatggagcaggtctgtctataaaacactgtggtcaatcttttgttacttccaataactgtgttaagcctctacttcttaagaatttgttgcatgtgcctgagataactaagaatttacttagtgtttccaagtttgcttatgataataatgtcctgtttgaatttcatgctcatgcttgctatgttaaggaccaggttaccaaggaaattttgttgactgggactctccacaatggcctgtatacttttgatccaggtcatttcaagataataccttcctttcatcctactgtcagcacagatcttcattccatcaaccaaaagtttgccttccttgtctctaatgactctgctgcctctgaaccaagctcccagtcatgtactcactgtactaagtccatagtttctgattttaatctgtggcataacagacttggccacccttctccaaaggtggtcacatctgtgttgcaatcttgtaacattccttgtaataaaacttcacatagtgtttgtgaagcctgttgtttaggcaagatacacaaactgccttttccaaaattttccaatacagtttattctgagccattgcagcttgttgtatccgacctatggggcccttcacaaacaccatcacataatggttataaatattacatgagttttgtggatgcttttagtagattcacttggatttacttgctgaaaaccaagtctgaggccttaaaaacctttctcaattttaaaactgaagtagaattacaattgggaaagaaaatcaaagtgtttcaatctgattgggtggagaatataggagtttttctgaacctcttaaacgagcaggtattattcataggcatccttgcccaactactcatgaacaaaatggattagttgaaagaaaacataggcaaattattgaacatggcttatgtcttcttgcacaagcttctatgccactagagttttgggatgaggcttttaggtgtgctgtctatttgcataataggttaccaacacctgtgcttaatcaattatccccaattgaaattctgttcaacactaaaccggtttacactaatctaaaagtgtttggatgcctatgttaccctaatattaggccttataataagcacaagttggagtttagatcctccccatgtaccttccttggttatagtcttaatcacaaagggtataagtgcattgactcaaatggtaggttgtacatctctagagatgttatttttgatgaactcaattttccatatgcttccatctctacagatgcttcaactcatgattctgagtcttctccttcaggttctattcctcttaattctctcagttatactgttgagtctctcttctccaattctcattcttcaaccccatctgacattgtagcacctgatgtgtccatttctggtttgaatgaaaatactgttccacctgtcttaccaagtttcacttcaactctgcctcaggatcctgatctctcacaacctgatccaacatccctaaatactccacctatctccactaatcccactactgaacaggcctcattacccaatccacctggtcccataacaaacaagcatagcatgcaaacacgggctaagtcagggattcataagcctaaagcatttctggtttcacaagaaccaaccaatgtcaaggctgctttggaagagcaaaaatggtgcaatgctatgaatgaggagatgtttgctcttaaacgaaatggcacatggtcgtatgttcctttacctgctggaagaacaccaatcggttgtaaatgggtatataaagagaaattgaatgctgatggtactgtcaatcgaaacaaagctaggcttgtggctaaggggttccatcaacaagctggttttgatttcactgagacgtttagtcctgttgtgaaaccggttaccattcgaacagtcctttctcttgccttgacaaacaactggcctatccaacaacttgatgtaaataacgcatttttaaatggtgatttgaaggaggaagtctatatgactcagcccccgggttttgaactccctgatgctcctcatttggtttgtaaactccataaagctctttatggtcttaaacaagcacctcgtgcttggttcgaaaagttacacaactgcctggacaatcttggttttctatcatcaaaatctgatcacagtttgttcatcaagcatacttcctcctcagttactctcatcctagtatacgttgatgatattatcatcacagggagtgactcatcactcatttcgtccctcatcagtgagctgcactccaaattttcattgaaaaatctaggccagttacactattttctcggtattgaagtgcaaaccacttcaacagggctgtacttgtctcaagctaaatatatacgagatttactggttaaagctcaaatggaaggagccaaaccagtgccaacaccaatgattagcaccttgaaactgtctgcatatgaaggagaaccagttctcaatccccagttgtatcgatcaatcgttggtgctctacaatatttgacaatgactcggacagacatttcctatagtgtcaatcgagtatgtcaattcatggctaatcccctattacctcattggaatgcagtaaaacgtatcttacgatacttaagtggatcgatttctcttggtttgactctcaagcctcttactgagtttgaaatctctgcatttagtgatgccgattgggccagtgaccccgatgatctgttggaaatttattttatcaggatctta

SEQ ID NO: 228231 - DNA, 2781 bp, Cannabis indica
ccggacggaggacggccgtcctatacgacccccgccccccccggtcacaatgaaggtgctatcgtggaattgttggggtctcgctagagacacggcaacccaagctcttttttcttggggaaggaaatacaaccctgattgtattttccttatggagactaaaattaataggagccgtatgcagcgtgttgcacagggaatgggatatacggggttcgattgtattgaagcttgcggaaatgcagggggactgtgtttgttttggaaagctgatcaaaatattcatatttgtagtattgagaagtctattgtggaagctatggtgtgggacgatcggattaacaagtattggcgcctcttcgcggtttatggatcgccctatgagaatgaaaaaatggctttttggaagaagattgaagaaagagttattgactgtggactaccgtgggcagtgttgggtgatctaaacactctcctaggtcctgaagacaagtccagcaggtgtagggtaaagaggagggatgttaaatggttaagtgatttctgttataatgctgggggcgtttatttgggcttcaaagggggaagatacacatggcacaataagagcttcaatggaggacttacccgagaatggttggacagagtcattggctcccacgattggatcattgattttcctaaagtgggggtactcaacctccctatcttagtctctgaccatgcaccacttatactagatactcttatgatcagaccctcaggccatattcctttctggttctatgaagcctggtctggggatgctaagtgtggtgaaacaatcgccctgtcctggaacaacagcattgcggatgctgcttgtagaatcatcagtaacattgacagcacgcgtcgggccttgataaagtgaaggaagaaaaattctgaggattgcgacaacactatacgcttgcttgaggagaaattagcgcatattcagaatatgcctatatccaatacaacgtgtgtggaagagggactgatccacgcaaagcttgaagaaatgtggaagatcaaggaaaatatgtggcgacaaaagtcaagtgagatttagttgaagcttggggataggaattcaaggttctttcacgcatcagccatgatccgaagaaggagaaatcaaatcgtggaactctttgatactgaagggaagaaatgggaggataagacgcacttgacaggtattatcaataactactttggtaacctttttaaatctgactttccctgcattcccgattcctttgatgatttgtttgtcaacaaacttaacaatgaggataacttaagctttgcgaattatcctaccttccaagaaatacgagaagttgtgtttgaactccatcccctaaaagcccctggccctgatggattatcgggatgcttttataggagatattgggatatagtgggaaaggatgtctgtttggcagttcgtgagttttttcaattagggaaactgaacccaaaactgaattattcgtttatttgcctcatccctaaagttgaaaattctacgaaaatggagcagtttagactgatcagcctatgtaactttgtatataagattatagcaaagatcttgtctaatagactgaggcccttgatggagaggttaatttctccttaccaatctgcttttattcttgggagatggattgctgaagcatccatcctaactcaagaaattgtccacacaattaaaaacaagaaagggaagggggggactgatggcggtaaaactcgatatgcacaaagcatatgacaaaatggaatggagtttcctgaaaagagttcttattgcaaatggtttcaacgatttcaacgagagacttttaatggaatgcgttcagagtttatcttactcagtgttgttgaatggaagccctctcaagaagttctatcctcaaagaggactaagacaaggagactcggtatctccttttttattccttctttcccaggaggtcttgtcaaaattgattctcaaatcagacgagttaaagctgattcatgggattaagatatcaagagagactcctccaattacacatctgatgtttgcagatgatacaatcctcttctctcgggccaatgaggcggaagcaaatgagttgctgaggtgtatttcgacctatgaataatggtcgggacagacctgtagcaaagctaaatcaagcatcttattctccaacaacgtcaataatcaagaaggacatccattttaaatcggttggttgttcaccagactgtaggagacgaaagatatttgggaaatccctttgttttcaagagaagaaagaaggaagactacaactttcttaaagagaaattaaaatctcgcttggaaggttggaagatgagattactttcctatgcaggtagagcagtccttatcagaagtgtagctggctcaatacctgtttatgctatgtcaacaaggaaaattcctttggcaacatgtagggaaatggatgctctggtgagaaaatattggtggctaggaaatttggataaaaacagattcttggctattaaatcttgggattacttgtgccaaccaaaaagttctggaggattgggatttaggcgatttgaagacatgaatagagctttgttggcaaaactttgctggtgtattgcaaagggggagcataaaccttgggtaaactgcctcttaaagaaatattgtaacaaagaaagcttttgggctgtcaaacaaagaggaagtgattcatt

SEQ ID NO: 228232 - DNA, 1503 bp, Cannabis indica
ctgattctcaaatcagaagagttaaagctgattcatgggattaaggatatcaagagaggctcctccaatctcacatctcatgtttgcagattatacaatactattctctcgggctaatgaggcggaagcaaatgagttgctgaggtgtatctcgacctacgaacaatggtcaggacagacctgtagcaaagctaaatcaagcatcttattctccaacaacatcaatgagcaaagaaggacatccatcttaaatcagttggctgttcaccaaactgtaggagaggaaagatacttgggaaatccctttgttttcaagcgaagaaaaaggaagactacaattttcttaaagagaaattacaatctcgcttggaaggttggaagatgaaattactctcctatgctggtagagcagtccttatcaaaagtgtagttggttcaatacctatttatgctatgtcaacaaggaaaattcctttagcaacctgtcgagaaatggatgctctggtgagaaatattggtggctaggaaatctggataaaaatagattcttggctactaaatcctgggactacttgtgccaaccaaaaagttctggaggattgggatttaggcgttgaagacatgaacagagccttgttggcaaaactctgttggtatcttgcaaagggggaacacaaaccttgggtaaactgccttttaatgaaatattgcaacaaagataactttcgggctgttaaacagagaggaagtgattcatttatgtggaagaacttggtggaaacaaagaatattttatacaacggttcttgcactcttgctagcagtggagcgtctattgatatttggtgtcaaccatggatcccgtggcttagcttcagtgaattcaagaatctaatggcgagaatcaaagaaactaatcaacacctgaaatctgtggctaacatctccattggtactgagtggaatgagggagcgattatctctgtgtttggggtgatagagggtagaaaaatcatgtctattccttggttgccagcctcaagtggagatactctaatttggaagtaaaaaaaaagcggagaattctctgtgaaagcagcgtatgtggaggaccaacaacataggttcggagacaaaactgacttatggaaatggatttggaattgtaaaatacatccaagaattgctctgatgttgtggagagtgctcaataatgcccttcctctcaaatccaatctccatttccttagtgataaagcttgtcctttctgccatgattttgaggaaacaaacaaccacttgttcaaagaatgcacctttgcccgtgggatctggtttgcgggtcctgagccttggatgatacactcaatgccgggagcaaacatggcccaggtattggaaaatctaatctcagcttcagaaaatccaagaaatcatatgttggtctatgctggctgtgtattctctcttatttggcagcagagaaactttgttagaatacat

SEQ ID NO: 228233 - DNA, 2068 bp, Cannabis indica
ttaatttgtttgtaatcaatacaaatgggtaaccaaggcatgaatgccaatagtttgtagtttgtatattacaagtagagaactatatgcttggtaataagaggcatcttggttgatgtggtaaagtttgccgattcttctagcagtcccaatcgtcaaggtctgatgatggtcctgaatataacacaagttaggtgtgaaagaaacatgatattggctgtcatcaattagagaagtaatagagagtaaatttaattgaaatttgggaacaaatagaacattgtgcaaagttatagcagagtttataggcatggttccaacaagttctattttgacagtattaccatttggtaatgtgacagacttgtgtgttgtgggtattgtgatatgagaaaaacatctaatgttgcagcaaacgtggtgagtagcaccactatctattacccaaaaatgaggcgcttgagaatttttgttaccagtaaagttgttgactgctggtccttctgatgttgatgcatcagttgtgggttgcaattgttgactgagcatggagattaactgctgacattgaggtgcagtgagttgagatgttcaaggatcacttcgtgaggttgaaagttggtgagtttgaggattggtttgagaaaaagaaccagtttctggttttttgttggtggtagatgctgtatcagtggatcggggtttgccataaccgggtggaaaaccatgtagaaagtaacatttatccttgtaatgaccaggtttttgacagtgagtgcaatgaggtcttggtcttttatttttggaggtttgattggcagcaggagtgggatctgtaggagggttgtttgtgtgtgttgcagtagtaattggtggtgttaatctattgccaagagttctttgtctttcttggtgtatgaccatagaaaagactctgttaagtggggggcaaggatcgattaagagaatttgatcacgtgtagcatgataggtttcattcaatcctttgaggaattgtaaaacttggtcatggttgaggtaatcttgattttgtgctgcagctgcacaagaacagggaattcgtgggggaagttggttgatttcgtcccacattgctgtcaacttggtgaaataagcactcactgtgtcatcaccttgatgaaggtatgtcaaggttttgttcagctcgaatattcttggaccgtttccttgattaaacctgttgtttagaacagtccacatctcggcagcagtgtcgagatacatgatactgctcttaatctcaggtgaaacagagtgaagtatccatgacataactaattgattgcatcgtatccaagaactataaagattatcatggatagggggttgaggtaagataccttccaagaatggagttttatttttggctcctatggggatcttgaagtctcttttccatggctgaaaattgcggtctgtgagagttggagtagcaagaaccagtcctggatggtctgcattactgaggtagtagggagaccgaatatcttcatagggaggtctcttgattggcgtggatcgaggaagaggattttgttcctgtgaggattgatcgacaggattggatcttgagacaggaatctggtgttgattgttctgttcgactggattaggtcgagaaacaggttcgagattgggatgtaaatcgtcagcgaattcgattgttggtggtggggcgttggtagtaggggtatccgcggtgtgggtggtgcagtttttaaccattttttcaaaccaacccgcacatgcagtttttcctattttccaaaccgcacccgcaccgcgatactaaaaaaccgcaaaaaccgcatcgcaaaaaatgatgcggtgtggtgcgatttctgcggtttatgcggtttgaactatcacaatttttttttttttgaaatcatcataaaataattaaactatcattaatataattagtccaaaacacttaagaaaatacaacaaacttgagacgaataaaagttataacaaaaacaataagtcaataatttttttaaagtttcaacaacacacctaa

SEQ ID NO: 228234 - DNA, 2445 bp, Cannabis indica
atgtacaattagtgaatcatgactttcttaatggattaaatttttgttccctttatttattaattctggtactggaaagttgcacgccaattcaaatgtgatcttgaattatatttccactagtgaattaatggaactaaatgataaagaagtaattagaatggtaaaacgatattttggccaaaactaattacgaaccaacacatgagggctaatcactgaaattgattatatcaatggacacggaagttaaactcagtaaatataattctataattactaagagtgcaattccatatttatagtagagtaattatagaattaataaacatgggattatttgattgatgagactcaataaataatttaatttattggagcttagaattataggtctatgatccccgaattgcctccttgaaatattgtcaaggttaaggataaagagttgtatatagatgtttagaaaaatctattttgaattagaaaaatagtaattatttttttttgactactagcagcagctactcagttagacgcaaaaacatgcttttttcagctcgaataatcctcctattctttaaactatacaacctgtatttaactatatctttaacgttatcatttacaatttttattattgtataacaactactattatgcacacaaaagttcctattcttccacagcaaataaatagtggcagcaaaaagtaagatgatgacccctgattttttgctagataaccaacacaacaaattgctgtaatccgaaggcgaagctgcaaatccacactagtcaaaaatctgctgcaataccgcccttgatacacagcaattgaagaaaagatggtgatgactctcctcttcaatgctacacacaggacagtaactagagtctagaacaatatgaaatttatagaagttgtctctagtgagcaaatgatcatgaaccacctgccataagatgaacctatgcttaggcagcgatagattacaccagacagatttataaaaactatcaatgttcatatgtaaagtccccatatacagacgagcaccaatgaatttaccttttcttaatgctgcagccacatttaacttactgaatttcttcctcagatgatagattttcctccaataacaactaacatcccccttcaactcgtactcccaaaaattagcaccattcgtatcgatgttgttgacccatttgacccaaagaatatcatgcttatccatgatttcccaaataaactttccaaggatagatcgattccaagtagaaccatttttgagtcagagacctccaaaaggtttgggaagacaaacctaatcctaagaggccaaatggatttttcttttctctcccttaactccccaaaggaagcctctacaaagcctctcaacctccttaaaaaactttcaggaaggatgaagatgttcatccaatagttacaaagaccaagcaacactgaatgaatgagttgaatgcgaccaacataagacagatgcctagttgcccaagtaactagccacattttaatcttctttatgatagcatcgtaatcttcacgtctccactttgttggtcttaaaggcactccaagatatctgagcgggaatgagccctctctgaattgcaagtcttccagaatcacctatttttcagttgaggaaacacccccaaaataaactaaagatttatctttgttaggaaataatctagttacctctgagaagctttctgaagaaatatttagatggtgaacaaccataggtgagcctttgctgaaaaggataagatcatacgcaaagcattggctaaccaacttaaggcttttgcacataggatgaaatctaaaagagttcttggtagtttccttcatcagtcgtcttgagagatactccattaaaaccacaaacaagaggggagacatcggatccccttggcgaagacctttcttcccctaaaagttaccatgaaaccttccattcagcatgatcgtataagaagtacctctcaaacacatcataatccaattaacaagtaagtaagtccttaaaaaagccttaatccacaatatcataggcttacttgaggtcaattttgattgcacaccttagagagacattcttcctcccataattctttattaggtcttggaaaatcaaaatattatgagcaatagatcgcttctttataaaagctcccttgttttggtgaaccaaccaaggaagagctttagcaagtctttaaggctttgtggactgaaattggagctaaagtatgctgtgcgattaaagagttctttaacacgggtaagatctccacccaatttaatgaaagacttacagaaatagtaattatttatatttgtaataaataataattttttcaaattaattaaataaagaaaagataaaaattattaagataaaattt

SEQ ID NO: 228235 - DNA, 1143 bp, Cannabis indica
ctcatgttcaaggtttgcccagcgttcacttaacaacattcactcgttatcaaataaataaacataagcacacataatgtacggaaaccccttcccaatgttgttattaatcacaatatcaaagaatataattgttcaagtggtgaacattacaccccgacgactcaggcgcatacaagcaaataaatactcctagtacgattaacaaccccaaacacctaggctttgttggaccaaccagcttacaacaaatcaacatcacatgttaatcatcactaacacgcccacgtgttgcatggtcaagcctttagattgaactattgcgcttgttcaccaatagagatgtcttaagcccacgtgcatctcttttgatagtccttggtaactgtcacccacgtgtgtacgccgtgcgcacatcatctgagatagataccagcattcacatcacgtgctcgtgcacccacacaccatgccaccaatggttctcacaccttgaaccatcaagccaaccctcttatgctggctaggagcagcactatagcctacgaccagcatcctaagattctcctctagagttgtccttggggtgtcatggaccaccccctaatgagcagtatgggcttttaacccatagtgaggaacatatatgattttcttttggtaaacatatggcttatcactttggttatagtttcatattttcttaaacaaactattctaaccttccttaatacttatttaaggaccatgaaacattcactgcgtgagaaaatatgagtttaactcatggcatgcccacacaccatgttcaactcttcaactgctgcacgctacccctagaagatgcacatcactatgttgctgtcaccagatgacttgcaaccctgagtgatcttagtgagggtctcacaaacctcccccaccagaagaactcgacgtccttgtcgatatacttctaaggtactcgttaaccttggctttgaaatgccataagttaacaaccttctcccacgtagcaccaacaatgcctgtaacgtcctactcagaagaacgccacatgtcgttattacaatttgctaatcccgtcaatcggggtctattagccaaatgatttgaaattaataataaacttaattaaataaa

SEQ ID NO: 228236 - DNA, 1121 bp, Cannabis indica
ggactcaaccctaggtctggctccagacttggacctcagattggactccagatccggatcaagacttagacccaaaccctaacttcagcccggaccccgaaccttaactgctataacgatttttccaatgataattgttttttgtttgaaatcttattaagtttatttatagtattttttgagacatctttttaactttgtagcacaaattttatgcccatatataaactaacttatttatttctatatatatattttaaaaaggctaattaggatttttgccccctgaactttgacatgtaccaaatcatgccccctgaacttttaaggtcgttaaaaatgccccatgaactattgagattgttggatttaaggacttttatctaatttcattcaattttactatttcagtgattgtttatatactaaaccatgcttcccaaactttgatatctaccaaatcatgccccttgaactttgacatgtattaaatcatggcccctggactttcatccatgttagacttttttactaaaattggaaaaaattcaaaaatcataattagccttttaaaaatagcctaataaaattctgctatactattatgcactttcgtaagcaaatataaacaaacaaagataataacatagctctatgggaccatgacactgtattttatgtgatattgatctcacatcaaattgatttatgatgaattaaatgatattgacttagaataaatataactgtaggtttataacattttttatactgttaatatcgaccaagtttaatgtaaacattatacattcgatacaagtttactttactaacgtcttaaaaaagatattctacttgcttaagtgtaagtacaccacatagccgattattacgtcaatgtaaatctggtgtactaataaatcttgggactaagtaagttcgaaacatataatcataattattttgtactgtgatgacattactataattgtgagtaactttatgttcaaaatttaatagaatttaagtattaaacatataatcacgtaaaacaaaatgaattttgttattatgattaccgaattaattattcaaattaattagcgtacttttacagagat

SEQ ID NO: 228237 - DNA, 2358 bp, Cannabis indica
cataaaacccaacaaaaatgtacctaccttctgcttcatttgtggtaagatgggacattctgagagattctgccctcgactttttgacacaccagcacacttgattgtaaaaccttatggtttgggcatgaaggctcttcctcgccggcatcagaattttgttgcatcaccatacttgcgttctggcaaggcactagagagtggttcgtctggtgtgaactacacaaatgcaggagctaattttgggaagtcaacttatcgcatgtttaggggaatatcccctgatatttctcaaactaacagcaagaataaaggagttattctttatgatagtgaacatgctgatgaagaattgactcaagaagaattaaaaaggaaaagatttgttgctgacagagttattgggcatgttgatacttcggtccaaattgtatctgggtcaaaaaacatgaatatggtgggttctggtgtccaagcccaccaatcgtcatgagtacactcagttggaactgtcgtgggcttgggaacccacgggcccgagaattccttgagaacattgttgttcaaaagaaacccaactttattttcttgtgtgagactttgtgtaaaaaagacattcttgaaaggcttagaattagattgggctttgaaggagcccactgtgttgaggtccaaggacacaaaggaggaattgcactactgtggagatacagcgatggtgtccgtctcatagggttttctcaccaccacatcgacgtcgaagtcgcatctctcaacctccctgcttagcgtttaacggcttctatggcgagcctaatcgaagcctccgtttcagaacatggcagctaattacttctctctctactgaatctcaacttccttggtgtataataggtgatatcaataatattggcaatcaaaatgagaaaaagggtggcagtccttatccttcgtctctcatcgaaggctttcaacatgtgttatgtagctgtgatttggttgatatggagctccatggacatccctacacctgggaacgtggtaaaggaactgatttttgggtggaaattcgactcgacaaagcacttgtttctcatctttggcttgataaatttctgactgcaacactcactaatggagatgtttcttcatctgagcacatgccaatctttctcgagccagctcctacaattttagttggttctgcacatcacttcccgtttgagaatgcttggacaagggaacctctttgtgctcaaatcattcaattttgttgggaattgaattctcatttgtctcttcaagagaaaattcaaatctgcagcaaacaacttggtgattggggaggggtttaactaccaactttaaaaaacggattcgacagagtaaagctagactttcttctcttaaaggtaaatctgatcctttttctgttagtagtttcggtcatgagcagaataattattttgaaatcttagcccaacaagagttatattggaagcaaaggtcaaagcaattttggctacatagtggggataaaaattcaaagttttttcatgctatggccagtgcccgaaaatgtagtaacaatatccaatttcttcaaaatgctactggcatttggacatcctggaatggtggccttgaagaggtaattgttgattattttaacaatatttatgcggctgggatgttgtttgggatcaggttgtgaatggcattaatcgttctattactactactcataatgctgaacttttgaagtcgattactagtgatgaggtccggtcagccctctttcaaatgcacccggacaaggctccagggccagacgcaatgggacctggcttctttcagaaacattggcatataataggctcgaatattgttactactgcttgcgatttctttgactcaggcatctttccttgcaacttaaatgacaaaaacctgatgcttattcctaaaaagaagtctcctaccacaatgagtgatcttcgtcctattgctttgtgtaatgtttcttacaaggtgattgcgaaagttcttgctaatcgaatgaagcttcttattgatcaaattatctcacccactcaaagtgctttcattcctgggcatcttatttcagaaaaatattatgattgcttttgaagtgatgcattacctgaaaaggaaagttcatggcaagaaaggctatatggctctcaagcttgatatgagtaaagcctattatcgagtcgaatggggatatttaaaggcagttatgttacaaatggtctttgatcaaaggtgggtcaacttgattatggcttgtgtttctagtgtgcgctactctatctttcataatggccatgtcat

SEQ ID NO: 228238 - DNA, 886 bp, Cannabis indica
ctaaaaataacctaacagtaataaaactaattatcgagaaggtcacttctctaaaatgtgaaattgaggagccgtatgatcttcaagaagaagtaaagaaggctttgagtacaaagaagtttctctttgtcattgattgctacgaggcaccatggtgcctagcaacctcatgagagagcatcctctaaatggttagcagttttctataactattattaaagtggaataagtgagatttgatatttaattgcatcagcagcgatatgaaacttcatatggggtgctaggcaccatatgtgctctttactatattaataaatgccaataatttgcactatatatgtgtgttcatgtttatcatttgcttttatctcctagttcatatgttcttattatgcaactatttttctttccttaaatttccgattctcattgtgatgtgagccgaaaacagaaatgagtggaaaaaggcggtatccataacgagacacagtgcttacttttaccatttgatctgaaggttgatttctacttgaatgaatatagttaaagaaagttgaaagaagaattgtttgaatgtgtggtgtgtggatgaatactagctaatattgattatcacaacttgtttgagcatgtttggtttcatacactaaaagcaacaatataacactaataaatattaactaaaatattgcattctcttaattatgattatatcaaagtctttgttcttatctttagtataataattaagggagtaggtttaccaactatagcccaccactaatatattaattaattaattagctgataatttgtttgaacaaacatatgtactaaagctcttttcgattgcaaggttttcagcttctttgtctcaattaac

SEQ ID NO: 228239 - DNA, 1112 bp, Cannabis indica
tgcatatcagtctactttttgtctttattcaaattttgttctatagtggtgtttgtgtaacgtgtaaaaaatttatataatctataaggttgcaaacatatttgaataactctctctctctctttttattatgaataattaaatttgagtaaatcttttgtgggtaaaactgttcaaaaaatttaacaaatataactgcaacaaacacgccctcttactaatttgctcttactaatactcaaattgcacacacaatcttgtgtatatatatgatagaattaatattatctaaagtaaaaattaatttacatatgtttttataggctgcaggagcatgttggtatctgttgggtatccaaagagcaacacagtgtctaaaagagcaatgtagaaagacaagtgggtgtggagtaggaatattgtcttgtcaagagcctatttactatgggagtacaagaatggtgagaggggaggctagagttggatgggcactcaacaagcaggtaaggtctgcctgcttagacagcgcagataactacaactacggtgcatataggtggaccgttcagcttgtcaccaacaccaaccgcttggaaaaaatgctttttccaatcttttggggcctcatgactctgaggtatctatatatctacttacgtactatttcattggttcttttccaataggtgatgatcctttctaagattgggcaaatctctaaaatccactcttcgagatagtgtcaatttttcaaattgaactaaaattgtattttctcactcaatccatattgcacaaatagttatacaaatttacgtatttatagacttttcacagtcctttataatttactaaataagacctttctagtattttcattgtctaatactttctcacccttcaaaatcacttgttctcgaggtgttaaaaaaataaataaataaaatgcaaaaacaaacaaaataataatagccaaattcaaatacaagctatttgttaattctcagcccaagtttaagcccaaaatacttaggtcaacatcatcctctccattccatgactctgtcgtcaaccaacttaatacatttttttttaaaatgtgaacaactatc

SEQ ID NO: 228240 - DNA, 1161 bp, Cannabis indica
tcaaataataattacatagaaaataatattgaatactatttcattggctaagggctcgtttagtacatcgtataaagatcgtattgtattaataaacaaataatattttgtttaaataaaatattatattgtattaattattgcgatcataaatcttaatacttaacaaattatttgtattaacttgtattataatgtttacaaagggtttggggtcaactttggtcttgattttagtctcggacctcaaacttggacccataccctaactatggactaggaccatggacctagaccttagccctgaccttgaacaccgaactgcaccccgacccggtcttgcacccagaccctggcccccagacttaagactctgagaccaaaatgtggacccttacccggactcgtacttgtatccggacctgactcggatttggtctctagacccgacccagatctgtaccctagacctggacggttggaccccagacacgaattgcgaccccggacccggactggccctgactctggattcggaccccaaaccccggatctggaccctaaacttagattcgaactgtgactcggaccctagactcggacttggccccgactttggaccctcgcttcgaactcagacatagatatgggtccaagttcgacacttgggtcctggtttggggtccaggtctgggtttgggtctggagttcgagttggggttcgagtcagggtctaggtttgggttcgagtcggggtctaggtctgggtccgcatttgtgtctagggtcgggtttgggttcgagttcggggtataggttcgggtcgggatccgaattcggagtccaagtcttggtcggggtctgggtccgagtccaagtctgaggtctggatccaaattgtggtccgggatcgaggtacatggtcggggtctgggttagggtccagggtccgggtatgtgagcaaaatgtaaaatatgatatgttagaacaaaaaaaaaagtatttttaaaaatagagaacaacatttcgatattttttgttttctagttttttaaaatattgcagtttttaaaaaatttggccaaacgacccctattagtttttaaaagttattttctgtttttaaaaactgttcactttttaaattatgaaaccaaaca

SEQ ID NO: 228241 - DNA, 2384 bp, Cannabis indica
aaggaaagatcaactccttctttcctggcttcgctcgtatatgttcgagacaattcttggatctttagcctagcataattcttctcatgctatctggagagctcttgatcaacgcttctccagtcaatccaaggctcgcttactacagatcaaatcacaactctccaccaatcgaaaaggcaatctctcaattacagattactatgataaagttaaagttcttgctgacactttagctactactggccatcccatggaggaaagtgctctcatcatgcatctcttgaatggcaagggccctgagtttgatcccgtcgtcgtccatgtcaccagcttagtggatgatctatatgttgaatctattcaatcattgcttcttactcatgaaagcagattcgaacgccactttaacaccgaggatcgcacctccaacatgtctgtcaatctcagcacttcctcatcaagattcagtcaaaatcgtttctctccaaacacgggtcatagcaacacccaaaactttccaaatagacctccagggaaaccatttgggagaggtaatttccccaattcaagactggtttgccaagtttgccacaagactgggcacacagctactttttgccattaccggtttgacaaattgtttgttacccccaaaattggcgaatatcgtgctttcttgactgagatagatcaagctgatgatcctcaagcctacatgacctccagcttacccaatcctaacattgaccatgactggtatacggataccggggctaccaatcatgttgcgttaggcatggcacaccttgattgtgaacatccttattcaggttctgaatcccttattgttggtagtggtaagagactttccatctctcgtattggtaatcattctttgtctggttcttcaaaacctttactgctaaattctatcttaaaagttcctcacattactaaaaatcttgttagtgttcttaaactaactaaggataataacgttttcttataatttcattccaaatgttgttttattaaggacaaaatcacgaggacagtcttggtccaagggagggttaaaatggtctctacgtgcttcctcaaaatcacttttctactccaaatgtggagctccagtgtcaccttgccacctctcagtctagttcctctgtagaatcttttcatgcttccaattataataaatcagtcggttccctagctgcaatttcttgtaaggattcaataataataaaatgaattgttcttcttgttctgtttcatgtccttgtgcaacttttaatgttcaaactaaacctgacattaatctttggcactctaaattgtgccacccagctcctaaaacacttgccaaagtgttatctaccataggaataaaaagcaatcttaaagaacttcagttctatgaagcgtgcaaaaattgggaaaagtcatgaactcccttatgccttgtttgattctcgtgcctcccagcccttagaactgcttcacaccgatgtgcggggtccctcccatgtgtcctctatagaaggttataggtactacacacattttatcgatgactttaatcgatatacttggatttttcccctcacggttaagtctcaagcctatgccacctttctcgagttcaaaaaaacttttcaaaaaccaatttagtctcactattaagaaagttcaatctgattggggtggtgagtataggtccttttctaagttcttatcttagcatgggatttagttccaacatccttgtcctcatgatcatgaacaaaatggtagtgcggagcggaaacataggcacataactgaaactggcctcactttacttgtataatccgatcttgatttaacattttggtggttaccttttcagcatgcagtatttgtgattaacagacttccatcaccagtaatccaagatatgtgtccctatgagtgtttgtttcataaggctggcgattatgactttcttaaaccgtttgggtgtgcctggtatccccacttgaggccctatcagcagcacaaattgaatctcagatctaacaaatgcacctttgttggttattcaatgcatcacaaggggtacatgtgtcaacaacccccaggaagaatatatataaccagaaatgtggccttcaatgagatggacttccctacgatgtccaacaaaacaataaaccaggtaccttcttgtcttcctaatgagcatcccactgccagtttttgtacagaacctatggtcactaacactcctcttttacaactcgaggttactcctgctgtaattacacttcctagtaatggtggccttgcttctcatgtccctcctcctatgatcacaactccacagtttgtgtaacgcc

SEQ ID NO: 228242 - DNA, 2859 bp, Cannabis indica
gacggccaagttgatttcaaagagccagtaagtggatgactttaacttatccaaggttctttgccccaatgtttgcaatcctgactccgagaaggcgatctggccggacatcattgcctccgcggagaatcggtataagaagtccctcatcaagagggaacaagaattggcctacatcaaggtccaagccgctgcagggagtgtccttcagatcgaggctagaaaagagcaagtgacctctcggcctaagctcccgttctcgatcccaaatactggggctcctgatgccagtacctctggagctggtaagtctccgctgattgttcatcatgtcccgtctattcaggattactccacctgtaggccggtggaatttgatgactggcttcataggtttaggatggccccttttcgatggggcgatcatgcctagagtttttatttttcaaaccttagcagttttttaggtcggtcaaaaatgcggtcggatcctcccgtacctatccctttggatcattctacctatttatcttccaggttgttcctcccctcatacagctttctaggggacgacaactccagccttttaatacatacttttgctaggatagaattagatcaccagagtaggattagttttattacattattcctacatgtatgactttttgataatgctctaacgcctttatttgtctatttatccaagcagtgaggccaacggatgagctcctagacgctcttgcccacacctacagtcccaagccaattctacctcagacgcaagacccggcactgactcccgggaggtcttcttctagcgtacccctggattgagtcattttaatcgacgaggaagtggaagtagaagaagaagaaggcgagatgctccatccctaggagcggaagcaaaaaggaaagaagttggagagtgaggttactaaaaagccaaggcgagcagacacttcgagccccagctccagctcagggattccatccgaggtggaggagtatacagtgccgcccgacattgtcttaacccccaattctgctgattaggaatggactcagctctgcatagcgaagcataactacgccaagacggagtacacgaaggggaatgctgaggtggaggccctgaattagattcagagggaggcccaggacagctttactcgcagtgagtatgcttggaatgtctgggatttagatctggatcccttgattgattggttcaccacttcattggacctaccctcgatcccttttcctcaaaattaatgagccactttgctgtcggcctagtttagctcccaatgaagagatacgcgacatgtgcttctaccaatctcgtctaccaaatccaagacgtgagcgcggccatgaccgcggtcagttcctatctgttagagatattttccagcttttttgatgcctgatatcacgtattcatacatatttttttgttgtcagattgctgtagagatcggtcgtctctcgaagactttaattgaccatgggtacactatgtccagattcggggacatggaggaggccatgaagagtctctgggagtcggaggcacaaaagagagaaatccgagaggaagcccagaagaaggagttcctcatggagcaaaaccatcaagaggcgctgaaggccaaagatgaggtcttggccacggcgaagagggaccttcaggactccaaggaggcaatcaaggaactgaccgccaagctgaagtctttggaggagctgcatcaagaaaacttgcaatcaatagccaatctgaccgttgaagtgaagggtcttcacgagttcaaggagcaggctgaaaaagaagcagctaaggcgaagagagatgctctcctggctccaatcacttgtcagcactgcaagaagcaatttgatggtggggtctttatggcttggcaaaccaatagtcagaatcttagcctcaacttttatcccaagcccgaagagtctcttgctcgcttctgggagaagaagaagaggttggatgcagtgttggaggagcgcaggggtcctcgtccctaggccttttctttaaggttttttcttgtttaaacaatctacattatgttctaatatatttactttttaacttccttatacttgatctgtttatatttgtccgtgtgatatgccttagtacccatctaagtgacatgaaatcagtttttaagtcacttagttttgcaaaattaaattaaggttgcatatatttgttcggtacaaattcatttatagaacataaactttactttttcactattggtaatactttcggaggtgatcaacattccaggccctaggcaccgtggttccgtccattctttttagcttgtaggtcccggagccgatctcatcctcaacttcatatggtccttcccaatttggcccaagtacccccactccaggttcttgagtggctgggaatatccttcttaagactagatcaccaatagtaaatttcctatctttgactttggagttaaagtgtttagccaccttcttttgataagctgccatccgtacttgagactcatcccggagttcgccgatttgatcaagtacttcttgtagtaaagctttatttgttaccagatcgtatgtcgttctcatgttggatcggaacaaggtttccaccgggaccatagcttcacaacggtacgacattgagaatggcaagtgcccagttgtggttcttagagttgtctggtatgcccataacacttttggcaattcttcaggccagttatttttgtacgccagtagcttcttctttagggtgacctttaagattttattgacggcttctgcttgcccatttgtttg

SEQ ID NO: 228243 - DNA, 1896 bp, Cannabis indica
tcattcaagcatctcaaaatatgattaaagtccaagaaaccaagttctaggcgcccaagttgacgtttatgtgaacctggttgcccaaaagtcagcctgatctctcagtcacttttcatcagtgcacattgctcagtaaaatgaccataaaaatctctcaattttatccaaataacgcgattcaagtggacaattaaagctttttccaagatggatccaagtgtctcacacccccgctgcaattctgatgatttaggtatcaaaattaactcacgagatagtgttggatttctcagctaattttgtgcaaaattttctattattttattgtaatttaattagacctaaggaaaactcccttggttcattactcacactttccattctctctacaaggttagagcttctctctcttcacactttatctctctagtaattgtgaagggaagctagacattcatttttttatgagttctcttgtaagacaattagtttttgcgataataaaaactataaatagacgtagttccacaaccattccaatatgaggagtgaactactataaattatggtgttttttctttaattcttattttttctatttgccgttatcgcttatcagacgatacggagttgaccattttttagtgtcaatattttggctctttcattaaaagtaccactcgagtcccttggttgcctttaggtttttagtgttcgagtatatgcttcattctgaaaggaatttgtaagtacgagaacataagagcttctggaaaagtggtgacaactaggtccaccagtgttggttgtgatgcttcagttggcgggacttcgggcagtaggtcaagagcccctggctcgaggccccaagcattatgccgacatgagctgacaacgacactgatggtactgtgccaccacgtgagccgcgtatgaacctcaacgaggagcctatgagcctcaaaaaggaacacgcggagcatggcagggagctggagctcgaccttgaggttgagcaactagaagagattgtaactaacttgtaacagtagtcaagcctaggagaggctgacgagctcaaccccttggttgagaaatcagagataattgttgctaacttgcaacaacatttgagcctagaagatgctaacaagcttaatcccgaggttgagcaactgaaggaggttgtttctaacttgcaacaacatttgcaggagtcactggaaaagcatcgggaggagtttcaacattgattgcaagagcaatggactagcgttgagactcaatgagcctctcaagaggagaggagagtcgttctggcctattcgatttgtgatatgtatcgagctggcaccatgtcagcaatcccgatagtcatgcttgaaagttagtgtgacagttagtagtctcgtgatccataaggagaaataccaagtaagctgtggaatcccacatcgtttggggaaggtcaattatgatgattttgagactgtgtaggtatgggactgtacagttgaagagggcttaaatggattgatttgtactacctatattaacaaggtgcatcttgtttttcggtagcctatcacgaaagaactctatagttaagcgtgcttgacctggggtaatctcagcatgggtgacctcctgggaaaactgtttttccaggaacggtgcgaatgaggacaaagcatgcttggaaatgcacatgttatcttctagggtcagtcgtcattccaggtaagcaactagagtgacgtactcgtgtataaggaacgttcgaaatggtatcgagagtcttgaccaactgaaagtgtggtacgacgaggaaggtcagaccccgtaaggggtgattgtgacgaatcgagtagtcccgtgagtctggtaacgggg

SEQ ID NO: 228244 - DNA, 1829 bp, Cannabis indica
tatttatgaatatcaagtctcccctgagtcttacattcataaatctcgattaagatttcacgtagaaattctttgctgtatttttatccacacactcttgaaaatatataactctggtgtgttgaatctaatcaataaaactaaaagtagacgtagtcccattatcatcgcgacatgggggggtgaactactataaacccctggtgtacatttaatttactgcaattttgttagtcaaattaattcaccgtagttctcttttattttacgatcttcttaaaacagctgacgaaaaattacatcaacaagtaatatagatgattttctttttagttgcatagatcttaatattttttccattcaaattttgataagtaccaaatgaagcccttagaagtaggtcgtcaacaactttttatgagcaattgagattgttagatttaagaacttctgtgtaatttcattcacttttactaactcaacgattggccatgtaaagtgccccaaaaattttgttatctaccaaattatattccccaaactttgatacatacagaatcgcgtcatctagacttttatctgcgttaaacttctgttaataaaatttaacaaaaatccttaaattcaacaatttcaataattctaaaaaaaattaatagcccgaaaaattcaaaagcataatttggtatatgcaaaaatttgagggacaaaatcctaattagcgaaaaattaaataagaagggaaatattgagtaagcaaaatcactgaatatatatatatatatatatcaaagcaattactatttttgaaaattaataacttttaactattaaatatcactaaatatatcgttcgaggcacttagagcatcttcaacctatacatcaaatttgagatcacactaacactaaatttggtgtcaaaccactccaaccacaacactaaaactaaactaaaaaatacttattgttatactaattttttttttaataaaatagaatattttttaatattattttagtttactaaaatcacaacaattattatatttatgtgttatctcaaattttatccacttaacgaggcatgtccacatagtcaaaattgaggacacgtagattacaacctgtcaataataggacaaagtcaccttacacggcatgtcaactgtcaagggttctaaagcaatcaagcaaaactatcgagcaagaataagcaaaaggagttaagcaggccatcatgaccttggctgaccatgtccggccgaccaagggaagcttataggtcagccatggtaaccttgtagcctggccatgccttgagaataggttgtccggccaagaatggctgttcaaccaaggagacctgacctttgtggggaaagatgtataaaaaaaaaaaagatgaaaaggcttgccagaccatacctggccggcccatggaaggttacaggccgaccatatcctaaaaatagtattggccgaccaacttatgcagacaactcagaacaaccgaacaaattgcgagacaggtccaacaatccattaagatagggatatttcctcaagatatagtcctatattctagagatttagttatcatttttttgtaatttaaataatagataaataagatgttaatatccctattttgaagggatatcttgacctatttagtttatgatttttttttgtaagccctacactatataaatggcattagatcactctctcaaaagctaagtcattctacatggactaaagggtctccacaagtcctctttcatgctcccttaagcctcctacacgtgcaagacctctctctctct

SEQ ID NO: 228245 - DNA, 3861 bp, Cannabis indica
ttgcatacaaggttgggaggagaagttatttcaaaacctgggggttgtagcatgtaaacttcttcattcaatgtgccatttcgaaaggcataattgatgtcaagttgcttgattgaccaaccatttgatatagcaatagtaagaaaaattctaattgtcacaggtttgacaaccgggctaaaagtttcagtaaagtcaaactccggttgttgatgaaagcccttgttaacaaggcgagctttgtacttgttatgtgttccatctgagttctctttttccctgaaaaacccatttgtagcctatgggagttctgtcctcaggtaatggaatcagagaataagtttcatttctggttaatgccaacatttcatctgtcttggcttggttccattattcttgctgcagagcctctttgacagttcttggaattttagagattagataggctttaggcttgtgaattcttgattttccccttgtttgcatggcatgagagttggtagtgacttgtgtttgtgtaacaggttctagtgttggtgcaacagcagtgatgtttggtgtggctatttcagtagatactgttggtgcagcaacaggtatgtcagcagctggagtgggtaaaataggtgctgaattgttgttgttgctgtgtagagaggcagactgccttgtatcagtggcctgttggttgatagcagcaggtcttggttcctgtgtaggcaaggaataaaaacttgccacaaatggcacagtattagtagtaacagcagagggaacatcaagacaagatgagttgaatgcattagacaatgggattttgtgcaggtgtggcaaattcagagtacatgtatgaatcagtggccagtttgggaatggaagaaaaaggaaaagatgtttcatcaaagatgacatctcttgaaatgcataatcggccagaggagtttaaacatttataccctttgtggtttagactataccctaagaaagtgcatggggaagacctaaattcaagcttgtgtttgttataaggtcttatatttggaaaacatttgcaaccaaatgtttttagggtagtgtaattaggggtaatgtggaatagcttctctattggagattggtgttggagaataggtgtgggaagtctattggagagatagactgaggctctaaaggcttcatcccaatatttgagaggcatagatgcttgagctagtaaggttagaccattttcaataacatgtctatgctttctttctactaggccattttgttcatatgtaatgggacatggatgcctatgagcgatgccaaattgttttagatgattagtaaaagatctaaattcccctccccaatctgtttgaatgcatttgatctttttacctagttgtaactcaacctctgttttgaattgcaaaaaggttttcaatgcctcaaacttatttttgagcatgtaaatccatgtgaatctagaataagcatctatgaaatgaatgtagtatttatagccattaacagaggtggttttggcaggaccccataaatcagcaactatcaattgtaagggttcattgtaaacagtcaatgatgcttttggaaatgttaacttgtgtatttttcctaagcaacatgcagagcaaacaaacaagggatttttattgttaatactgatattacaagtttgaagaacagatttcacaatcttttctgatggatggccaagtcagttgttccatatatcatacttagatagttgagatctgttacagtgagtacaacttgaagaaacagattcattatttggggatagagaagcagtaaaaacacatgggacaacagctggtgtgttggattacacatgaaactgacattgtttaaaaatatagaggccattctggtgtatcctagtgagaaggatggcttgtgtttcctggtccttgacaaaacatttatcagcatgaaacttaaaaaagacatgttatcatgagcaaatttagagacactgagtaagtttttggtaattttaggaacatgtaatagattgtttagcacaagaggatgagagttatttgtatgaataaaagattggccaatgtgtttgattgacaaacttgtacatctccaacataaagctgatctgctccttcatactcagtgctgatgttgaggtttttgacattaggagtgcagtggtttgatgcaccagaatcggaataccagttgctgtcatcaacaggagttgtttgagccacattctcttgagcattgggagaactggatgtgggaaatactcctgtaaagcttttatcaaatctgtaaaagcagtcgagaacagtgtgtccaagcttgtggcaaagctgacactgaactcgacttgatgaggtggaaaatttgcatcctctactgaaaccagaaacaccagaagtaccacgaccattagcatagttaggattaggagaaggattagtgtagttacctccattgttgctaacacgattgttgaagccatttatcctagctgatccagaataggatgagggtgggaatttgccttgatttgggaatctgttgccacgatttgcataattttgataggcgatattagcttcagacaattgatccatctcagtagtggcaacattaacactcagatcactttcttgatcaagatctgtcttttcgattcgagactcggaggcgagtacgagagcctcgatttcagcgactaagtattcttcgattctggggttggttgatatgatgaaagtatcatattcaggtggcaggcctttaaagatcgcaacaatgtgatctcttgagctcagaacttctccaatcgaggcaagaagatccacatgttgtttgacttttagcaagtagtcatttagtgacatttatccttttcttaatttctacaattttgttttgaactccagaatcttggaagagacttgtagagtgaagtgtttctcaagagcactccagatttgtctcgctgtgttgcatccgaccatgcgtgtaagaagactctccgtcatcgaagagagtagccaggaaacaagaagttgatcttgaacctcccattcaagaaaagctggattgtaagtgtttgaggcttgatctgcatcatttaggaactgaggaggaggagcacgatcttggatgaacattagcaatcagtttccacgaattacagcaaggacttactgtttccacaaaagaaatttgtgatcgtttaatctaatggacatattgtgattaaagtataccggatagaactcatcggagttgtttctcgatcgacttagattagaagctccattaggttgcacgactggtctgttaggatttgaattgttctgagtgttgtaggtgttagctccaacgtttgccatgttagccgagagtgggggaaaagctctgataccatgttgaatctcttcgccattgatgaacactcaagcaaacaacaattaccagaaaacagaggaaaaacaaagacgaagagaaagatgaagaaagagagagaaaggcaagaaaagagaagattgaaacaaagggcaatcttgtcattgaatgaaaatgagtgttattatatagcaaatgattacatgaaggagaacaagatagtaatgcacaaataaataatatggcatattatataaatcttaattaatttagcgattgtagtacttaaattactaaagttatttctttagcaccgaaaatatataaattattatatttacaaaagttaagtattttatcttctttaagtaatatttttattggtcatgttaaacggtctgctaacaaagtcgtgcactgtattgcacggggtgcttgttattggtcatgtcg

SEQ ID NO: 228246 - DNA, 2410 bp, Cannabis indica
ccatcttgttcattgtcgccatctccctcagcgtccgctggttcgctgttgcattgggcttgaacatcttggataaaaactttgttaatgggtgatgacaacccatacaaatcctgaaaccgggtattgaaataaatttgcaaaaaatatcaatctatgtgaaagagaaccaaaattcaatctatttcatttatttgtcgatgaagataatactcataacataataataattgccatgtgatcagttaatgacgatgaaatcaaggaataacaagaagaaaaaaaaggacaacatgcaagaatatgattaggttacattgaaaaaagcattataatgctgttccctgttgcactttagcagcatcattattctaataccataattatttgtgtgaaagaacatttttttatgttcttgttatatattttccaaatagttgtaacactagtaagaagaagaatatgaaattagctttattctcccaaagagataagatgacatgaccttggtggtagtagaatatgcttataaataaaggaaaaaggaaagagaacatttctgttttatagaaaaaaaaaaatattccctaaaagattatcaatatatgtcattgaagggagagaaaattggtgattttatatgcgtgtacatatatattatacggaaaaatgtaaacggtagttctattattgtcataagaagattccaaagtatttcttacgaaaaggaaagacatgaaaatcaacaacaaccactacctaaaaaaaattccaagaagacactgtgatccaagtaagactatccaaaaaaataaccttatttctgtaaataatttgatttttccaacagaataattcaggatttggatactcgacatacattttttcctaagaaaataattattctcaccgtctacagaatttttaagctctccatccgttgaactatcatctttactaaatataaatttgtagtttgagatgtgatgacagccaaactaagctactatatagagaatttctatgagaggtcagctaggtggaaaaaattatatcaagacaaatttctatgagaatttctatttgagtaatctatcataataaacgtttgtgggtcattcaaacacaaattttttgaaacctaataaccaaatgtctttagtctcttattaacaaatgtagaacaaacaaaataaaatgtaatttttgtaaattgaataaaaaaaccatggtaacgccacgtgtcaagaatacccaactcaatggaatattatctttctatgtatcaaacgataatcaatagatcatcctcaactttgacctttgacatgagacctaattaggatcgaaaaacgacaattacagtgaataagcaataaggtatagaccccacgtgcaattttaaatctccaaaatagaaggccaggccccacgtaccatttgtactaacctaactaacctggaactgaaacagacgccctaaaccatatttaatttatatttctacgtccgaacccttttattttttttctttaattattaatgttttgattaagaaatccactagtcatgtgtaattaaccctaccaaataataataaaacaaaagagtacattaactgcggaaaagcgccctcgtccggcgccatttagtaggtagacagaggaaccaccgtagcctaacgccttaaccgtcacctcccaaaagcgcacgatagcaataatttattttgattgataagaaaacgatctaacccgaaatagaaaccccaaataatatatgcactaaataataataataaatcttcttttttcttaaaaatatgattgttcgttgaaaaaataaatagatcgaattggcaaaagtttatgtgaaaagaagaagaaaaaaaaaaaaaaacgagaaaaacgataaaggccaaaggaacgaaaaagttggaaacttcataagaaaaacacgtagggaacaaagtggagagagtggcttaccagagccaatagctggcttctgagcaaagctgaaactagcaaagccgttaatgcctcaccggcgcactttagcgcgccgaaatcgagctgaactcccatcgaaccggagttagttttagtttccatctgtggacaaaaacagtaacctacacctaccaataccaaagaaaggtagaatatcagttgttgactgtggatattttcttcaaatcttccaaaccgttcgatctcatacctctcttctatatgccataattctgagtaaaaaggaaaaaagagaagaaaaaaaattgataaaaatgatttttaaaactttgtgcgaattgagtgagtttttttcacaataaaaatacagcagtgttttttttttttaaatttatttgaaagaggaagaaaatatgataaaagtttttttttttttt

SEQ ID NO: 228247 - DNA, 1525 bp, Cannabis indica
tacattaatgcattacaaagatggccatatacatatagatgtacataactttaacatggtgtatatataagaaataaatatgaactactatatatgtaggtgtagctagacaattaggtaaacaatcttttcatctttaagacattattaattcatgtcagtgcatgaatttaggcgaaaacattcacaaaaccagtcaatcatatgtacacagagatatatatacaagtagttaatttccacatcaataatcatagtaattaattaattaatttataagctccatctaaaattaaatatattctttatttgtataagaagttggcatttgcattgaaccgaaccagctatatatgctatatgtagaagaagagaactactcgaaattaataaactataatattaatttaataataatatacaaaatgaaaatgaataatttaatgtaatgtaatgtagtccgtccgtacaataagagaaattagaagtaaagagagagttgggtcagagagttttgggttatgttatgtgtatataaaagagagatagcagaaccacaaagccaaatattttggtcggagttatgagagacaaagctgcagactttcacatgtatatatacacctatatttatatgttataatatatacattgggctggctggggttaatttatttatctcaattccctttccactcttctctacaatcttcttctttctctctctctcatatatctatgtctatcactatatatatggctatagctgttttgatatatcatatatataataattagttaggcctaatcaaacttactaatacattccttttgttctaaaaaattaaaacttgtattaagaaaaataccaataatgcagcaaaaataaaataaacatataaaacacacggcttacactcaacaacaacgcctacttacgctacttatgatatataagacgttcaattattattattattattgaataatttttatgtttaaagaacaaaataaataaaagaatgaatatctgtatataagattagacgtggatattatgatataatttgcttttaaatcataaaaaacattcattcaaaaaaaaaaaaacaataataaaagcataattacaattatttatacatatataaaataacagtaaaaattcattaattagcgtgtaatataacaataaaatagacaattaatttcacatgtttcgttaagactaaaaaaaatactttttttgcaagaacttcttgaaagaaaataaattattgatgagaattttctagattttgtttggaccttagattttacttaggaaaatttttatgagaaaaagataagcaaaatatttcaataaatttgataattgagaccttttgttttgtttttctatatatttattgatcaaatttcataaattatactacatcatgttttgatttttgaagaataaaatttttaatttatatattcaatctaaacataagaaaataaaatctttttaatttttattttt

SEQ ID NO: 228248 - DNA, 4631 bp, Cannabis indica
ggcataaaacccaacaactattatattggctgagtctattcacggcatatgcaatatcaggccgtgtgatggtaaggaataaaagcttaccaattagactccggtaagatgtagcatcattaacaagaattccaatgtctttgcttagagaaaggttggcatccatgggagtagaaacagcctcggagccaaggagactggtttcatttagtagttgcagagtaaaatgtctttgagaaacagaaatgcctcttttggatcttgaaatttcaaggccaaggaagaatcttaagtggccgaggtctttaagtttaaattttgagtttagaaaggccttaaaggaagtggcttcagaagcattggtggttacaattactatgtcatcgacatagactaaaagtgcaaggaaacttgtagaggatttttcgataaagagtgagtgatcataggccgattggtgaaaaccatgttcaatcaaggtggtgcttaattttgcaaaccactgtcgagaagcctgtttgagaccataaaggcttttatataggagacaaacatgatttggaggtaactccccctcatggacataacctttggggagcgtcatgtaaactttttcattgagtgcctcatggagaaaagtattatctatgtccatttggtgaagggtccagttgttaatagcagccaaggctaagaaaagcttaagggtgttgaattttgcaactggggcaaaggtatcactgtaatcaatgccatgtaattgagaataccctttggcaacaagccgagctttgtacctatcaatttcaccttgttcatcatatttgattttataaacccaattatttccaattggttgataagctggtggtaatgagacaacagaccaggtgttatttttcttgagtgcaaaaaattcattgtccatggcttttaaccattgagaaaatttggatgcttgtttgaaactagtaggttcaatttcggtataagcatgaaaaataacatttggaaaagcaatacttagcttgtcttaattcagatattttaccaagggatgatgagtagaagactggtagatgtagtctttaagatgagcagggggaagagattttctgcctgctttggtaagtggtggatgctgtgagaatttagatgtttgcagatcctgtgctggtggatttttgggggaaattaaacaagtgctggtttggttgattgagcagctatttttgctgcttgtgatgttgcaacagttgttgctgctggtgactttgcagcagttggtgaattttcagctgatgttgctgctagtgtgaattctgcagcaggtatgattactggtgtgatatcagcagttggtgtgtttgatggtgttgcagctggtgtgtctgctggtttagaagcagaaataataggtgttgttgttttgtgtccagtaggaggatttgatgtagtttcagcaacatgtgggaaagtaggtacaggagctgtggaaaaaacaattttccaattgctgggtgttgagggacccttttagtggaaaaatttgttcatagaaaacaacatctcgagaatggaatattttgttagttgctaagtcgagaagagtgtaggctttcattccattagggtagcctatgaaaatgcatgcatgagccctaggtgagaatttgtgtctagtactaggcagagaagaggcatatgctagacaaccaaaattccttaagtgttcataagcagggggtttattatgtaataattgataaggtgttaagttttgtaataaggtggtaggtgttcgattgattaagtgtacagcagtttggataagatatggccaatatgtcaaggctataaaagattgaaaagccaaggcacgagccacatttaatatgtgttgatgttttctctcaacaaccgaattttgttgaggtctttcaacacaagaattatatacttgaatacctttttgaacataaaaggacttgatgttaagttcttttgcattatcacaccttatagctttgataggttttgaaaattgagttaagacaaggttatagaattgtgggattaagtattgcacatcagatttggattttaacgtataaacccaagtatgtctggtgtggtcatccacaattgttagaaaatatctatagccttctatgctattaatatggaaaggaccccatatgtcaagatgtatcaaatcaaaggaagattgattagtagaatgtaaatttttattcagttatcttgttgtggacaaggaaggatgtccaagtctagaattccatgaataggcactattacaagtattaatattctgtttacagggaaatgataatttggaaaattggacagattgcagcaaaaaatagaggttgcctatgcgtttagctgtcccaatcttcttgttctgagtatcctgtaatgtacaaagtttagatgtaaaatgcatactgttagatgtatcattgataaagctagaaacactaaataggttaaatttgaagcttggaacatatgcaaacgacttggatgcatctataggctgcagtttctgagttagcagagagatgatggcttgaatgtcttcttgcttggtgagattagcaagaatgccatattagtctgctgaaggttaagcattatggacagatggtgcctcaggtttctttttgtcaccataaccaggagagaacccgattagaaaaaaacatttttcttataagtgtcctggtttgtgacaattagaacagtaaggtctcatctttttgttgggaggaggattagtagaagctgctgaggcaaaagggtttcgggcaatagctgtaggggtttgagtggattcttggacagatacaagaagagggatattaggatttttaagctttctttgtcgttcttcatggataaccatggagaagactttggaaaaagaaggaaaaggatcaataaggagtatttgtgcacgaacagggaagaaggattcatttaaccctgtaagaaattgaaggacctgttctttattcaagaaagctaggttatcaattgaggcagcacaagtacaagggatcctaggtcttaattcctgaatttcattccacatacactttaattttgtaaaataagaactaacagagtcatcaccttgtcgaagagtgatgaaagtttctcttagttcaaaaattctagggccattaccttgatcgaaacaggcatgaaattcagtccacattgcagctgaagtgtcaagaaacattatactgctctttattttaggagtaacggaatgaagtatccaagacatcaccatttgattgcagcggaaccaatggtggtgaaggggatcttcaatcggaggttgtggtaatgtgcctttgaggaacaccgtcttgtttcttgcaccaacagagagctcaaaatcacgtctgcaggcctggaaattattgtcagataagagaggagtatccaagattaaaccagggtgatctccggagctgaggtaatagggactcgagctatcttcatgggcaggacgttgaacaagattctgggtgttgttgttttctccagaaatggcaaagactggagtgatgatcggatcatcgttcgtcggagcagctggaattgttgaggaagtatgaggcatgggattttggtctgaacttcgaggaccaatagcacgggttcaaaccatgttgaatatcaatggtggaacagagtttttggaacaaagaagaagaagagagaaaggttttaagtgtctgataccatattattgagagtaaaaagctgaatgattttattaatgaagaattaaggtatttatacatcagaggctgatggaaatcagcaactaattaataaccagttagttaaacaattaattaacctcaacagcctaataggatataactaacataactaatattgtttaagaatctttctcatgctcaactttgatcaaatacattgttcaaaccattcacaaaaactaggattaacaaattaagaaaatatcacataaatctaataaaagcaagagcaagaataagagtagaagcaagataaaaataaaattaaggaatacttacctttacccatgcctatgagagatcgaggaaagggagatctttacaaaagaaaattgagataaagaagctactatcccatagattcaagatgcttatcaatggaagatagttctccttgaatcgagagcaaggcctcatcaatagcaataaaagctcggtaattatcagcaacaacctcttacatttgcctccgaatttgctctgcatggactcgaagaagcttaggctcctgtaaaattcaaaccattaaatcaaacaaatacttagaatacaatataattgtgtcatcccatgaaaaaaaaaataagcctttgatttaatcaaatcactcatatctaatgaaacagaaagaaagagagaaacagagaatatttataaattaatatttttttaattattttatattggggaataagaataaaataaaaagaataaggtttgaaaataagatgactgacatatcaccatgtaataagtaaaaataaaaaatattaattttaaaaaaataattaataacaataaata

SEQ ID NO: 228249 - DNA, 3081 bp, Cannabis indica
cagctttttaccccacaccaaactacgtcaaacaaaggatgcgttagccccgcaatttgcctccaacacacctttacgagggaagtaagaggctttcagaacctgactacagagattatggggatggcgaatacatctccatatttgtttagcgaggagcgcttgattaaacattcccaagtctctaaaccccagtcctcccttgtccttcggcttacacaaataccaccacttacaccaatggatcttcttgtctttatcagatgaaccccaccaaaatcgagccgacatacgatgaagacttgaaatagtcttctttggcaatttgaagcacgacatagtataagttgggatcgcttgcactatagctttaataagaaactctttcccggccattgagaacatggattgtttccaccctttcattttagcccacaccttgttcttaatctcatctaaaaactccttcttgttacgtcccacaaaggaaggtaatcccaaatacttccaatggttatcaactaaccgcacccccaaaaactcagcaaggtgactccgggtctcattattcacattccgaccaaaacaaacttccgacttatgatagttaataagctgtcccgaagcagccgagtatttactcaatacttgctgaaattgttgacaactcatcatagtagcatctaagaagactaaactatcatccgcgaaaaaaagatgagagaccgaaagaccttggcggccaaaccaaattcctcttaaccggccttccctctcctctttttgaatcaagttcgagaatgcttcagcacagaaaaggaataaaaaaggggatagcggatcaccttgacgcaaaccacgctccggtatcaacttccctttaacttcaccattgatcagaaaggagagactcgtggatgtaacacatttcatgactttagcaacccatatgcagttgaaccccagtcttaggataacctcctgaagaaaaggccattcaattctatcgtaagcttttgccatgtcaagtttcaacgccatcttatcaccattctgaaatctgttcttacgcatacaatggagcccttcataagcaacaattgcattgtcatggataagcctatcctgtacaaaagcactctgagtgtccgagataaccgaccccatcacacctctcaaacggttcaccaagcacttcgacacaatcttgtatataacattacacaaactaatgggccgaaactcctctactctagttggccgatccactttcggtataagtgttataatagtctcatttgaacaagccaaatccacatcattattcaaaaactttaaacacatcccaaccacatcctgctgaagcttattccaaaatttttggtagaacaaggcaggatgcccatcagtgccgggggccttggtaggattcatatccttcacggccctaaccacctctttctcagtaaagatttccaacaataacccattcatctcctcactcactttcggttgaactcccaaaataacctccgtaaaaatgtctggatctgtaggtgaagagtggaatatattcctgaaatactcttcaattatcttctgtaccatgcttgtctcagttcgccaaatgcccatactatccatcaagcctttaattgtattcttcttcctcctagtcgaagccttgcgatgaaaatatttagtgttcaagtccccccacttcaaccacattgctcgactacgttgacgccaatatttctcatctttctccagcacacaattcagttgtctctcaatttttttaacttccacccacaccccaggatcagacaacgaggacaaagaattcaatgttgtcttcaacttcttaattttctgattaagcatcttttttttcctcctattccaactatcaagagcagtaccaaccctctcggttttcattttaaagtcaacccccgatcctactaccacatcctctctccactgctcctctatgatatctttccattgatcctcctcacaccatgcttcctcaaagtggaaccgccccttcttccgaccatgctcctccccttgactatcattacccaacggcatctcaaccaccaaaggccgatgatccgaggcccaccaatctaaaactttaatatccgccccatcaaaacattgtaaccactcgtcattacaaagccccctatccaagcgttccattatcgggttggactcatgttcattacaccaagtgagatccgtcttactagaactaaaatcaatcaacctacaatcatcgataacctcccgaaactcttccatcgcacccgcactcttaatcctacccccaaccttttccgccaaactaacaatctcattaaaatccccaatacacaaccaagctccttgaacttccctgctaatattcctaaggagctcccaagaaaatttcctttgagaagcctcaggattaccataaaaacaagtcaaagcccaagggagaaagtccttaccagcaatcatggcaagaatatggcctgctgatgatgagtccactcgaaccgtaacctcctccttccacataagtaatagaccaccactcaatcccacccgatcgacagaccaaaagttctccccaaactgcagagtggcactcaaacgctgtgcctgagacctactaagcttactttcagctaaaaacacaatactaggatcaaattctctaacatgggactgaagagcccgtaatgtccaagggttcccaattccttggacattccaactgaggagtttcattgtgctcggcggccttgctgcgcaaggctcgccgcttcactactagcaaactgagatggtaaatccaatacattagaaaaacccacctcagaaacaaacaattgcaccttcttctccccaagacccaaactgccatgactaccctccttaagagactcggccaccaaagaaacatctcccgaaatccccaccgttgacctgcgatttctccaactccgatactgtcttcccccgagagtccccattgttcttcgcaagcctagctctcgttttaatggacaccctcttacg

SEQ ID NO: 228250 - DNA, 2371 bp, Cannabis indica
tcaataaagaaaaacaaatttagattatattcttttaaacaattataattatattatgtatacaatgttaaactatgatttattttttatcaatttatgtattggagcaagtttttttttttttttaagtaaatgtataggagcaagttgtatgtatcaaatatgtcgcttattgttagtactgttattaccgttagctaagtgtacaagttgtagttagttagttgctctaactgtactataagttagtttgttaagtttatttagcttctaatgactttgtatatatacccctctaatcaataaagaaagtaagctttttgctatttgttcatctctgtttcttcttcattctgctgctctcaagatttttctcttgaaatcttacatggtatcagtcgcctctgactaacgtcttcaatggagtcttcgtcaacaagccatccgttacgtcccagatctccttccaccaacacggtccttactcatactgccgtcaatcgtcccaaccagatgaacaatccgttttctcattctctcacttctactcttactattaaactcgatcgcactaacttcttgtcttggaaatcacaagttcttcccactgtgataggacatgatcttgatgaaatacttcttgcaggtattcccccacctgctcagttggtttcaagcgagaatatttaatcaatggaaacgtcaagatcaattgctcctatcttggttgcgtgcttctatgacagaagttgtgcttgcctcagtcgccaacttcactacatctcactttgtttggcgagccttagaacagaggttctcaagctagtcaaaggctcgtcttctccaactcaaaagccaattctccacgcttcgcaagggcggacaatctatctctgacttcagtgacaaagttcaaactattgttgattcgttagctatcgctggctctcccattcaagatcgagatctgatcttacaactcctaaacggtcttggccctgaatacgactctgtcgtctccggcatcaccgcgcgtagtgatgatcttacatttgaagaagttcagtcgctccttcttgctcatgaaagtcgcctcgatcatcataatactgttgatgatctcagcatgaagcttcaagcgaatatggttgtctctggctcaataaacactccatattgccctcctgcaaccaagaactccactagaggtggttatcatggcccagctcagaacaatcgaccattgtgtcaactctatcttcgattcggccatactgcaccagtatgccattatcgcttcgacaaaaattgggtccctcccaagctcggtgtcacgggctcaccttttcaggcagcagaacacccgtgcggcaccttgacttctctaagccaggtcagtcttccaaccatccgagtaacaatgggctcatttttcgcgcgaccgtgtgcctcgtgcacacttccgtctcttgaacaactcccgccgagtcatgctcgcaagcatccatgagtgcatccatgcatcgaggctctctagccaagatactcgcactgtccataggttcccaccatggtaagacaaatcccaacaccgacgctcaccttgtcactcgtgaccaaggtagcatgtgtggcaagatgccaacaccaagccaacgtgccaacgcttctatcatgccccattcgatactgtccgaacagtctccctcgttgcccaaggactcccatacgtccatggaccaatcctcaaggcgccatgcctccacgcatgttggcaggccctcaagacaagccaccaaactagttgcatacattagacctctgtccctttccaacatggtgcatccgtcccatgcgtgcatgcaagctagcccacgaatgactacccgtgtcatctcgtgttgagactcgtggcctaggcgcaccacaacgtctcttggaggatctaggccacgtcccgtgcaagcggcataccggcaagccaagggaaacgtaccagtgaacctctggcggctttcttcaacgcactaccgggtcggcccgataatgtccatgagtactccaactcatggagacatatgagtcccctcgtggtcctcatatgcccgccctactagtccccactggctagtagtagctcacttagcaccaaggtacaaggggtggtggagagctgacaccagggtacccccttaaagagcattctgagcttttagccttctaccaggaacatacatgattttggctctgtagacatacggccaaaccgtaaaccatatcacatagtttcgccaaactaattacaccattctatttgtagacccaaataaatggcgaatatcaagtccagtccgttccgaacaatattgaa

SEQ ID NO: 228251 - DNA, 1833 bp, Cannabis indica
gattggcaaaggtgaatcggctaatggtctctactttttggacaccactaccgtgcctatcaatgccttcacttctgctgctatttggcataaaagattaggccatttatcaaataaatgtcttgatttacttagtgattctttgcattgtaaaacaaagaatttacataatattgaaccttgctatatttgtcctcttgctaagcaaagaaagttacattttcctaataataaaagttttgctactcaatgttttgatcttatacattgtgatatatggggaactcatcatgttacttcccactccaaccataaattttttcttactttggttgatgaccattcaaggtttacttggatttaccttcttaaacaaaaatcggatgtcctctttattatacctgaatttatttcttatgtacaaacccaatataattgtgtttttaaacgtttcagatctgacaacgcacctgaactttctttcaaagaattgttctctaaacatggtatcctacatgatttttcatgcattgaaacccccgaacaaaacgcagtcgctgaaagaaaacaccaacaccttctaaacgttgctagagcattattttttcagtctaaagtgcccatacaatactagacagaatgtattcttactgctgtgtttttgatcaatcgaactcctacaccgaaccttcaaaacaaaatgccttatgaaattttctttggtaaacagccggtttatgatgacttgaggtgttttggctgtcttgcctttgcatcaaccattacttctcatcgaactaagttcgagcctcgggcaagaacatgtgtgttcttgggatatccaaggggagttaaaggatatcgtttatatgatataaatacgaaacagatttttatttctcgcaatgtcatttttcatgaacatgttttcccttttcataaacttaattctactagtaatattgttgatccttttttgcctcttattcttcctaatgataaagtaactaacacacatgtcaatgactatccaatgcaaaatccctcttcgatttccactaacccttttctgcaggatattgcagcagaaacgcctacaacacctgattcttttctgccagatattgcagcagattcaccagtagctactgatgttgaaaatcatgcagaaaactcacctcaacccgatccatcacaacccctgcctagaaggactactagagtgtcacggccacctagttacctacaagattttgagtgttacaacctgctggaagataaaacttccacttcctatcctatctcaaaatatgtttcttattcaaagctttccaaggcttacaaaatgtttgttcttgcagttacagcagagtttgaacctcaaagctacaagcaggccatcaaattcaagaaatggcttcaagccatggacattgaactacttgcacttatcactaacaatacatggaccgtggtgcctctccctccaaacaagcgcgctataggatgccgttgggtatacaagatcaagtacaacagtgatggaagtgtagaaagactcaaggctcgccttgttgctcaagggtacacgcaacaagaaggcttggatttttttgacactttctcaccagtggcgaagatggttacttccaaactcctacttgccattgttactatcaaaaaatggcataccttacaactcgacataaacaacaccttcctcaatggtgatttagacgaagaggtttatatgcaaattccacaaggtctacaacttcctccttcctcctcgggtgacaatcttgtgtgcaaactccataaatccatctatgg

SEQ ID NO: 228252 - DNA, 1137 bp, Cannabis indica
tacgcttttcgagatgactccccaagatttctcatcttgagattactccaagttaagtatgattaactctaaggtaagttcatggtgtgttatctgaaagtagatgcgtcattgtcgttcctaattgtatttcctactttcatcccttcgttaatcatatctaatttccatcatttgtttttatcgatctcttacaattccttatcggtattgttcacttaaccttgaggagttcctattttaatgtcaatttgaattttgttcatctcaatttatttcaacttgtatcgattctcttaaactagtataacttaaattttccaatcatttacacataactactgctataaaattaactaatttaatacatatgataaaagcaatactactcataccaagtatacagagttaaactaggagtactcatttcttgattcctcaaccaacaataattaaaccaaagatcataccttgatcctaaaatcatcccattctttcttcattagggatcttaataatcttcctaaatatatttagaaatatacacacctcaagtatattctcaattttactgacaattcttttatgtaaattaccacacaaacttatagtgagtcttccgttgacaatgttaattcatcgaaatctaagattcttgtattcctttcccataattaccacaaaggtttcacttcctgattcatgtgctaccatcgttcccttgcaattaatggtatcttcatacttggaaaattgttctaaacctcatactataattaattatatagctcgtagcttaataaaacaacctattctattatctaataagataaccaataatcaatgttacttgatcaagtaaccaatttcttttgttgcccaattaagacaaccatattaaccctaaaacaggtttatagagtaatagttctatcactctcactgttacttaacaaagtaacctaaaacttccggtcgtccaataaaacaacctgtatatatacattttattctctacattcacaaaaagaaatctaccttgcgtacaggagataatcagttctgttgaccgagattttcggcaactactcaaatatgattatattaaagagctgtaagaaagtgagatgaagattt

SEQ ID NO: 228253 - DNA, 1912 bp, Cannabis indica
atattaaatttacatgtgtaaaatgacgtggactgcctaatggcagccacgtcatcactccgttactaaaatgaacggaacactacaaaataccttaaattaagcattgtcaatagtttgagggaaatttttaacatcaaaaataattcaaggggcacgatttagcaagtgtcatagttcggggggggggggggaattacaaattagcctttcaagaattatgggcatcaccagcgacactattattaacgccatagagtcttcactatagtaaaagtatcaccaacgatatttaagtgtcgttagtgataaaaatacattttttgtttgataaaataataaattaatggagacaaacacctaatggtaatattatcatcattgataaatatattaatgacgacaatgtcgttactaaaagcttttttttttttgaagatggacaattgcaaaggtgggttttttctctctaaaactgtcgttgtttgtagtcaatgatggactatgcctacactgttgatatcaagcccttcacagtctaataatgacattaatatatacttaacccctctagttaatgattggagtcaattgtggtatgagggtgttcctgcatacaacacctttaggaaagaagaattttatcttaagcccatattactgtgaaccattaataattttctaattttcagaaatctttttggatacagtgtgaaagggtataatgcatgtcctatttgtgaggagaaaacatgttctatgtatttaaaaactcaaagaaaatgtgttacaagggacaccgaaggtttttgccaatcgaacatgtgtttcagacttggaaaaaagcatttgacggtaagcatgaatttgaatttccaccaccaccttaatttgcatgggaaacaagtatttgaaaagttaaataaagttcaattccacattggaaagcaaaaagcgacttcaatgaaaagaaaaggtcaccgtgagaaaagtgatgttgttacaaatgaacctcaagggccatggaagaagaagtcaatattttttgaattcgagtattagaagcatttattgttacgtcataatttaaatgtgatgtacattgtgaaaaatgtgtcagacaacttgcttaataccttattcaatattcctgggcagagaaaagatggaatcaaatctcgcctagatttgaaagagttaggtattcaagccaatacacacccacaagttgttagtggacgaacgttcttaccaccaacttgtcatgctctaactaaagtaaaaaaaaaatctttgtgtggttctatctcctaggtgaaggtactcctcaaatgtctcaaattgggtagatatgaacatgaaagtaattttgagtggtctgaaatctcacgatcatcatatattgattcaatacattctactggtgagtatccgttctgtgttgcctaagaaagtttgatatgaaatcacaaggttgtgcttgtttttcaatttttttgttgtaaagtggttgatgtgactaagttagagaatctcaggttagaaattgtagaagttttgtgttatttggaatattttttctcgccatcctttttcgacataatggttcacctaacaattcatttggtaagaggtgaagttgtgtggacttgtgtacttgagatggatgtacccatttgaacgatacatgaaaatcttgaagggttatgtcagacttagaagtaggcctaagggttgtattgttgaatcgtacatcgttgaagagacgattgaattcttctcagactacttgtcagaggttacaactttagggctgaacattttgagcgggtttgacccgaacccgagcaacccgcccgaacccaaactggtgaacccgcaaaaaaaaattttaaaaaaagtttcgggcggg

SEQ ID NO: 228254 - DNA, 1222 bp, Cannabis indica
tgagaattctaagaaaattcactggatatcttgaaaaacagtttgtcaatctaaatttatgggagggttgagtttttgatctttaatacaatttaatcaagctatgctagcaaagcagcttggagaatcttcaaaaaccctaactctttgcttagtcaggttcttaaagctagatactttcctaatttctctattttggtggctgttcctagtcataacccctcttatgtctggagaagtatcctttggaggagagatttgatggcttctagtatcatttggaaagttggggatggggataacattatgactattgaggattattggcttcctaataaattttttccccctgattcatgtaagctttcttattttattgatgactctggatcttgggatttgtctaaacttaggagccattttgatgattctctagttcatgatattcttcaggtgtcgattactagttttcatggaaaagatgatcttatttggtctagggagaaatctggtctttttagtgtcaaaattacttatcagttggccctctctcaacaagacatcccttcttcttcatcttttacaaactctcaaaaattttggagtaagatttggaactctaaggtaccttcaaaaatcaaacattttatctggagggttgtgtctaatgctattctcctttttttggttaaacatgttattgattctcccatttgtctcatctgtaagcttagtcttgaaactgttcaccatgctctgctagagtgcaccagatcgaggaaagcttggaaatcttcaaggtttgtgaatcactactataattataaacaccttgatatcaatgagtttttaatgtgtgttatagatgctttggataaggactatgttagtattttatactgttttttgtgggctctttagaatcaaaggaataatgatctttacaatcatagtgttattctagctactgatgtctttgattggtgtgttagttatttcttcaaatatttgattggtgtgttagttatttcttcaaatatttggatgcacagcaacacaatcactacacaagtaaatctgctcttatgcacactaggtctttggtagcttcttctgagggtactttttaggtttttacttatgcttccattgatcatcacaacaggaaacatagcattgacattgctgttttgtatgaattagacagggttaaagctgggat

SEQ ID NO: 228255 - DNA, 1225 bp, Cannabis indica
atggagaaggcctatgataagttggattggaacttcataattcaagtcctctcctctctcggattccctactctgttcataatttggattaaggcctgtatcacagtcaaggagattaaactgcttcttaatggttcagtaatggggaagttcaaacctacatgcgggttacgacaaggggatccgctatctcccaccctatttatcgttgcggcagaaacactatcgagactcttctttgaaatggaaaataagaatcggatcaagggtttcaaaatgggaagacaaggtgattcggttacccatctcatgtttgcggatgacattattctgtttgggcaagctactctgaaggaagccaaagcgtttatggattgtctcaacgaatattgtagctggtctggccaatcaatcaacctcctgaaatcatcggttactttcactagaggagttccccgggctagggcgcatgcttctctcaattccttgcgatgaaaagaatgtcgccaaatgcttcgtacttgggaattccactctttaagtctaccaaacgaaccaaagaccctgagtttattgttgagaaggtcctaaagagggtccaaggctggaaaacaaaattattatcaagtgctgggaagtcctgcctcatcaaatctgtcgactcaacaatctccaactatgttgttgcttcggatgtcatccccttacccacagcgaggaaaatcgacaaggctcttcgagatttctggtggggagaccagccagggaggcgttcgatgcacacaattgcctgggatgtgttgtgtcgccccaaggtttgtggaggactgggttttcgctcaacggaatccatcaatgttgctttcctcatgaaatgggcgtggaaagctcttatagacaacaatagcctttggagcagggttgccaatgaaaaatacatacacaaccgtgatttcatggacctccaagctagcgctgcggattcttttctgtggaaagcaatattaaatgcgagatgcctcttatccaaagggctgtgtcgtaaaatcggtgatggtaaaaccacttcgatttggttccacccttgggtccccaatggtgtactccaaccccaaccccgtttggatgcgacggatggtattagcttagtggaaaatttcattcggcataacctgtaacgtcccacttcaagcctccattgggcccttacacccacggaatgaat

SEQ ID NO: 228256 - DNA, 1239 bp, Cannabis indica
gcaacgagtcacagtatgttttaaaatcacgtaatatgcctatgctagttagggtgttacattaattgatcacggatacactatgtccgaatttggtggtatgaaggaggcaatgaagagtccccgggagtcagaggagcagaagaaggcaattcgtgaggaagcccaaaaaaaggagtctcttatggagcagaaccaccgagaggcactaaaggccagggatgaggtcgttgctatgacgaagagggatcttcggaattctagggaagaagttcaagaactaactgccaagctgaaatcattggaagagctgcaccagacttatttggaaacagcagctggcctgactgttgaagtaaaggagctccgtgagttcaaggagcaggctcgcaaagaagcagctaaagcaaagagggatgccctggtggccccattcacttgtcaacattgtaagaagcgttttgatgatggggttttcatgtgctggacagctaacgactacaaccttcgtcttccttttatcccaaacctgaagaggttctagcccattttcgagagaaaagtaagaggcttaatgcggtgttagaagagcgcaggggtccccgtcttcctccccgagctgactaagtgattttcttgtttattttatccttctcctttcttatagaacaattcttttttctttcaatgggagaatttttatggcccgtccttaggcctttttcttttttggattttcttattccttgaacaatttgtgtcttgaatctatttaaccttttacttttcttatgatatgccttagtaccccttaagtgacatgaaaataaattttgaggtcacttagtctttaaaaattacattagaggttgcatacatttgtccggcacaggctgtcttatagaatataaacattgtttttaactattgatagtattttcagaggtggtcagcattccaagccctaggcactgtggtttcgtctattcattttagcttataggtcccggagccgatttcatcctcaaatttgtacagctcttcccaatttggcccaagtacccccactctgggttcttgagtggctggaaatacccgtcttaggactagttcgccaatggagaattttctatctttgaccttggcgttgaagtatttagccacctttctttgataagctgccattcgtacctaagactcatctcgaagctcgtcgatttgatccagcacttcttgtaa

SEQ ID NO: 228257 - DNA, 2099 bp, Cannabis indica
atgaaaataataataataaaaatgggataagataattgaggaaggataactgcaaatttgatgctccttgtttgtctcttaagtgctgaaaccactataagaagtttgtgtagtagcgtactatgtactttaattaaaatgtatatgagagttgtaattcaaagtatttccttttatgataaatatttagttaattatagcaaaaaaggataaaaaaaaactgttaggactatttccatcaaaagttattagtttctaataaaacttataacatttttgctttaattatgtaattctaagtattccaaacttacatcaaacttggtacctaaaaaacacttccattaaaggtttgctagctataatttcatgaatcatattttttattttttgataaatttcaatcatagtatttattaaattattaaaatcctactataaaattattattatgacttaatagttaatataaatctcacaaaatattctaacccggatttttgccctttaaaaataaaatattttcctcaataaaaaaaagattataagagtcaatctcttaatttaatgtactgacatcagagctattaatatagagaaatgctaaagagcaccagtggtacctagcaccttcctacatgtcaatatcgttattggtccaactaagtatcgggttccatataatttaatataatagtttttagggaatatcgctaactaatcgcaacgcgacatgtcgagaaggtgctagagaccactggtgactcatagcaatgctcattaatatattatggaaaaaagaaattttattaaaaggattcaaccgaaacaatgtgagagatacaaagtagaatcgaaacatctagctagtgggctgctttattctcaggatttctaggaacaaaacaacaagtaccaccacagtagaagttgatactgttgatatcaaatgcgaagagatcctcggtatacaccaactcccacaccactatatcgaaaccaaagcaacatggaggctttaatcccttacatccacgacagtgcaacagttaaaatattataaaattagtacagattaatcatgagatgaagtaatgtatattatatgattgtgtataaataatagtgtatatatattgttgactcagaatttggccaactaacggtggagctttaataattgttgattatcaccacgtgtaaataatagtaacaaatagtaaaagttacaaagagacttatagaggtattcggctcccttgtttaacgagtaatgacttactcttttttagttgtattcactcttaagataatactatgtagattacatgtctagaccttgttaatttctagctatggctctcttcatttattataattgtaagaacattgtgtgcagataaaaactgatgagatacttgttaagaacttatcaaaaatcttgacttagtgtctaggatacattgatggagtataactttacaaggtttgagagtgagaggcttcacacgtgtgagaaacttcatggcgcatgagagagcacttgtagagaccttttaatgattgtggaatgacttagccctcgagagagtgatctaatgccctttatatagtataggacttacaaaatatcataattcaaataagtaaagatactacccttcaaaaatagagatattaacatcttttatctattatttaaattacaaaaataataactaaatccctagaatacaggactaatatcttaagggaatatccctatcttcatgttggccctgtctcgcaatttgtttagctgtttagagttgtatgtgttaatgccaattttcgttaaccgaaaataaatagccttttagtaataaatattcttccaaaattaataagtaataaaagaaattataactctagatacttttacgtgattttgtagttaaaatctacatactccacaagtccttcttattaggaatcttttctgaatacagagtacaattagagaatttgaataataataattcactatccgaatctctcctttttcttatgggctatgccactatttataaatgtatatgtaacgcctgtatttaaatatt

SEQ ID NO: 228258 - DNA, 1318 bp, Cannabis indica
ttgttttgaatgtggttgtcttgaccatccttttgaacaatgtgttgtttttatggagcctattcatactggtaatgatagtgaaccttatgtgtatatgtatatattaatattatatatatttaaaatgtatatatttattaattttttagtttaaaaatattttttttatatgcgggtatgtgtatatattaatattatatatttaaaatgtataaaatacattttttaaaaaataaaatataaagaaaggaataaagaagcatacggatagtgtaatgtaaaagttgttgtaaaatagataaatattctgatgatcattttaaaagatagagtaaaaaagttgttggaagtgctctaactctatcattcaaaatacatcaccaaaattcaattttttttggctaattagcaattttccccctcgaattttgacatgtaccaaattatgcctcctaaactttttggccgttaaaaatcgcccctgaactattaagattgttctaattttagtaaaaaaaattctaacatggatgaaagttcaggggggcatgatttagtatgtatcaaagtttgaggtgcatgatttggtaggtatcaaagtctaaggagcatggtttagtacatacacaatcactgaaagagtaaaattgaatgaaattagacaaaaagccctaaaatctaacaatctcaatagtttaggcccaaaaaagttcagggggcatgatttggtacatgtcaaagttcggaaggaaaaattcctaattagccttttttttttcaaattttaaaatattttattcatttcaaatatataatatattaatatttatacatatcccatataaaaagaaaatttaaacccctaaacaattaataaaaaatatatttttaaaacaatcatcttcattaacacaataaataaaatttaaacctccaaacaaataaatgtataacatgaatagtaaattttaaaaaagttttttcaaaaaaaagtttagagcatttgatgtatgtaacatattcttgatttagttctttaaatattttaaaaaatccttattttaagagaaatgctaaaaaatacttatgatgtctagccctcttatgagatataatattgctattagtgcaatttaatatcggatcccacttattttactttaataaagatgatagagatcactaactaattataggatgacacctcatagtggtgctaggtacctccaggggcggacccacatagaggcgaggtggggcagtcgcccaccctaaaaaaaaatcgaaaaaaaaatatatatgcattttagttagt

SEQ ID NO: 228259 - DNA, 1626 bp, Cannabis indica
ggtatgatatatttcttttagtgatcaatcttagtacacacaaatataatataattttaaattttattatgattagtataacctatacaatattatctggattcctttgtaatttattttcattggtcatcgctactacttttcatattaatatcatcactgttcattatatatagacataataattatatattagtaatgactgtctaattggatatataattaatacaatgaagaaaatttaaatttgagcctacgttttaaagcattgatattaggtatgttaatggtgtctagacctataaatatataaatgtgtgtatcgtacatattttgaaatataagtaaaggtatatcaggccatacataaaatataaccacttcaggctaactcgagtggtcattagagggtgtgtgttggagattctgggttcgagtctcaaattatgcatggttgtaatatataaacgcttaaataaaaaaaaaaaaaagaccatacataaatatagatcgtgtcgtactaataattttataaaataaatttcacatggttataaattcaatatttttatatcgtgtttaaatttgtgtaatactctactcgaatatttgtgcctaattttttaaataatatcaaccccttttaagtgttgtgtgtcactcttatgatcacattaatttgtatttgagcatgttaatgatccaaaatatttatatatatatatatatatatttatatttatatgacctgctataagaaaatgacaaatccataatccatgtatgtaagtttgtataaaaactagaggctcgttgggcacaatgatgtctgtattgtattatattatattgtgttcaattatattgtatttatattatttaatggaatattatattttatattgacttgtatactaatatataggttacgtaaaattataaattctttacaataaactcgaccccaaccccgaccacaacctggacttgggctcggacccaaaaaaatgccctgaactcgaactcgaaccctgacatgaactcagatgcggaccccgaactcggacctgaactcgaaccgtgacccgaacccctgacccaaaccgagacctaaactcgaactaggacctagactcgaacgctggacttggacttgactgggacttggaccccaaaccccaagtttgagtctgagtttcgggtttcagaccctggtccgggatctgagtccgggtccatgatcagggtataggtccaggtccgctgggctggggtcgaggccagggttgactccaaaccctttgtacacattataatacaagttaatacataccatttgttatgtattaaataatacgactcacattgtattaaaatttatagtcgtaataattaatacacacaatactatccaaatatagtattatttgttatttaatacaatatgactcttatatggcttaccaaatgagtcatagtttttcctcttatttaatggtaactcttatttttacacttttaattttttacagctactctaaaaatacttttttcagctataaatatagtaattaaagactacacatcacaatataagatggtcaaataaatttttaaatgattatt

SEQ ID NO: 228260 - DNA, 1545 bp, Cannabis indica
tcaatgaaagtactaaaatatttgtcgagatttttaaactgatttattatatgtcaaagctaaagaaaatcaaagataaagaaaataataacaaggatttttacattggttgaggcgttaatgagccttagtacacgagtcaatattattactttagagctagaaaaccttaaggtttacaataatgaacgaactcgatattttgccaaagcaattgaggagtgagtttctaacccttttcatgaagggttcttcgtgtatttatagtgtgtagggttcatactcgttactcttttctcactaatctaatatttacaaataacatattgactttaggcttatttgaggcgcttagtgtatactgatgtggatgccacgtcacgttgacagttgcctaaaactgtgtcttatcttcatggagaataaaaacacattaaatgcttgattgctaattaccatctttctatatttaggaagatatgatcatcgggaaaaattcttgggagttaatctctaataccttgggatttcgtaattaataagagtacttttgagttggtcatatagatactcactgtttgcttctcccgaatgcgttgtctaatatcttccaaaaatatgccatattggatgggtctttcacctgggtgagccttttacttattcggaaggactaattgcctgcgggtcaagcccaacatttcatttgggtctggtgttaggcctagagtatttaaactatgtttgttgtaggatttccatgtgtccttatccagaaaaacggataacaattataaataaaattaaccttgatatttttctaacaaaatgaacactatgtctgctttgtctatgtttttgatgaaaaaattaaacccataaaaagttatagaaattattttaccaagctaatgaactagtataataagatcatgcaagttatgcatcaaaagagtttactcggtcactaaaatattttaagaattcaaaccgtgtccaataaactcgaccccaacacaaactccaagtcgggttcgggtctggggtccgggatcccgactctgagattcggggtccggggtctggtctgggtcccgagtctcagtctcgggtcgggttctaggtgcgggtcaggtttcgagtttgggtcttgagatcgggtccggggttcagtccaggatccgagtttggagttcggtccgggttgggtctcaggtctgggtcgggtcctggtcccggtccctagatccgagtcagaaattggagtaaactccagatcttttgtaagtataatacaagctaatacagaccgtttgttatgtgttaaataatacaacttacatcatattaaaaatttttgtcgtacccaaacataatattatttattattttatataatacgactcttataccaacttatcaaacgaatccttaataatttatagggttatttgcggcataacctccttaagtggtcagggttttgcaattaacccccaattctaaaatttttgcggtaaaactccctaaactcaagttctgtta

SEQ ID NO: 228261 - DNA, 1502 bp, Cannabis indica
ccgccaccgccattgccaccgccgctgccaccggtactagaagagctggaagccatgttggtgaataagtttgatgatggtgcccttggacgcttggtgcgcttccctttgatcatcatcatcgtcatattttgtttcatcatagtcaaatcatgatcatgatccttgttatgaactattaattcctcttgagattccatattggtcatgtatatataattcgagggaaaatttggatatgggaaaagggaaattaaattgtgttggaggaattatggaaggaaaaaagaagagtggtaatgttggttttaagtaaggaaaaagagagagagaaagagagttgtattgtctaatatataaaaagccgccctcgtgaatagtactagtgatgaataaccgtaaattattttaggttattggttttttttgccagctttgggtgttttccaacattggaagttatatatatatttatagacatgtcatgtataatgattgatataatatataattatttatacatatatattgatgagagagagatgcaatgtaattagtatgagaaggggaggaaacgagtgagattcggttacctttgaagcaatacccattacttttttccaacgattccttactggaggattggtttgcaagcctggaaccatatacaatttgcacccatataacttcttcttccactctttttatattattttatttgtacttttcttattttgttataactatataatataaatattcatataataacttcttgcagctagtagtgtagactttactaatttgctaaaaacattattgttgtatctatctttaatttagtgagtgttacttagttgtgagttgtgatcagggattttatgacttgatgattaaagtttcattagatttaattaagaatattaattaagtgacgagttaaaattaatttggattagattaattagaggggggttcttctaataatgaagcatttcatgtgctgttgacccaccccaatttcgtatcacaacactataatcacttcttgtgaggacaaccaccccaaaaatcacgcccgactttatcatcaaattattagcttatatatttatgcatatataataatataagtagtaatctatctatatctaatcattaagggttggtgtaaaacatgacacattttggtgtatatatataaatataacactacttatgtatacattattagctaataaagcctaattatagagggaatcatagaagtaaaatttaatttttgtaataggtaatacatttatcttacattatatgtatgtgctagctagctaattaatttatttataacttaattagtaatttatgttttttaatttagtgtatttatttgaatgcgtccaatttggaaacatccatatctcattaatttctacaatattgggagctattaatagtttaatatatccgatgttgaatgaagtaattgactttttgacaca

SEQ ID NO: 228262 - DNA, 815 bp, Cannabis indica
caattatatgtgttaagcaatatttctgattatttatgtatagggagagtagagtaagtgagtaaggtaggtaagaaagtagatgatgaagcagagaaatataaagtcaaagttggaagaatggtgatgcatggagagatggagaagggagtgatatcaaaataaataaaaggcctaattaattaatccaaaacagaatcatcgctttaaatgctctctgctttggtagtcgcagttttaaatgctacgtaccctcattcatatatacacattcttcttcttcttctttctttttaacttcaaataataaattatcattttaatttacatatataaataccaaattctcactctctcttccttcaaacttacttttacttttctctctcttttcttctttttctttatatataagagaatatagttatagagatagagaagttgtataaaatatatatgaaatggtgactttgatattggcctggttcactcacacaaaatttatagttgatttggtttgattgagccgtgccaatatcttagttctctttcattaatttcttcccaaatatatattcaaactcaatcttaatgatggagcgagtaggagcctcttctatatataggtttgttaacttaactcatctacaaattttttattttcttttttatatatttatgtgtatgcatttgtaatattatcccttcccattttttgttcttatattcttctttccttggaggccaaaaacagaaaacaaagaacaaaccatgatgatgatcatgaagatggttcttcttcttattattattat

SEQ ID NO: 228263 - DNA, 1812 bp, Cannabis indica
attaattatttttcatggcaataatatttacctgttttgagatatattgcttgatatcttcttcactgattttggaaccatttgatcttacaacaaaggcaacaggaacctctcctgcagcttcatctttcattctgaataacaaaaataccaaacaattaatttctactaataaattaattagtatgcatgcttgttaataccttttttttttactaaaatgtcacttttgtaagtcacaataaaaaatatcttgttactaattaaaaataagtatataaatataaatgtaaaaaaacatttaatttagtcgcagcaaattataatttattatgacttattactcttagccatcaactttttttttgtgcttctatgatagaattttagtaattagataaatgttatgtttatgtacaatacttacgaaacaacagcggcatcggaaatattaggatgggcgatgagcatggattcgagctcggccggggctacttgaaagcctttgtatttgatgagttcctttaagcgatcgacaatgaagagttcatcgtcgttgtcaatgaaccctatgtcaccggtgtggagccatccagcttcatcaatggtcccctttgtggcctcaaaatcattaatataacctgcacattttacaacccacacacacctattcaatcaatatgaccgacacaacatacacaaacttttctctttcacaaaaaaatcattggtacatgaaacaaagcacatttattggcatgtgcaataaattgttttatgataggggtgacactaatatatttttaaaattatttttattattattattactattatacactagtggtacttattatttaataagtgacattttaatattaattagccatatttaataaaagtcatttaagatttaatatttaattgtattaataatgatatgacactttaaagagtcttaagcaccaatattttttagcatttttctattattaacactttgttttgattaaaatagatagccttgtttgaaaatatacttttcactcggttttggtaggtgagttatgcatttttgcttagctaaaattgaggtcacttcaagattattatttattattttttttgtttgccaaaggaaatggtcacacataactttatatattacataactttgaagttttcaattcaatatttttttttttatataaagataattttatgtctatgactatagctatatgttctttcataaatttgtccaaaaaaataaataataattaagtggtaatactaaaataataaagttaattaaatatattttttgtattgaactggtctaattacaaatataaatggtaaccatgtcaaaccaaattttttattttatatttggtgtggtcttaaatcaaagagtaattaatatcttaattagaattaaagaatccacaaataacgttttcataataataataaaaaaattaattacctttcataatttgtttccccctaatgcaaatctccccagattggttacgtggaagagacgcgccagtatcaggatcaacaatcttcatctcggcgtttctaacgactgtaccacacgcgccggatttaataggaaagggttcctttgcaaaggccaagcacatcgatagtacgggtcccgcctctgtcataccatagccctgtaatttttaaatcacagaccaatgaacaccgtctgttattctcaaattcgtcaacgtcaggtcacaataacatttagtagttaatgatgtcttatatagttacaaaaaagaagttggtgat

SEQ ID NO: 228264 - DNA, 967 bp, Cannabis indica
tcacaaaaaaaattatgttgtgactaaaaagttgtcactaaaagtaacattttttttgtagtgagttattgatttttgagcttcaattccagtatacaaaacaatataaacatatcaaataaatatgcaaaccacaaaagagatcgtaatacctccagtcattgatctttgagcatcattccctagtgtagctttagattgagtaatcgggtttctaagctctctccactctctttaaataaaagttgtagtttattatacaaaatgagtgaggagcttagaatcgagaccttatatataggtgagatactctttcagtatctgcgctgcattaattatgagaatattttgacaattaattcagaaaatcaaaactgtagataaattaattagtaaattgtaatatgaccatatttaaaatatacattcttatcacattttgatttgtgatcatacagttagcgaacaattgaggataaagcaaaatcaatttaaataaatttgtaccaatattagaaatattctaatattaaatatagaaatattctaataaaactctcttattgtatattagtaattgttgcagatctgatcataataaaaagaacgtggcagcaaaagttcttttaattacgattttgttgcattcatacatcccgttttggttgttaagtgctagctatataggttcattgaacactaccactataaaacctaattctcgtcggtcctcaaatcaattatttttttaggaccgtcgctaataagaataagtgtttaaaattgtcgactatagttgagcattcttgacagttttagatcgataactaccgtttaatattctcgatgatttaaaacaactacaaaattgaaaacagacacatttaaaaggggaatcctcgacaattttcaaactgtcaagtctatgttcagtaggaatcatccagacagagcttacacgtgattg

SEQ ID NO: 228265 - DNA, 2311 bp, Cannabis indica
accactactagaagagctcactcacggagcacctatgttacgcatcacctccttgaagtggatggaaagttcttcaacctcgtttaggccttctgggaattgtcttctccaatccttcagccattgctcattggcctttactgcctttaaagcctccttagcagtaataaccatgatggcttctttaccctcgtctgggtccccccgtagggcatcctagaccgcatctttcacagaaagatgagccacatccatatgtggggcgataagacccacctcccagaggttctctgtggtcacaagtttctctacttgtagctccttgtatgagaaggacttgtaaaaatctatcctatcttccaactccggagtcagaggtaaatggggaaggaagtctagcaaatataaaaagtaagggatcatattacagtagacatgaggaaaaatagaactttaagatccaaaggaaaggatgagacttatttgcaagattaaaatccagactaagggtagaaactctcttcaacgggaagctggaagtgaagaaatagtagtcattgaagtcatgcgtgtatttcatggaactggtggggtagggaatactcatgctgtatcgttccaacctgtagaagcccacattctccttgtgacctctcactggttgggacttaatcttatagaagtacaaggtttattccagtgtcggcatgaattttccatgttaaacacaaaagacgtaccactcagataataagtggtacgccggtggaataagctggaaaagtgctattctggctacagcacagaactcagcaaaataacacattaagggtagatgtgccccatttcaatgtgagctctgctccagatgccgaagtctccttctgcgtacctgttgggcctcttaccgagtatggagagtctatttcagaacagtcgtagaacactttcgagtctacgtagggtttcgtacttcctcaaattattgtagttcctgaatagattgacgtgctggtctaattcccatagactgtcgcttaggaccaacttgggagcctcttggtgctccattgcttcctcctctgagtcaacctctttttgacagggaggcttaggcatagtttctgtacaaaaagaagaaaatccaagcagttagccacccaaactacctagcatagaaagggagttgggggtcctcccccataaactgcttggagaggtccccactagactaactatctaaatacgagaactctcaggaggtacttgttctagataggaagtcaggaacaatgcaagaagagagatgacagaaattaacatcaaaccgaaaactagaaggattttgggcaaaaagaaagatttgccaacacttttgccgcaaatcgatccactctagaaattttaaatgaaagtttctgagaattaggtgttttgtggtgtctaaatctacataagatggtaatcacacagaaaaaaaactctaatttcatcctagaacagagcatgaaaatgcaattcaaaatgacaagtttaaaaaacacaatccatagacaaagaagcaacgtacttgattttgataataaagttattaagctaatcgtcgttgtatcaggctggaggagttcatcgcacctttctcgaagacgagatgttagagtgaacaacgaatcaatctttgcgttgaaatccaggttgcgatttttcctaccgtataattccttatcactgggggtcgatgatgcgggaactctcatgctccaatcctcaacaacagtcgaaaatagaaatctacgacattttccaaattgaagaagaaaattttgattcgaattcagtgcgtggttctggagattgcagggagacttatgtgcttcgaaggatcgaaaatttgaaaaagaagtaaaagtggtaagtaaaagttactaggggtatttatacccaaaaaggcgattaacgtgagaagggtatagacaaccatgatcttttctccagaaacacacttttcatccaacgaatgggaagtccaaaaatatatgtgtatcctagcatttaatgcactccagaatcaaggtgtgaagcaatgataaaaatgcccttttttcagctttcgcgcgaaaaattgaacagccatcaaaatgtagtcgttcatggaaagcaactcctcgatggatgtgccttgtcatacttgcgcacctaacatgtggatgcatcgtcatcacagacagaggccagcttccgtggttgagtggcattcgaaatatcactatttcattcttcactttcacatgtccaaatcaagaaagtgatg

SEQ ID NO: 228266 - DNA, 2455 bp, Cannabis indica
gtaaaaatgtaaaaaaatattctttaaacgtaaaaatgtaaatattttacaaaaaatggtgtcttatgtaattattcctaattataaattctctactaaaattatgtaccaaacatagatttagttttatattttcattgccaagaacccaaactccattcggtgatggattggaggcttaatctttggctttgactttggatcaatggttctatatataatcttttctatgattaatgattctatcaaatttattgtaaatcatcatctattccatccttggtagtgtactttagttagggagttaacgataaattattttttaaccaaaataacattaggctttggtaatttgttgtttggaatggtaatgctccactcttttctcactgtatccatggacttaaaagaataccttttggttgaaagtaataaaaaattaaaatatataatattttttttttgaacttgaagcttcattaataaaagggaacaaagctaacaagctaatacaatgaaggtaaagaaccattatatatcaactctttatctaattctaagcctatttttgctaaattatgggcagaagtattcaagttcttactaacataagtagcttgaaggctaggactaaaggacaaagagtttctaacacttacaagcaaatcatcaaaaatactactattccaattacaattattaagtttatccactatactcttacaatcagtcttgatcacttgaacaggcagactaatcaaaataatctaagtaactgcaaggagaacaacttttgcttcaacaattgcaggagtaaccatgccggtgaaaggtttaatcaagcctgcaacaatctaattagagtcattaagcacaactgcgcttaagttgtatatcctcttttcagtgtccaaagctgcatctgtgaatacttgataccatcttggagaacaacccatcacaacagaagaatcccgagcaaattgctcatgggaagggagtctcttttgttgagcatctcaatactggagcaaaaaattactacaccaagcaaacatctcattaggagcaagaacaaatcgattgaaaaaagcattattcctttggttccatattgtccacaagaaacagagcaaaacatctgcagaacccttacctagactagaaaaaatattagtaataaaaagcataatatcaagatgtttatttagaaaataaaaatgagcaaaatttgaagctttcctggctctagtgcactctagtaatgcatgcacaatggtttcaggacaattattacacaagggacacaaatgtgaaaggataatatgtctctaaaaaagtaatgcaaccacagggatagagtttgaaacaattctccacacaaagtgtttgactttgggatgaacatttgcatgccaaattttaatccaaaaagttttggaagcttgaaatgataaagtcgagggaataactctattttcaagggctaaataatatgccgatttaacagtaaaaagaccagaattttccctccccaaaatttgctcatccttaccattgattcctaaaaaaattacatccaaaatatcattgactgtggaggaatcaaaataggtattaagcttatcaaggttctatgagccagagtgatcaataaaataggaaagtttggtttggtttggttccaagtcgtgaaggggttgcttaaatttagtggaaggaagccaatggtcattaagggttctaaaagtctccccatctcccattttccaaattaaaccagaggctaacatatccctcccccaaagaatactacgccatgagagagaaggattatgaccagcctttacatttaaaattgaagaattaggaaagtaccaagctttgagagtaagactcaacaaagaatttggcttagtaaagatgcgccaagcctgtttagcaagcatagcttggttaaaatgaatgagagatctaaaacccaaacccccaacaaatttagaacgacagagagattgccaattttttcattgtattttcttagagtctctcgaggaaccccaccaaaatctggtcatgaccccctcaatttccttataaagcttaaaagggagacaaaagcaagccattgcataagttggaatagcttgaattacagccttaaggagaatttccttactagctttagaaaaacatttagaatgccaaaattgaagcacagaggaaactctatctttaagaaaagaaaaagagtgatgtttggatctagtcagacattgcggtaagcctaaatatttactaattgttagaatattaattgtatattagttgtaaaaattagggtaacctgtatttagtagtttcctattttgtaagggaattttttagtttaatacgaaaattataaaatagttctacaaatactattagctaaaataatacacaactattgagg

SEQ ID NO: 228267 - DNA, 1588 bp, Cannabis indica
ttctctcttgtcaatttctctcatcactctctgcctattgcaatacataggcttgttaatatatagtgtacacattacataagtatggaatggaagacatgagtatgttggtgtttagttagaggtaataaaatcaaaaagaataaacatgaatgacttaagagtaggtagcagggctcatgtccaatgctcccacccaaacacaaaaaatcttagcaaaaagattttaaatttatttttaaaataatatcatatatatttttaattttaattattgtttatttttaaagacactacatttaatcttttccaattatgttttcaaaaaattatattttaaatttttaccactatatatataaataaaaaaattatattaaaaagtaaaaattatattatttatgaaaaaaaatttgtctttacttttctatggaatttttaaataaagtagtttgtatatgggttttatattttgttttcctttttatgagttttatgaaagtcatatttttgttatttttagcccaatcctcatattttaatttttttaagctacagctactgtagcgaactttttgcatggagctaatttagtactcattgcttaccgtcattgcatatgcttcaatcaatcacacattttgtcaatctctcttcattttcctttcattttctctcagcttaggatttccttattttcttcttcttcttcttcttcttcttcttcttcttcttcttcttcttcttcttcagtgtgctgggttgccattaacgatcgaagcaagtttcgactcctgttgcgtgtgtgtggtttcttcgtttgatatcatttttgagctagattgcttggttaactgaggtatttgttcatttttttcatagtttttgttgtaatttctttagtttagtgattagattttttttaatttgatgtttgttgttttttttatttttcgtaatgtttttgccatgatgggttcggattttaggttgtttttggtgttttggtgtgtgttctttctaatttttacaaaatttattccctgtggttgatcactgttttatttagtttatttttttttaagtttgtgtttgtgttaattttttttagttttgcagttaatgattgttaaatcttcatgatttttctagggttttttttttacttttttgtttgtgttcaatcggtttgtaagtatttgtgtttggtttagtttgttctttgttttgatcttcatgaattgcatacatttcagattttattaatgatttttaaatgaaaccggttttttttttgtataatagattttcttaatagtataatagtatttgttctctttaattttttttatgatttttgtattttaattcttttgcttttttgtttttgaattggttttttttaatcattttttatttgtttgtgtttttagtgggtgtggtaactgtttttgccacattgtggcagtttttttgttttttgttgtgtgtttgtgatgtgggttggctgttacattttcattggtcatacatgtttattgttagtcttttatgtgcacttattcacttgtttatctttctctgtata

SEQ ID NO: 228268 - DNA, 4062 bp, Cannabis indica
tgctctgcagtcggcaccactgagaaattcgttattcatacttaattatattaataattatgagattttgtgtaattgttaagtactactaatttccctaaagatttttctttaccaaaatgttttctttgctataattatctttttttttcgattaaaatctctagtactatattatcaactccaactatagaagttttttttaatgttgaattcaattaacactaaaatgatagaattttagtaggatttttttaatttatacttcaaaatatagtatttttttgtatttttacggaattctacacagatgtctttatagcaactaacggaacaacttaaatcgcaactaaaatctgtatagcaacccaaataaaaattaaaaaaaaaaattaaaaatagtatatgagataattccttattttagtaatgcatatacatattttctattttcattcaattacaatattaaaagcaacactaaaaatatatgcttcgctattataccattgtttttaacaaaaaagtttatagttctaataattattgttgggacaagttataacttggcaccaagggtttttttttttaaataacacaataaggttacttatatagttaagttcgatgaatagatggagttatacaatcaatcgcaagtgaatcaaaaaaattaataacatgaacatgagttcaaaattacttacaatttaagtttatctcctattgatcatcattatgatataaattagatctttatattaaacggtaagtttgattaagacaactttattcgtatcggtcctagtcatatataatctctattatatacatcaccttcacttaaatgtcatgctacatcaataatttgaatcgagattacttgacatcgaataacgggcatcaatgaactgcacttaataactattaattaaagatttctaaattttaatatgttgttgactgtttttttcatagctaagtgatcttaattctccgtacaactacaagtcacagtctcatttatgaataaggaattttttgatatatataaattatttaatattaaatattaataatttaacattcatacatatatatcaaaatattcaactcttattaataatcacaaatgtcttaacaggcttttcaggatataaaccctaacatagccttccgagcatcaagttgtacggagacttcacatccacctctacgaacatggtcatgatggcggtatgctttagggcagtgccgactgtgaatggtagtttgatattaattactacttggagctatcctagctcaagtgaaaccatacattagctgctcacatggctctagatcttttagtgacaaacccatctagattagggtttgcttgaataagatatgtttgaggacactccgtcattgatcatcacccttgccaccatcatgttggctatttgtacctcaacaaccaagggatcattgtgagggtagctaacatgatacgagttggatttttcaaatgtaatgggagcacactcatagcattgagactttggaggacgctctacaacctccagtaattcgactctcggttcatatcgcaaagaccttgcatattttttaggcctttcttaaattcccagctaggtgagggcctccaatcacaatctcaagcttgcctgcaactagggcaggttggagaggtgcattgtcctcagttggagctttaggtcgtacataccgctaaagagcagcgtatttctgtctgatgaggaactctatctcgtctcgcaactgattacactcatttgtatcatgaacgtcattgttgtgatagcgatagaatttgttcatgtctcattttccaaactctttgaaaggaagaggtttgcaatacgacactgctgaccgtgtggccgtatagatctactctcttgcgaccaagaggatggagtaggtggtgaaacgaggcttatactctcgcaaggacttgccccccgttttggatttctttccaccaggggagttcccttatttttctactgttgttagctctttttcctccgttcaaacctcctttcttcccattaccttgcgcttcaatgtcaggggatggggagcctagtgacttcttcttgttgccttttgagccattggctcaggttgacagcttcttctagcttgataaagccatttactctatcaaaaaatttgttcattctgtagactacattgagacgaaagtcaaaccacaaaggactcatcgcctttagtccagctgtaagcgccattacccttacatccttgctaagtatttttgtcttggcagctgcctctaaaaattattgaatatattccttgaggagctcatcttcctattgcttgacatctagcaaatcattcggctcgatttagtgctttcgagaatgaacaatctgattgccaaaagcatccataagatctttccatgagtcgatcgatccaaggggaagtttgaggtaccaccgttgatccaagcttgttagtgtggcaagaaagattctgcacctgacatcatctcttactccttacagatcaatctgaacttcgaagtaagggatgtgtgatagcggatcttccttcctggtgtgccagaaagggttcttgaattttggagggattggtagagtcttaattcagttagagaatggtgatcgtcgttctcaaacaactttgaggttgtgatccctttcactaaggctgctaggttgtcaaactctgccatgttgacaccatggatggtggtttgcatctcagttggagcctctgttacccgattggggtctaatctaaaagctcccacttccaccaactgtcttttggttagagtgttgtgcaggttttttgctcttccaagtcaattatggactctggtagactttggtcttgtcgttatctcttaaccacggggttgtgaaggcaacactagtgatgtttctgaaatgaacatcggatcatcttgggatgatgcactggggagcgttcatctggagtgttgtagtggttacttccctcaaagtagtcttcagctggatcacagtgtagagagaatttaactggtcactcaaattcaactcttgaccatgtactcgagggaagtactcatactgctaaccatcggggccacaggcaaagtaacaacacaactcatcaatttcatctcagaagtgtattctgtaaatcccaagatggggcttctgtgttctttgtttatctccctggtcttatcagttagtagttattattcataactcgcttttgtctttaagaaagtgagtttgaatattcctaccaattgtgcttcctgaggcgatttgtctgaacatatttattattgcacaattcggactggttaacattccagcttcattacacgtgtcagcaacatattgctacttaaaatatgggtataatatcaagtatttttgagtatgaagcggcttgttagtccttactcgtcggatgtcacagccttaagtttcaaagtaaagtcttcaatttcctccttcatttgagcagcatgtccctttccctttgtagagtctcggggtctggtatcatgaaagcgatgaggggagtttggtggaggagtcctgttagctctcttggtattgtccagtcgctatacattaagtggagggcccattggttggcatccatgagtttgagtcctttcagactcttgctcgaagtttgcttccccctggggagcctcagcacctgttgtttgcttagtactttcacggttaccaagcatggtagtagtgttccgtgcattaagggtttccccttgattactaattcccacgtggctagttgcccaacgaggaatctcttttaccaactcggaaagacccctgcaggagggtagtctcactactagagtgatagacttctctaatccgttgagataggttagctctctattgctccaactcaacttgttggctctagatgtttcaccaattttccacgaaccaactttaaaactgcttgtgttgtttgtcgcaaagtctcgtacttattgtt

SEQ ID NO: 228269 - DNA, 1306 bp, Cannabis indica
gtttatgatcatgctcttcggccattacttccactaaatggtcgtcgtcaaactctgccaagtcctcaaacttattttagaggtgctccatcattcatttcattctctcagtgagcttcctctgttatgctaacttcgtatgagtagcttctagttccttggttacttgcagcaactttgggttatggtcatagtagtaaccatctttataatacccatctttcatgtagccatcaccatcgtcctcctcttccttgtctttatggttctggtcatcattgatgccgtcaaacacattctcgacatcctctctttggttctcagcattggttgtatgttctcctcttacactccctagctagagaccagaggcgagggagtttgcctcctccttaataatgtccagtggagttttcttgcttatgttgttttgtgtattcaccatggttgaggtggtgcgacgactagcaaactttccttaactctcaatgaaagcaccaaaatatttactgagactttcagaaaccaataatttagagcttaagaaagatataaaataataaataatagacaagtaatttttatgtggttccggcttaattatccctagtccatgagtctgttacattagctttacaggcgagtatttgaatattacaactgtttaaaatataaaccctagctctatattcctgttgttctcttgaagaagaataaagctagtaggaattttagcagaggtttggtaagtatgaaattgttcaccctttgtacatgaaaagttaagggatttataggcacacatgtgggtaatggcatacccgttacccacctagaatttcttactcaacatgccacatgggctgatactacaacatgatgatttgatcgttggttggtaggaagttttcccatcatgtggtgtacgactgctataaggcatttcataggaatgaggacacgtgttgctcaaaggtttcacctttaaaagttgttgcctagacaagtcgttggacaaaaagggggcttcagaggcacatacgtgcactaccatggtctgacgcaagggacaagatctgatttgatgtcagaagatatgtaaccgtcgccttgagctcttggtaggatacaaccaaataggttccaagaccatcaggtcacattttcccggatcacactaatttgctaccctcttggaatactcgtagcttctgtggactctaaaccctcttaatagctgatgaatagtgggagtcctagagtccttttcgtcctcgctgattgggagaaccttcggctaactcct

SEQ ID NO: 228270 - DNA, 2377 bp, Cannabis indica
ttgttggatgagttagctccagttgactccatagaagctctggtaccatgtgagaatagtagagagatgaaacagagtaaatacagaggagaaatgatagaatggctcaactcaacatgaggagcagctactgatatttatagtgaatccaatattaggaaagtagttacacacgctggcaaaagctcaacacaagatcaagaatgtaaaatagttacaacagaaaacgaaaataactaacataactgtttatgtaacaaacttatcctaatacaacatattggaactcacctatgctccatttcagtttaatatagctagaagaattctgtaacagagcagcctctcctttttttgaacatgtctctattgcatctctcaaattaattgccttgttggatttattcttcagctcttggaaaacaaaatgcttgagatgattatccactgttttccagtaagaaagtttgcataacatcattttatttgtctttaaaattccatgcttgtcaacataactagccaagtctcgaggtgccatgttaggtgccagacaatgactaattatgtccttttgagaaactgaccctaaccatcttcttcttcttaatatagcttctagaacatgcctaatgatttgattttctttgattgcctaattaatagcttcaggttaagtttaaggttttttttatttttaattaatatataaaatgtaataaaaaataaaaaaaaaatatatagtatattaaatatgcgggttggcgggcggcttcgggtacaacccgaaaaacttaacccgcgaacccgcccgaatctttttttaaaaaataaaaagttgctgattgaccgggtcgggttcgggcaagttgcccgggttcggatcgaacctgctcaaaatgtttagtcctaattgccgcacaagactttgcgatccaccactctcgctctctgctcctccaaccattcgaagaaccactgcgagttacaaaagccactgccagttgacgattgagatttatctctggtcaagtcgtgtctcactctgttttcttcgtatggttggtgtcgatgaatggtttggaacaacatcgaatcattgctcacaagctcacgacccttttcttctttaatttttatacagataagatttttgtttaaaatattaaaaagcattacttctaattatatattattctcttagataattaagttaatttgggagtttttggagtatattatagcatgtatgaattttcataataaaagataagacattcttgctaaaattttgcttttaattttgaatggttgcgacatagatttcaatcgaatgcttgctgagaataatgatatttatttgaatttgtgttgatttttttttttttttgaaatagatgggcattttactaatttgactagctgaaagttttaaactaatatgaggatggttaggcttaagagtgtttgatcttccggacaacaagcttattttgatatatagtcgcgataatctttgtaattataaaattttataaattggttgtaattttaaaacgagatcacttattatgtagattattatatacatttaagattaaagcttaattgtaaaatttttaattattcacgtttttcaataaatctgtttattagaaatagagtgcacagtaaatcaaaatcacgataacgtgcttaatatagtagggcgccgttacaatacaaacctttttaaggctaatagactgactcgtagagtaaggctccttaacgtctgaaccacataaaatctccatctcctttattagggtgtttaattatttctcaagctcttattatattagtttccaaaattcttggtaaacaactgtgtttaaagtttcaaaattataaaaatactgtaaaaaaattaaccctagaaccacatgaaaacaactaaaacaacaaaaatataactacaaagcaacaaaaaaaataaaaataaaactttgacctaattgcaataagtaaaataatataaactccttaatatatttttgtttacaattttttttacttagttttgacaacttgatttatctttgggtactattatatttgtttttcatggaatttattgttacaaatttattctttcaatatttgtttcatttttctttttgagttggtgatagttaaaagacaactataagttgaaaaataactaaaaaataacaaaataaatgcacacatatacaagaaaaatattatctaaaagggatattggcggctaaaccacctgaactttacggtttgtaacacttaactacaaaaattgaatttttggcagctaaactacctaaacccttgttccgttttgctctgcacacctccgtcc

SEQ ID NO: 228271 - DNA, 1303 bp, Cannabis indica
accacatcctatcttcttgtttgtttttctttggtaacacacaagaaattcttgttttgatttgccatttaagctcctgaatttgtagagttttcaggttcggctgccataagacttcatttcgttacagccaaataaagtacaccaaaccagcaatgacagccgagaggacatgctgctggaacttgcttcttttggacttgctaatgcttcggatcaaagcagtcaggtcagatgcaggggccttccaaccgatccattctttcacttgttggagcatgctgcctgttctgcttcattgaaagaaaagatggtctttactctctctttgattgctgcaaaagcaacaatcatctacctctgttatatgcattctttttagtctttctcttgtcttaagtttgtccaacacagccatccaaagaataaaagtatgcttaggatggttgagtctagaccaaacttgattacaccagtgaattcagtcttgaggttgctgaagcttcttctatccctttgaaattttatactccaaagcatgaacctgacttgaatccaatttcttctcatctcatcttttatttccacaagcttcctccaataccaactactatacatggaagccttgtggttccaacaatctccattcttcaaatagacactatggatccatttgacccataaattatctttctttacagctagtgtccatatattcttcatcaaggctgctgacatttaaaaatcccattccaccttcagctttagaaagacaaattttctcccaagctacagctccagctccaatcatagtattggagcctttccatagaaagctcctacaaattctttcaatctcagcaactaccctctttggcaatactagaatctgactccagtatgtgtgtacagtgagtaatactgagttgatgagaacagccctacctgcaaaagaaatatgtctagagctccaggttttgatgcgagttgtcattttgtcaactagggtattccactcattctgtgagattctctttgagcagattggtatccccaggtttttaaaaggaattgagcttcgagtaaatcctgaaatctgtgtcgctttttggatctctggttgagacattcctgcacagtaaatagcagatttgctattatttggccagagacttgaagatcttgaaaagagtttcaatccttgaagcaacaatctaatactttgcagatctcctttgcaaaaaaggaggacgttgtaaagcccgcttagttaatttggaaattagcagttatttatgttaat

SEQ ID NO: 228272 - DNA, 698 bp, Cannabis indica
tatataaaaagatatatatatacctaatattatgcattctttttttgatttcctttctttttaaacgtttttaatttcgttataatatccgattgtacaatttctttttattttatggcttcttatcaaagaatgaaaagccagatgaattaattctttatgttttttgagacttgaattacaaatctttattaatgaacaagaaattagacagggctatactcctgaatacctttttaagcctttagacaaatattttttaatgtgtatgaaataacgaaagaaatcctagtttaataagaatgaatctcataatagcagagatgacactaaccacaatttaccaaaactaattatcaaataataagtaatgaagtgtttaggtaatgttatagtgagatttttctcacctagaaattcgagaccggactcctattaaaaagacacgtgtactcactttcctcaagaagagctgagatgttgatgagagacctctcgtacgaaccttgccggacacaaattcagcgagatgatgcgaatatgactgagtctaatcgcattcgaatggctcgcggtataagaatatttctatctaaggaaataaattcctatttaaggaaataaaataaataattgattttctgataaatgaatattttataatcattgaatctggacaaaatcaattatgtaatatt

SEQ ID NO: 228273 - DNA, 850 bp, Cannabis indica
aaaataaatgctagttattagacttttttttttggacatatatagacgtgatttttaaatctttgggattgggaaaaaaatgattcctaccaaatatatctaaaatttatagaaaccattttctctataaattctcaaaagttaataaatatctcaaccaccatttgcatttagattaatttgttaccactacacatgcaatatttttgttgttggttactttaaatattgaggccatcgactaaccaaaaaagttcatttaaccttaccaatatacattgcccttaaaaaacaagacttttatacattcattaattaacatacatttgaataccattcaaaaaaatatacatttgaataatattttttattaaaataattagaataatttaatataattttccacatattttagtttaataattacaatattaaatcttcaatcactcataaatattataatttaattaaaactgtagaatcattttttaatatgtgtgtttcattttatgtctaaatttaatgttattttttatttattttttatatataattatttgtcaaaaatattattatttttctgatcatttctctttttttagaagttcttaaaagtttctgacccaaaactataattaaactaagaataagatgtacaaaagttttttttacagacttcaccattagagaacttctgagtctcaatctatatttttcttttaacgggaaatattttagtctttagtttttattacacttttgggtcctttgagaagcaacttttaagaatttttaaaatgagaggagagaagaatgatagtatttttataaataattataaaaaaaataa

SEQ ID NO: 228274 - DNA, 1458 bp, Cannabis indica
gtctcaaggccaccttgaagagtcttctcaaaaaccatcctttgtgtgaaaaccatggcaatagtaacgccgtaggctttacgtctttctttaactctcaatgaaagtactaaaatatctatcgagatttttcgaaactaaatatttgataactaaagatataacaaaatgcataaataaagtgatggagattttttttacgtggtttgggtgttaattaaccttagtccgcgactcaatttattagcctcttacgacgtttttgatgtgtttataatatttttgtaggaaaccctaactctatactttaagtttatttggaagaagatgaagacaaagtaatatttgcagagtttcaactatgtaggttgtgatcccccctccgtatggaaataggaggatatttataggctaaatgctaggtatggatatgcccatgacctgcctaggatttctgctaaaagcccatcaatagggtaaaatacatgcaaaatcagagctaactattaggtcccttagaatctattgtgcccatgtgtgctccatgtggataatgggggaccatttgtacgaagtggacacgtgtcctctaaaagtttaaactttaaaagtagagtctacgtgtcgccctaagcttttacctttacaagcagaggtctgtaatatctgtttgctaaaaaggtggtggtttgtgcactaccatgcttgaactatgggaaaagatttgatctcatgtcagaaaaagtataaccgtcacttggtgacttggcttgtattaaaggtagatgtctgcgacactccaaggcagttgacattcgcattaggcccctcgagtacccgtccaagtatcaactaggcatgctttcatgttacaacccctcagggttcgggaaaggcaacacacctttcgcgttcaggaggctaaggcagggccaagtgaactaccgtatattctttggtcttgacttatttcccgttccatgaggcttcgctgtgataggatcataatgggagtgtttcattagggaaattatgagactaattccttcctctaaatgccacgtgtcacatgcctaggaattctgataacaaaaataatttatgaataatttaataattaaataacatgtgggccaataaaatattgccacatgtctcttagttggcacttaatggacctaagtgacatttagcagcaaaaaaggagttgggtgcaacaaaatcataatgaaagggggtttcgccgccaacattttttgattgacgtaatatgtgtaataataataaatattaaaggagtttggttgcaaatatacatatatttattatgtaattttgtgggggtaatttttgtatgttgcattgtaagttttgcttgttgtatgtgatttggctacacaaatggttaccatttatcaatcaatgatgctttgattaagggatttttataaaaatact

SEQ ID NO: 228275 - DNA, 1721 bp, Cannabis indica
ataggtccatggtccccgaatttccaccttgaaatactgtcaagggtagggacaaaaagttgtattaagatgtttgaagaaaatctattttgaattgggaaaatagaaatatttatttttgtgataaataaataattttttcatattaattaaataggaaaaaagacaaaaattgctaagacaaaatttgttgagacaagatttgttaggacaaaagttgttaggacaaaaggcaccatccttgtcctaaagataaatggcaagcacctagcttgttcatgtccctataaaatttttatttttgtgttaattaattatttaattaattaaatttgtaaaaatctaatttaaaaagtaattatagatattttaaatttgttaagatattctctcaagttgttgagagattctctcatgaatatcagtaactgaattcggttatagataattatttatttaaacaattaaataatgatttaattaaagagatttcacttgtataaataggaaccagatttgagaaatcagaataattttttttacactaaaatttcaaattccatagagagaaaaagaaaactatttattctctctattgtttttgctcatgtattgagaactcaactagtacaaggttatacactttatcttaatagcccacactattccttatgtgtggtggatcgatttaaaagacactggtgtgagtctgaattgtatattcttcatcaactaaattaagagatacaacatacaagaagtatcgaggataccgtgaagaggtatactctaaacttattgtttttattattttgatttaatgtacacaaatatggagatcctaggggctatggtacaataataattaggtaatacgaaattcttccactacgtacctaatttagtaccataaaatgaacatatcttttgtcacatttagcacatgacaaatttccttcggattgatccgagtcacatctccgtggcaccatgcgaagacatctggtgactccttgatggtgtttatgattccttctctgactttgggatcaaggctctttccgacacagatgaatttaaatggatcctggtcaacaaatttggatttcttatatgtttcttctaaaggcttcaatgtctttattgtctccactcgagggtctaactcattttcctcacattattgatccccattcctttcttggttgactactaggacaaattgcttagtgaccacattgcagcaccccctagcctttttttggtctcctcgacaatttccaccctcgtagattgagttgggaatttgaggcataggtgcccgatcaaaattatgattctaaaatttactaatgctgaccatcctaaaatggtattataagctgttgggtaatccacaataacaaaagtatagtacttaaaagtactttggggagtgctaggatataaaatgtgacgggaacttgaactttttctatagggatgagaaaaaagtttaaaaccatcaagtattaaactatttctattataaataatataaaatatccctatcaatatcattttttagtgataggaaaagcttttaatgagatcaataggataggtagctttgctcttattcgttttacaatatgttatatttcttttatatacataccaattttttttggaattacttaatttttttttctttatacagtagaatctctatttaagaatac

SEQ ID NO: 228276 - DNA, 2160 bp, Cannabis indica
gtgctgtagtagcaacaccagcaaacgacacggactgagacttagttgactgtaaacaaggatgatgaggtttcggtaggagcgaagtgttgagacgatacaacccatctctaagaactccttgcagaaccaccttccctgtcacccgatccttcacacaacaaacagagggaaagaattcaattgatacattgttatcagctgttagttgagaaacacttattaagttctttgaaatactaggtacatgaagaagatctttaagaattaaaggagtttgggagttggttttcaagtgaccaacaccaacatgagagataggtaattgattaccattaccaacagtgatcttctccttaccaccatacacggatttgttgctcatttgaccatcttcagtagtgagatggttgctcgctccgctatcggcataccaactatcgtcattgagaatctgaggtgtagccacaagagcattgaactgtttctcctggttttgttctccagatggttgctgtcccataaagttttcatcgtaacggttgtagcaaaccgctgccgagtgaccgtacttgccacaaacttggcaagtgggtttcggacctccagacctgcctcctctacccctaccacggcttccagtccttcctcgagagcctgagttggggtttgcacctcgaccttgctgagagtaatgatttgggtagcgagaacctcctggaccagttggtttgtgagcaagattagcagatggagaccctgaatttttgtgactgggaggagcggcagtgagtctttcaagtcggttgtcgaagctgcgcaaaatactttgttgttcttgccatgaagtttcagatctgacttccattacagagataatagatagatattctattttgagacccgatagaacattagagacaagatgcctctcgggataaggttcgcctgcaagggcaagcgaatcagcccatattcgcttttgtttcaggtaacgtcatcgatgtcgagcccttccttgttgtctggagtttggttcgaagatcatctgtgtgggctcttgagaacgcaccgaagaggttttcgaatgctgaccataaagcaaacgccaattgacaacccatgacttccgatgcgattccttccgtcatcgacccgtatagccatcccattaccaactggtcatgaacaagccagttttcaaagtcagggttagtggtcaccttatattcaggggttttagggatacctgagattatgaactcttttgggggagttctttggccattgatgaatccttctagacgatgaccccgaattatggtaaataccatggtcttccatagagggaagttgtgtctatcgagcttcatagtaaatggttgaatgagtgtgctaccgaagggagtagtcaccggtagtgggctcatcgcagcagtctgaaccgaagcagctgcttgagttggcgatctcgactggtgggatgcctccgacgtaggtgtccctgagccttcgacttgttgaggagcagaggtaggatcggccatggcagacgccaaagatttatgctctggtaccaagtgaagtttaagaatagggatgaattgaatatctctgctcaagaatgagaggcagagtaaatttcattatatagccaccggggcaaaagaggagaatacaattgagctaatcactggcagacacgtatacaagtttgttacacaaaatgattgacacaatcttaacagaatttgatgaggacagctgcaagggaatattccaatggacagaaatccacaaggcttggaaatgagaatattgcagaacagtccctgcatattatcctatattcttaacttaaccgatcgatccaatcacaacctgccaccaaacattagatatccaattatgattggatcagattggatgttatttttaaatatccaatcagatcagatcgaatattggatggagtgtccaaaaatctaatacatccaacatctaatcaaattacttattattttcagttagtttagatgaataatcaaaatctatgttgtcatacttaaaatatatatatgtatggaacacttcttaatgggtaatacccattgatggacactaaaaaattaataatttaacaatctaataaccttttat

SEQ ID NO: 228277 - DNA, 1020 bp, Cannabis indica
taatcattcattcaagtggtgtgttggtgccaagtaaccacttcttgaagtagagacagattgtcaagttatggtgaataagatacatagtcactgtagagatatgtccatgttatctgatttcttaatcccaatttgtaactctttgtcttatctccctaatggtcttcttctctgttatcatctcggttttgttgatgtggaaacggactgccaatgggttagcctggctctctttgttgaattatatattgtctctttgtaatagtgtccatgcctttaagttttttcactgtaaacgcactgagaatattagagctgccattagattgtttacttgaaataacaagaagtgtgtacttgaaaaaagttttatgaagtaggcaaatagcacaagttgcctaaataacaccacctgaagtcatatacttgggagaccatcaacaccaacagtcaaagacataattaaatattcacaatattaagaatgtggaagtgtggttaggaaagtaggagagggtaaggtgtatagtaaaataaatgtagtttaatcttaaaattaagggcaatgagtgtagtatcctatatgtaatttatataaggtaaatttttatatatatacattatatacattaatattacagaaaaaacattatataaaaacaatccatgagtatgccgtgacacgtcatcaagcataccgtgattagctttgataattttggaaccaccagcgatgtaggagacgcgcccacaattccatatttctcggccatctctgcgcttggttctactgattaaaacagaaagctataaataccataggaataatacacgaaatcgaaaaacagaaaccaatccaaacttgaacgaaaaaacaccattgacggaaaatagagacctcgacgaatttgaaaattagagaatcgatcattatatctctcaaaactgttgctgtatacaacaagcaaatcatcatctctctaattcgacctacaattcaatcgatcaataaaccta

SEQ ID NO: 228278 - DNA, 1353 bp, Cannabis indica
ttgtaaagggctccgatagcataagggacaattagtctgtggtgttgtgagtggacatggcggtacaaaaacttgttgtaatgcatataacggtgcacgaaatactgccatgtgtccatgacaaacattgcaacaataatctgcactatctgaactgcgagggagggttgaatggttactcccgatgcatttgccttggacgtgacctaattcaacgatgtttttgaagtaaaggattagtttaagctcaagcagatccatctaaatatcatccagcatagaacatataatctcacaatacttgataaatttaaggttcaaccaataaatcagacatgaagattgcaaaccttctaagcctaactataaattgtctaaaagggtcaaataattaaagatcatttcactttcaaagcaacaaaagattacaatatttccctcttaatcattacaatctacaatctttaaaagcctagaacagcattgtcatttaatggaatagactagatattgaccaggatattcttcagaaattcaatatgtttttagtgtttttatctttataacaggttataagaaggttttgtcatggtgaacaagagttatgagagtttaagtagagccttcctagggtggttgcctatggatagtaatgaaaacattaaatccaatttctgatcaaagccagctaacaacctcactcaggcacaaacataaatttcagtcatgttcacattcctggcaatggcattgtttataaagcctaaaaatattcaagaaaaagcataaacgaaatgtgaaacttttagtcataaagataatggtgatgatgacaataatgatgttaaaacatgagcaaatgaaaaattgcaaagagaattccacaaatcaaatgtctcttcatattggaaaatctttgactttcactaagttaagcccatgcaacaaccagcttgcacagctccaaatgtaaacttggataatcaacttgatacttgttcaacaaaacaattaaacaaagaatctaatttgttcgttacatgattctgattaactttcgaaacaccagattgttccacagaaaatccaaattgctacattcaaaatctattatagtttccctcctaccatatcacattatacaaggtacataaaatcctaaaggaataatacaaagatttagatgtaatctaccagaaccagatacacagctcgcggtacgagtcctagtctaaacgtgcagatgaataatatggtatggaattcaagtggttcctcaactaacaccaccaccttctacaagctgagaaaagagcttctaaaggatctattatcatatcaaccttagagagg

SEQ ID NO: 228279 - DNA, 2309 bp, Cannabis indica
cataaaacgcccatggaccaccgcaacgagctcgtgatgaaaccgccactgctcttattattacatgaatcttgattatgatgattgtgattttgtttgtgtttggggaataggaagtgtaggaagtgcactatttaaattattacatctgtttttgtaattaatttgaatattacgtatataattaaaaaatccccaaaaaaataagccaatatatatggttaggagattaatattcatataatcctaagaagttcttgataagctatatcattgaagagtcaaattaaggagtttattatcatctccaatctaaaattttattttaaaaattgttgttaaacttcgttttaaacttgcaattactaatacaacttgttcaaaatagaggtttcaattagatttatttatcatgacaaaaaattagattgatttatttaatacatgactaaataaatattttgactattactaagtatggcccattttgtaataaaaactaaaaaaaaaacaataaattaataatagaaaaaaagaatgatagtactattaacatttgaaaaatgaaataaaaatacttaccaagaaaataacacgtaatgttaattatcatcactcttcttcttatctttatcttctcagtcattcttaattaatcaacgaatacaatattaattataatacctcttcaaacttgactaatatgaatgattaaaaagaaaaactttacagccaaaaaaaacagatgattaatattgccactaaggaaatatcctaatatttctaaaaaatgccagtttttatttgctgtaaagaaaaaatcacaaagagaaacaaagttgtcaaaaacttatatgtaaggttctcgtgtgttacaatttgttttattaccaaaaacaggtaattaatattgtcctcattaagaacataaatatatttatatattataaaataaaaatacgttacatgtcacacttgaatattctatttatatataagagtagtactggtgatatattgtaataaacaattaagtaattttttcaaaaaaaagaatggatagtgaagagagtaatagagaagtactgttactagtgaagaaggaagaagaagaagaagaaataggggtactacgatgaaagtgcccgggttgcattgttgataacatgaagaaatcaaattctaccattcctttcaagcatttgttctttgtttttcttctagccctagctgcaggttaatctctcactctctatctcttccattttaacattttttttcctttttgccaaatatattacactatatatacaagaaagttacttcgacggtgatatgaaaacaataattcttgaatttcgagcatatgcgacttaatttagtagagattaatttgtatggatggcatttacatttgtttttttggatcgaacttcatgctttttgacatagtacttgtttggtttatattattttttttttctcaaaaccagtcaagtgatgttatttagtgttgttgagcttttagggttttttttgtgttttcaatagtgagaatgtaaaagagttgattggttttttgagattttaaaagtaacttttagattttgaaacttcaaaaatactcttgaaataagttcgatttccatatgcattttggcatgtaactctaaaatggaggcaaattacaactccaaaataaagaatgatactctatattaatgcttgatttaagatcgttgctattgggaaccaatggtgcctagcactttctagacgtgtcaccttgcgattgattaacaatattctataaaagttagtatattaaactatatgagatccgatacttaattgcatagacaaaaataagaaatattgtttcaccttagtatgactaggcagtctcaagctaattaagggttttgtgcaaaaaaaaattgattggatttttttatatgaaaaaatttatgttttttttttgtatatatagtggtaaaattttaaaatacaatatcttgaaaatataattaggtttttatttttataaaatatcaaatgtaatattttaaataataaattatgtatttttttagaaaataattatatttttcaataaataatggtaaaaatacaaaatatggtatttgaaaaaaaaaataaggcatatttattaaagaatgttttgggcctggttgggggccttaggcgtgggccgtactcttgacccgatcctgagtatgatataatatgggaaacttacaaaaatactgaaatttcggttaacttttacaaaaatactatcacacgga

SEQ ID NO: 228280 - DNA, 1251 bp, Cannabis indica
ccatctgggtttgcgctttaggcgtccctaccaggttgatgattgatgaaggagcggtcctcttggtaaactgtataggcacttgtttgcatgcttgtaaagtcaataaggatggaattttgatacatgaattgcgattcatgttcatattagacttggtgttcctattatggcaggggcctctctccttgatgaaggcagtaaaaaggtctggtgctattttaagtttgaacgtcttcctcttgtttgtttcaaatgtggttgtttaggacatgaggaaaaatcttgtacaggtcagaagagaatgattagtcttgatgatgggcgcccaattccgtttgtatgggccttggctttgctgggggtctcggattaaattatttttcgattcttgaagcaaaagatattgaagctcaacgtcgtatagagcaagagaattgacctgggatggtttctaatgttcctttgatgatggaacctgctcttttaggtacccccattatgaatgaagccattgtagaagaggttaagcgtcgtcgacttcaggttattagcgaagggaacagaaaaggagtggagttaatggaacatcaagatactgtccctcggacgggggtggtgagcttagttgtcttggtgggggaccacactttttctctggggcccaatactaagacttctgtgttaggccgatcccctactcttggacctgaccagttgtttaatgtggatggctttaatgggtttggttctaaacctccttctagtggccctaagaagagaggaaggcccaagagtaaatcccaaaaagaagttaggccaaagggggtctctactattcctatttttgggcattagaagtcaggcccttctccgttggtgggtaataaacgaaaaatgtatactacccaaaaggaaacatgacaactatattacatgcagttactgttcccattatactatccaaaaaaattaatttactgatttttattcgtgattttctaaaaattccataaaacactaaaaatatatgaacaaaaaccagcagtatatgtgaagcaatcaaataacaacaactcttaagaacataattaaatcaaacacactaaacaatatcagattttatacatataccaaattttttaagcaagtaagagttgaaggtcagatctctccttaacagttaatcttcttttgtcggctttcatggagatttatcttcgtgggtcgttgttgccatggctgaatatt

SEQ ID NO: 228281 - DNA, 855 bp, Cannabis indica
cattacaatgttctaataataaattaacatttattgagctaataatttttagtcattatttataaacgaaaataagctctaagatatttgtatattgagttaaagttaattttactttaattgcatgtattatatcagaaatttattgatgttggacaagaatatataataataattaattttattcaatttaagagggaagaactaaaataaattaaagatttttatatacatctatactctataaatttactaatacacattatcaatttagaatataaagggtgtgattagcagctttcttacaattatagtttatactatttggaattttgaattattataatttttatgaaaatattaatgttggctaattatggtctaatattatttataatactgaatgatcataaaaaataaaattttcagcaatgtggtaattaagactatatcatcaatattacaaggtggtctatatacttgaatatagactagttccatatcaagttcaaatatatgttgttttagttacacatggattttcatatatttgactaagcttttctgagcttcaaaattttttttaactatgtttgactaagtttaggtagtgatctcatatagcaaagttttggtcttttaggataaaggaaaaactatcattattgttttttcttaagcaagtggaaatttattgactcaaacttgattgtatattgtagaaatacatagaaaaagttagtaaatatttatttcctagacatatggagcttttatattctgatctgatttgttggtaaattaaatatagtaagctatacttagagatattgttaatatgatataccatattat

SEQ ID NO: 228282 - DNA, 781 bp, Cannabis indica
aagtgtaattatgattacgtgtttgaattttttattctttccagttcaacacgtgtcttcctctgatgtgctcaccgaatttcgggtataacaacaacaacaaactaactataacaaaaggagctatactcaagctagcaagctgaaagaatcatctatactaactttctcttttttaaagagagaaagtctaaaacaaatttctcttttgattttatataaaagaaaatttacagtataaacttgaacattctacaaactattgtttctaacttcccaaatattgtagaccaaagtagtaatgatagccacccaaacttttctttttctcttaggttggttgcatcttttaacccataaggtcacaatgatggacattcataccagcccaatgaaagatatccaattgaacttgtttgctgtatttgcaattaaagaacaagtgattatgagtctctaaatcaaaatcacaaaataagcaatttacctcatcaatgtatccaaatcggtgcaagcgatctcttgtttaattaaagtctattccaacaaacaagccaagtaataaatttgtgctttggataacttggtctacttcaaatgaaggaaaaccatttcctctcatttttatctctcggccacagtctagagcaagtctttgcaatgctgaaattcgaatcagcaaactctctttcatccatcttgctcctattgaaattcttagtcttcacaatttttctccaataccagctagaggtatttgaagcttcatagctccaccaat

SEQ ID NO: 228283 - DNA, 1421 bp, Cannabis indica
aatttggatcaagtccttgctcaatgtgttgatgttcccattaactatgtccaaaattttggaaatggcgaggaggcggccagagccatgcccccaccttcgccatgaggtgcctagcgtggaattgtcgcggtcttcgaagaccggcggcagagagagccattaagaggctttctcggggtgaagggttcgatgtgatttaccttatggaaactaaggtggatgaggaatcgatgtatgcaattactacgaaattgggatttcaagaatttagagatatttcttctatgggcacggctggggggttttgtgttgcttggagaaagggtatcaagctgagtattagaaacaaattcaattcggggtttgagtgccgtattgaagaagatcacaaggagccttggactttattctgtatctatgggacaccttatggaagggagaagggagcgttttggcgatggctgacgtatatagtctgtaattgtgacactcgatggatggtgtggggggatctaaatgttattcttaatgatgaggaaaagaaaggtggccgagagttccacaatcgtgaaggggctcatctgcagaatttcttgttggaaaccagaggtgttgatctgggttttagtggcccaaagtttacctgggtgaagtcaaggggctctcataactccgtgaggaaacggctcgatagagcagtggcctgtgcgcattggtgtctaagttttcctaaagcttctgtggttcaccatcctattatggcctccgatcacgccccctggttctggatactcaaccaatgactaaaaaactcaattatccatttcggttcttggaagtgtggacggcggaccctggttgaaaagcggtggtcaagaatgcgtggaaaaactcttgctttggtcaggctagctatcaggtttgcaggagactcacagaaacgaaagaagcgctcaaaaagtggaatagcaatgtgtttgggttttgtgacacacaacttaaaaggctgtatgataagttgagtgtgcttcaacaacaacaagatgaggctgctagtgatgaggaggtggaagtgcaattggaaattcttgagttggaaaatagaatggaaagaatatggaagcaaaagtcaagagatctttgggtgtcgctgggggattgtaattcgaaattttttcatgtgtctaccttgattcgacggaggagaaactcgatttgcgccatcaatgacgttgggaacggttggttgtttgacagagagggaataggggcttattttaacaagcagttccaactgctttatgaaagtcagcaacctgtcttcgacaacgattttgattcgatcttccagcccctggttactgatcttgacaatgcggagttgtttcgatgtccgtcgtttgaagaattaggcaggt

SEQ ID NO: 228284 - DNA, 791 bp, Cannabis indica
ttagctttaaatactgagcggaaaaaaacaaaagaattagttacatataaccaaaaggttagtgtttagacatgagccctcaccttcagctaatgtggtatgcaatatataggagcaaggctataacttagcatttaatcattccaaaatattccttataccgtgttacatacaattgtatcaataatttgtattaattttgtaataacttttattttaattgtacaaattaattattgccatctatcagcattatcactccatctctatcaatttgagttgagttttatatttttcactctcaaatatttttctctcttagtattagagcaactacaaggcaaacaccaatgtctaccatccaatctcaaacttcagttggtaatgctgcttacaataatggagccccatcgtccaacaatcagggagctaccacaaatagatcgccaaccatgtctaattatgtcacaaactttactcaaccctttaacaccctaaatcaaccatttcctataacaactcgacagaaaaaactacactctttggaagactatggtctccaccatcatccgtggtcatagactttggttttgttaatggaacacgcttatgtcactacaagaaaaaagacatataggcacgataaaattagtgccaacaaatgcaaattttagtgcccatagttattttggcacacgacttgttgtgcctttattgtcgtgccaataggttcgtgcctaaaacaagcaacatgcaccacaaatatcagcgtgccaattgactgatctaat

SEQ ID NO: 228285 - DNA, 1357 bp, Cannabis indica
aagatatctccgttcactggctttatcctaatgaatgggtgaatgatacttccttccatatatcatttcatacggtgccataccaatagtactttgataactattgttatatgaaaactcaatcagaggaaggtacttattccaagaaccttcaatgtccaatacacacacccgtagcatatcctcaagaatctgaatagtcctctcagactaaccatcagtttgaggatggaaagctatactgaactttaatttagtacccattgttcgttgtaaactctctcaaaacttggatgtaacctttggatctcgatttgagatgatcaaatttggagcataatgaagtcgaattatctccttaacatatatatcaacatattgatctactgtatacgtagtctgtactggtaaaaagtgcacaaactttgtatatcgatccactattaccgagatggaatcatggaaccctattgtccttggtaatgtaaccaccatgtccatggttatatcctcccaattccactcaggaatctttagaggttggagtaatctcgctggtctttgatgttctccttaacttattgacaagttagacattttggcacgtattccactatatcaccattcattcctaatcaccagcacaatgctttcacatcttgatacatcttagttgttcctgggtgtaatgagtatggtgtagtatgagactcatccagaatctcttgtttcataccctcgtctgctcgaacacaaaccctatctttataccacaataacccatttgatgaaattgataatgttgacctcaaaaagggatcaaccgacagcaaggttgtatggatttgatgcttgccacctgtttgaaaaaataagaactaaaagcaatgaacaacaagattagttatagaggttcagtccccttgtgatagcaggtgttttagttgtattatatcgagggaaacactatccagatcactataggtgggatctactatagcacccctaggattaaaaggtatgaattagtcgtagcatatcctcaagtatctaaatagccctctcagactaacaatcagtgtgaggatgaaaagttgtactgaactttaatttagtacccattgtttgtttcaaactctcccagaacatggatgtaaactttggatcttgatctgagacgatcaactttagagcacaatgaagtcaaattatctccttaacatatagattagcgtactgatctacagtatacatattccgtactggtaaaaagtgtgctaactttgtatatcgatccactattacctagatggaatcatagaaccttattgtccttcataatctaaccataaagtcc

SEQ ID NO: 228286 - DNA, 726 bp, Cannabis indica
gaaatgtgggtgccttgtcagttagcagttatcatcttcatgacaattgaatttttaaaggactaaaccgccaactttgaggtgcttgatttgatgaatccactgtttcacctcctaagattgaacaatcttccccacctaaaatccaccattttctttagccgtagtctcttccaaatccaagctcagctcaccaccactggcctcatctactctaatccttcttgtcttctttcactccttaatgatcaatattatgcatattaacatcagtagagcatgtttataatgagggacactatcctaatcgtgtcaatcatcattattgcttcacctcagagaagataaaaactagaactataataagaagaacgacacattagaacgaaaagaagttatgttgttctaattaaagtagggaaggccctaataatttgggtgtcttaaaggtgttaattactgtccttttgttaatatttccattatcatagttgaaggaacatatgtgaattttaaaaggataaatgattttttgttatctttttcagattatcattatgccaaaaaaggatgaccatttggaaaaatctaacaccttgtggccaaccaagtcaaatgtcacaaccactctattttgctttgccttctcttcttcttcaatctcctcacactttttcctcaagagctccttctcctgtaaatggaaaaggacagaatgaagaatca

SEQ ID NO: 228287 - DNA, 2057 bp, Cannabis indica
agaaatctcactataacagatatcatcagagggttctacataagctaccttagattcaaagtcttgctccttagtgtcccacgggaagtcacgaacaacactcgggtgcattcaaagaattttctgtggtttggagcaaaccgaagaagaggattcatacaattttcttttcttaaacgacgtagttctttcatttgtttcggacgtaggcatcacactaatatcacccccaactgccttatctcaattaaatctattttcccaaagtgtttaagatcttgtaacaaagtttcttaggctttaaaaaattgagacaaatccctctcttcatcttgagtagtctcggcctcaggcccaccagcaaagtccttaatagttccctcagtacccataaaaccacttttcctgaaattagaatgggccttagtattatctccatgtttcaaaaggtcattatatacttgtagtgggcctttcttaacacaaccaatgctatcaacctttttacttaaacgattgggccccacctaaccattggagttagtcaaaggcccattaggtataacaatcagcccatgacccgaagcacagtccacttcatttcccaaattcaaattcataggcacaatcgaggcacggttatttccttcaattgccaaaacagctaagcaagcagaagtcttttctcctatcaaatgaccctcctctctcccgttaccagaagaagcaactgcctgaacagtgttattaggtagggacttgaggagccacaccgcctgcaaaggcttctcggatacagctgccgcgtgatcacttttaatgttatcatttttattcagtgttttagttattagatatttgtgtaagtgttttctaatgcgtatgtaaagagatacaagaaggttttgctagtgttatttttttatgtgtatgtaaaaaaataaagaaagttgcttaatgataatgatgtaggcaaataaaatgtgttaaagtgatctatatatgtatttgttggaattttaaaccaaaatctgcagctttttttttgtccaacacactttaaagaaacaaaataaatacaaaatccaaaagtggtatttttcaaatttctacactttattatgcatccataataaaagtgttattattgtaaatcactatttgtgctatattatttctagcacaatgtcaataagcccaacaccaagaagaaccaattcaatcaagagtccaagactcttctctctccaatcaagcctctccttctcttatatatagataccttcggtcaaagcaacaagagtcgactcaaacaagactcaccattttcacttaatattcgacccaacaagaatatatatcagccgaacctaatgaaaccctaatgtgtatataaccctaagtatataaaggtatattatctcaaaccctaaagctacttcggcagccacactctttccctctcaaagaattcaaagcatttcaaaaatacttctctttctttctcacagcagcaacacaaaaatatctagggttagggttttatatttctttctcttcttcttctttacagccgcatctagtattagggtttcttcaagctctcttcttcttctcactctaatggtagctagggttatattgttctaatgggttctcttatcttctccttctactgaacacgggtagggtttctaaggttcttatattttcttttctcttcttattttctttacagcttctacccaaaacaagatcttcttgctcttttcacttctactcgaaaacagtaacacaaaaattcccacaaccccttagtcgaaaatcaacacacaaaacccaaaaatagcaagaacacgaaacacacacaaatacaaaaataaacaatctagagattaaggtgagaaatacaaacagaaataataaagatggagacaccaatttgatcttgaagttcgcccaaaacaaccagctacgtctctgtcaagccgtcaaagcttgaatcgattaatcatcaacaggttacaatctttaatttacaacttttgatttctctc

SEQ ID NO: 228288 - DNA, 2498 bp, Cannabis indica
ggaaagtatagtcagagtttgaatttcatcttgttcttttggctgtttttgttctgtgtttttgtcggatagagtgttatggcttcaactagtgtcaatatgggattggaagatcatgcagcagcaatatgtttggatgatgaagagacggggttcagctttgtagggggggaggaagaagactcgttcgattcaaggtggtgccttgtaggaagatttcttaacgcgggactggtggatttccaagctatgcagaatatgatggcattcctttggaaaccagtcaaagggctgtatgtgaaagagcttgagaacaaccggtatctatttcaattctaccatgaggtggatattcagagagcaattaagggaagcccatggacgtttgacaggaaacaattaatttttgaaagattgaaagagggagacaatccgaggacattggtattgaacaaacttgatctgggggtacaagtttttggtctgcaacatggttacaggtctgatctggtgctaaaagggattgggaattatattgggacatatgttgaatctgatgttaataacttctcaggggtatggagagaatacttgaaaattcgggtcacaatagatatcactaaaccgctcaaacggaggatgaagattattagaagtgctgatgattggttttgggctaatttcaagtacgaacatgtaccaacattctgtttcgtttgtggtattattggccattcggagagattctgtgagcaggcgattgatactccattcgatcagcttgtaaaaccgtatggaatatggatgaaagctactcctcagaagaaggctcatatgattggaactcaatggctcaggtctggaaaaaataacaacatgggagcgaattctgcagaaagtcagtcggccggagaatatggtaaaggtgctattccggtgggtggagaggtgactcatcaaggcattaatcatgccaatattaggggaggaaatcgtggggttgaccgtgggaaatctgtagctggtagtaataatggtgagggagtaatcaatggtatagaatggggaaagaacaagtgttatatatggaaagtatggaggagggtcaatgttatgtggaaggcaatgaatctgtggctattactgatccaaaacgtagaagggtatttgttggacaaatggaacatgatattgggcccaatagggactcaattgttgaagaccaaatgttgggtgatgggccaaatacaaatgaaaaggaagcttatggagaagctatgggtatgaagattgatctatcaaaaaacttaagtggggcgggttctggtgttcaggcccgccgagaattatgaccacgttaagttggaattgccgtgggcttgggaaccaacggactctacaattccttaaggatttggttatccaaaagaaacccaaagttgtttttttgtgtgaaacattatgtggtaaagaaggagtggagcgggctagattacagttgggcttcgatggctctattgtggttgaggcccaaggtcatagtgggggtattgcacttttgtggaagcataaagaggaggttcaacttatagactactctagtaaacatattaatgtcaaaatatgcattactgggcagcctatatggaggttagtggggatgtatggtgaggctaatagaagtctaaggcataatacatggagacttataagacaacatgctgaagatactcgatggccatgggtcataattggggatctaaataatgtcttaagtcaagaagacaagcatggtggaagaccatatccaaatagtctcatacaagggttcaatcaagttgtgcatgattgtaacttagttgatatggacttaattggccatccctttacttgggaaaaatgccgtgggacttcaagatgggtggaggttcggttagacagagcacttgtgtctaagaattggatagatgaattcaattgctcaaagctctataatctgaatttctcctcttctgatcattgtccaattttgctggagccaacggtagagaaaatacacactgggccgaagcaattcaagtttgaaaatgcatggcttcgcgagccactttgtcatcaggtggtcaaagatgcttgggagagggagtcgggtaatgatattcagacaaaaaaaagaggtgtggggaggagttgcttcaatggggtaaggagtacactggagacttcaaaacaagaatcaaagaagcaaaaataagtctgaaacaattcaaaggcaagagagatagttactcggttagcaaatatgaagaagccgagaagaacttgttcgagattttgacacaacgggaggtcttttggaagcaacggtcgaagcaactttggctcaaggagggggatcaaaatagcaaatattttcatgcttcggcaagcacccggagacggcaaaattcaatccaaaagctacaagatgcaaacggagtctggtatgattgggatag

SEQ ID NO: 228289 - DNA, 2562 bp, Cannabis indica
ggcaatgagtggagtagcccatgttcttatatatggctcaatattcttgatccatgtgggacaatattgtccaatagtatgttctaacttattatatcctctgttaaactagtatgaatgaaatcatatttatttgttgggtcttttcatgcagtatgtgaaaaagtctatgccagcgaacttttttgtgcgctacaaccacgctagcaagacagcaaaggacattttcaccgaaacacacacaggtctcctcaaggccggtggagaatggttgacaagcacttcacagtcgtgctcggtggtggctgctcttattgccaccgttgctttcgctacgtccaccactgtcccgggaggcaacaacgagatcagtggtaggccaaccctggaagataagccggcttttgaggttttcgcgatagcttcgcttgtggccttgtgtttctcagttacctcagtggtcatgttcctagcaatactcacctctcggtaccaagaacgagattttggaggtgatctgccgagaaagctgttgatggggttaacatctttgtttgtgtctattgcttctatgttggtttctttctgtgctggtcatttctttgttcttcaagagaaactcaagtatgcagcatttcccgtgtatgccattacatgcttgcctgtatctttatttgctcttgctcaatttccactctattttgaccttatatgggcaaactttaagaaggtccctcagcgtagttacaaggttgcctttgccccttactaatactatgaaatggaatccaacaattaatgttcttccttaatggtctctttgacttgtttcctggtagctcattttctctttaataaaagatggaatggaaggttatggtatgtttcacgatgtcttttcttcttgtttaccaatttcacatcaattttgcctacttccaagtttaatttgagtttttctatcttttattaatttactttttttaaaaaaaaaaattgaaaaagtcaactaatcttgtgttttttttttttattattttattaactagcatcccgagtaacttatcctaaatttaatagagaggaaataaattaagatgggaggcaaaaaactaagaaaaaatttaagaaggaaaatagtataatgtgttttcatcaaggaaataaaattggattattttacaattactttgtaaccttttaattattattttaaaataacattagtataaattattataataattatacatttttgttagttttaaagaactttctacccctttttttctcactaaaattggaaacgaagttttctccaagacttcaccttttttttctcacttttcttttccttttacatttcttttttctttttacttaccgaatatgctttattttttatttttatttttgttttagttttctcatttgaaatttcctttccactcatttttcccctagctaaacataatttgctaaataatattaaggccttttttttcataacactaaataatattatgtttaatactttttttttaatataaaaaaacatgaactttactaaaagagcaagatacataaggttcaaattccatacaagctcattgtttaatcttaaacttgccttagcaaaatgatgagctaaattcttatactctcttgaaacataaataatatgtcactcactcaacttgatcaaaagctttaactatatcaagctttaaagcagtccaccatttcttacctacttttctattattaatgacatggacaagctcattagcaataataatattgtcataaatcacattacccgaaacacaagtactctaaaagagagagataattttgtcaagaactaatttgagtctattagcaaggattttagaaagcactttgtaaaaagtagtgcaaaaggctaataggccaaaaatccttaagcatattaacatgttgttttttgggaattaaaacaataacagtggagtaacatcagtgaaatcaattctcttattaaggcagtccaaagctgcattggtaaaatccttatctaagatagcccaatttttatttatttattttttttttatataaaagtttgcattaagcccatctaaacctacaaccttatcccctgagagttgaagttgaaagacagctttcctaacttcatcagcagtaaagtcctcatctaagaccctaatatcatgctcttcaaggccaggacccaagaaatcaaatatttttcactgtgtagacaatattataatcatgaataactatatgttcatgatttaatagaatttatacattaaacatataatcatgaaaataatcatgtgaactatgcaacatataataatgtttaatcttttattaattagtaaatctaattatattgaaatagaatttatttagggtataaaatcccaacaatgtcaccatgaaccaaatgggtaaactcttccacttttgcggcacggatggacttattatagtacttaacgtctaaaaagtatccaaagtcatggtattcacctcataaccttgggacac

SEQ ID NO: 228290 - DNA, 923 bp, Cannabis indica
gaaaaccataaaatctactaagaattacattggttcaagtctgatagattattgagatctatgactttaatctagttttgaaaaactatcgtaaacttctttattgattgagcaagaatacaagtacaatacaaaacccgaaaactcaatctctttttcttctctatatctctcaattgaaactctctctcaatcgttttctcaatcctcttttacaaatgatgatatagtggcagtatttataggtcaaagatatctaactaagtagttaatttggttacgacttaacagtcttaactagttccttacagagagatctctaagttagctccaaagctctccggatatgaactacgcttcctgcttcctagacggaagtctcaagctaacgaagctagaaggacgttccgaataggtacaaagtcaattggaacaagctatttgggaccttttcatgaaagggacggctagtcttctaaaactctttttcagaggacgactagcttttctgaacacttctttcggctggtcaagttagtctttcggaactcttttctgaacgataactaactttccataagacttaacttgaaattttttcatttaaatgaactataccacagctcttgagtgtttaacgaaatcattcctatttcaaagaaaaaatgagaatcatgttccataaggtttcttaattgagtagtaatgcttttcactcatgtgattagacatgtcaaaagaatcagaaaacataaaggaaaaataaaatgaaaaggtaaagcacaaaactcaccaacaaaacaactagtcctgtatacatttggctgcaaagtattcttaattgaaagtcggttgatttattttttgtttaaatagttgacttttcactgtttattccagattttgttttgttttattttctt

SEQ ID NO: 228291 - DNA, 5363 bp, Cannabis indica
gatcatggatggcaagtttctgattgtactgctgaggggttgaaggtactactttagttttttctttttgttttcgtttttgttttccttttcaaaatatatgggtgcttttacagtgcgctccttaaaaatgggtgtaccgtattttccttaaaaatgaatgtactccttctgtgttttcaatatccgaagttattatcttaatttttatatgatggtgtgtatagtatttattaaggacatcttacaaaatctaattttgaaaaattcatataaaatatgaacggactatttcaaatgtatataatataaaagaagtattcatacaacagatttttttaactttatttttcgatttattcttaatttatatgggttcatcagtagaatcaacattccctgttaaaaattgttgtcctatactgagttaaaccaatttaattctgataaatcaattaatatatattaaatatgctaaatacttttgttttgttgactcaattaaagatttaatttttttaataaataaaaaattaattaacgtttgaaatttagattagtttaactcaaaaacaccactttaaacaagaaatcttaattctcatcggtatacttatgttttggatgcactataatttttttctactttatatatgtatatttatttatttcaattatacatatagtatttatctaattaggcttatttttttccaaatgtatacagtgctgcctattattctcaatgatgccaccagaaattgtaggccaaagaatagaacatgaaagattttatgacgctgttaatgtactactctctttacaggtaagagcagctatatattttcttcttcttctttttttatttctttttgtacttctaatgaaatatattagacttgtgaggctatgtttcaaaccaacaaggaaaaaagaacataaagtagtaatcatgaaagtttggatcattttattcatgtcttattcaatcaaaatcttgatttcatttacatttaacaattgagtgtatattagtaattcataagattaattcaatcatataattttgatttattattggcagagtaagaatggtggtttagcagcttgggagccagcaggagcacaagattggttggaggtaattaaggatgactttaataaatcaatgtaatttcttttaaaataaaatctaataacaattttaaattcagatacttaatcccaccgaattttttgcggacattgtgatcgagcatgaatatgtagaatgcacttcatcagcaatccaagctctggttttattcaagaaactgtatccaggacataggaaaaaggaaattgaaaaatttataataaaagctactcaattccttgaagacatacagatgcctgacggttcatggtaattttacatacacatatagatatatatttgttaatttacagttatatatgatattgggcagcataagatacatcttagctaatgatttgatttcataggtatgggaattggggagtttgcttcacatatgggacatggtttgctctaggaggattatcagctgctggaaagagttacgataataatgcaactatacgtaaaggtgtggaatttctacttagaacacagagagaggatggcggttggggtgagagtttctttcatgcccaaataaggtaaattcttttgaaaggtctaaataatccatgtagtaaaatttgtaatggtgttttttctgtcttggttacttagacatataataaataataaagtaattatgttcttatggtgataattatgtaggcatatgtagctcttgaaggaaatcgatcaaatttggtgcatactgcatgggccatgatgggtctaattcatgctgaacaacaagaacgagatccaactcctcttcacaaggcagcaaaattaataataaattctcaaatggaaactggtgattttccacaacaagaaataactggagtcttcatgaaaaattgtatgctacattatgcagcatacagaaacatttacccattgtgggctctagcagaatatcgtaggcgagtttcattattatcatgatgtaaaaatacctaaattatatggtcatagttatcagatataccttgcaatgtatacctaaattaaatgtaccatgatgtctcaatattatcacagatgtaataaaagtcatttattaagcttttttttttttttgaaacagagtcgtttatgaagcttgtaaagtagttagtttctctgtttagattcaacaaattgagcagactaaaaatgtgtgcccctttcctatttgcgccttcattataatgttgccaatgttatcaacacaatttaaaactgttaaaatggaacatccaaaccccataacaaaacagactttgtgttggaatttgatagtgtgttattccattactggccaaattgtacacttttaactaataaaccttaaaattcagtagctgctgtatctttctatctggacccatggcttaggatttacgatgaataaatagaaattggtataccttcaggcttatatcattcattagtgtacatatcaaatgcttaaataaacaatctttaatgctacagtacaaaattgaggggaaatcataagatttccaagcaaaatgagtcatccgagtttactctgatgatgattttctcttctttcgcgacttggaagacttctttgccttcttttttaaaggtcccttgtcctcgagagacgtaccatcctcattcagtagatgctcgtactcttcataactagcaaaaggtgatgctccagatttgccaggctttcgttttcccttagttttgattctttgatcaaaaccatcatcatcattctcactatcatctacatcaccaatttcaataatatcatcgtcatcttcatcatcatcactttcattctccaaagcagcatcgtcaatatcaaaatcctctccctcagcaacgtctgagagcatgtctggatcctcatcgctgacattaccaaccaagtcttcatcatcttcttcagcaatttggtcaagatcatcatagtcataatcccccacgttcaaatctccagaaagatcagtagagtccaacatgttgtcaatctcttcattatcactttcgtcattgcctccgccaccatcaacatcaaacaacgcttctgcatcatcgtcatctgctcctcttttcttcttcttcttttttggcctctttgaagaactcattttgttcatgtaaaacttgtggaagacaagatcttctggtggaacatcatcttcagccaacgatagaatatctgacccaatcaaatggtcgttcatttcaagctggaaaacgaagacattatttaagaataacatatttacgagctcggcaacaaggaaatgtaataaagtaagaaataagcaaaatcttctttgtacagctaaccttcttggcaggttcaatctgtgaaccaccatgccatgtacttgacttgggtttcttttccatgaacttgtccagaaaagcagtgagtgagagatcattaagtggatttccattgtacacaatgttagtccctgagaaaagaagggttgtcgccattttagaaactgatgggtgcacatgtgaagcaagtgctgtcagctcccaccagcttacatggtctgcattgctgttcttaaacaaaaacaaaacatttagatgtccggattaaaataagcatttttatatatgaaaatgataataagagacaactgaccaataagatggttccctgtgccttggattgtatcctccaggtagccgggctttctgagtctcagggggtggtacttgagattgctgtccaccagacacagacactgtttcaatgtggtcttctgggagtgcgccgtctcttaccagaaactcttctgcttcgtctgaatcttcatcttcagaagagagtggagcttccttttcatcttctgaagaatcactgtcagaattagcaaaggaagtatcagtactcttcacattgtcagctttcttctcttgagtttccgagggaggggttggtttcttatcaggctcttcttctacgatatccttaaaatgttctacttcttcttcctcggttgactcattctgaagcaccaagttcctgcaaatggaagctcgacgatgatgacacgaaatcaaaatccatttaaaaggaacttgcatgagaagacttaccacaacggcagccttgccttcaatacttctgagagcaagaaaaggcatccgcatgcatattgaggtggctgctgaagggcaacctgtcccagttcaagtaaaagagtgaaaaaataagcactcgcgttctttggtattgaaaaacaagggaggacaacatattttcatgtataattcatttcttacatacgatagaaattgtaagggtaaaatggctttcttttttcttcttgttttgacttttaaaaaattgatatgtgttgaaagaagaaatatacgagtgggaccagtgaagaaataaataaaaatgcaaaatcaaaagtcattaaacctgcatcacacgctttgcaaaggcagccacccgcttcaaattcacatcacttttcatcgctctgagaagaagtccaataaacatttctgcctgaaatttgcatgttttaacattatccataagatgtttcatcttcaccttattaaagcatgacaaaacaccattaacattagagcaatgataaaacacattgaacttgccttcgaagaattcatggctgcaggaagaagtaactttgcgtacaacgcccggtaaaacctgtcactaacaatttgattcttagatgagatcttatcaagaagcattaacgcttgaactcccacattaaaattgttggaatgaacctgcatcataatatctacacttagtatacatgcaaatgctcttgcctgaaatacaaactacagaactggacaaaggttttcaattaccagttggaagagcattggagtttgggtctctataatgtcatcagcttctgtgcttgagacatatggaaatgctctattgactccctgtgtagcccacgatggattagcaacaacaaactccaaagtaaaaaaaaaaagcatacatccagttagcaaataaagtgataattatactgactgttagaagagctgatagtagacgtgagtccaattcaaccggggattctaacaaattctttgctttgccatgcttatcagatttggaagcttttccatcgcattttttgtcacttttatcctttccatgaccaatccctgcctctgtaataagaacctgaaaatttttatttgtaaggcctcgtcattt

SEQ ID NO: 228292 - DNA, 1186 bp, Cannabis indica
ggactaagcagaacaaaatctgactgaaccactataattcatcgtcttatttatttttttccagccttgttgtttattctcgcattcccatccgagtactcgccattttaggttgaatactcgcacttgtcatccctcaaataattccctgtcttatcgattaaatcatacattttggtgttgcgaaatttgctcgacaacacggtgccaacagaaaaacctgttgctggtaaccgtatggagcctttatatgagcggttcaggaaacaagcacctccagtatttttgggaagtcctaatgttgtaaaagcatagcagtggttgacagtggtggaaataaatactaaattttatggggtttaccagaaatgacaggatggcgtgtgccatgtgtcagttccaagaagacgccctagtgtggtgggagatggtgtgcctcacacgggacgtcactagaatgacctggaaagaattccaagattcgattaatgccaagtattacaacgaggtcgtccacagtgcaaagtggaaaaattttgttgagctggtacagtgtgagaatatggcagtgactgaatatacaaccaagtttcatcgcttggccaagctggcctacaggattgtgcctacggatttcaataaaaaggaaaagtacttggcagggttgaacgccaagattcggcatgatctagttattaccaccaatgacactacgacatatgcagagatggttgacaaggctcttcgagctaaaagagcagtaatatttctacaagaaacccgagagacccctggtgctggtgagaccactactctccctatctctagtcctagcaaggagagtggtgattccactattgacaaacaataatatatatactaatatacatatttacatctttttacagtttggggagaagacatatgatgcaaaaattgaattattcctattacagcgccaatggatagaacaattgctggcagtgattcgtgaaggcttagacgattgatgctaaaatgtataagaatttttcttccctagcttatttttttaggttagcttgtaatttttatatgtttgattagatatattagcttgttaacacttggactaattttaaaatatttgtgtaatataattgtaatttttttaattactttcataaaattaatttaagtatattgg

SEQ ID NO: 228293 - DNA, 1990 bp, Cannabis indica
gtagatgtatgttggatgaagagtgaatgatccgacttagatggattaaacccaagttgtaagagacaatggtgaagtttatcaaaccaagcacggggtgcttgttttaatccatatagagctttatgcaatttgcacactagattaggagttgtggttatctcaaaaccggggggttgtagcatgtagacttcttcattcaatgtgccattaagaaaggcattgttgatgtcaagttgcttaattgaccaggcatttgatatagcaatggtaaggacaattcgaattgtcacgggtttgacaactgggctgaaggtctcagtaaagtcgaaccccggttgttggtgaaagcccttggctacaagatggtctttgaatctgttgtgtgttccatcagagttttctttttccctaaaaacccatgtgcagcctattggagtccttccttctggtaatgggacaagagtataagttccatttcttgttaatgctagcatctcatcggtcatagcttgattccattgttcatgttgcaaagcctctttgaaacttcgtggaatctttgtagtgaaatagactttgggtttgtggattccagactttccccttgtttgcattgcatgagagttctttggagtgactggatctgttacagcagatgctgattctggtgcagcaacatatgctggttctggtgcaggaacagtagctgtttctggtgcagcaacagtggtagattcatgaacaagagcaggagctgattcagtatgaggagaactgagagtaactggtattgaagcactgctgttgtgagtctgtgaaggagcagaattgatcaaacttgtgtcctgaaatggctcagcaggaggtgaggcggatacaacttgttcctgtgttgggacatcattacttgccacattgggcacagaattattagtatgtgcaggaagattatgcatgcaagaattgctaaaggtgcttgtgagaggaataagagcagatgtagcaaattcagcataagaatatgaatcagtggacaacttgggaattgttgtaaagggaaatgatgtttcatcaaagatgacatcacgggaaatgtataatctgccagatgtgtctaagcacttgtaccctaggaatgtgcatggagaagaccgaaattgtagtttgtgtttgttatagggtcttatgttaggaaaacacttgcagccaaatgttttgagggtagtgtaatcaggtgagatgttgtataatttttctatgggagacttgtgttacagggtagatgtaggtaatctgttagacaaataaacaaaggttcgaaaagcttcatcccaatatttgagaggcataaaagcatgtggaaaaagagtgagaccattctcaacaacatgtctatgcttcctctcaactaatccattttgctcatggattgtgggacacgagtgtctatgagtgatgccaaactgtttaaggtgatcagtaaataacctaaattctcctccccaatcgatttgaaggcattttatctttttaccaagttgtaattcagcttcggttttgaattgcaagaaggtttttaaagcctcaaatttgtttttaagcatgtagatccaagtgaatctagagtaggcatcaatgaaatggatataatatttgtatctatttatagaggtggttttggcaggtccccataaatcagcaactactaactgtagtggttcactatagacagtaagagatgattgagggaatgacagcttgtgaattttgcctaaacaacatgatgagcaatcagaaaaaggtcttttattattgatagtgatattacaagattggagaacagatttaactatcttttctaatggatggccaagtctattgtgccatagatcatactcagatatggttgatctatttcagtgagtacaagtggaggaatctaactctttattagaagacacagtggttgtgaaggcacatggggcag

SEQ ID NO: 228294 - DNA, 1941 bp, Cannabis indica
tttatagaattatatatgcattgcttattagtgacaaaagcataaagtatattatagtcagaactattacccagacaaatactcattagattactaacgtacatattttccattcccctattttttaagaaaaaaaaaaacaatagtaaaggatttagggtcatatggtaaactcatagacaattaccgtcccatcacaggttgggcaatctttagtaggtaatggtgcatggagatcgacagtggacggaaggtgaatcaactcagcccgattatcagcaattgcatctgcaatgcattcagccgtcgccttctcaccactgcatgagaataaacaggggatagaaatatactatattaaaagtggtatgctttgaaagcataatgcatggtatctaatatcccatattgggtgaggctgtacatgggccatcccatggataactttggttcaattttcattggaaaaatttgagcatgttgacaagagccaaaatcccacttgattcaccaaattttaattaaatataccattagctgaaactttaagaatatttttctattaccatttttagttagtaaacacaggtcacatgattgaaatatttttcagttagcattttaagttggtaaacaaaggtcacatgaatgggattcaactgataaaacctctgcaccatagaatgagcttaatagagaaacaactaccatcttgtcatttaagaagaaaacatacttagctcatcaaattacatgcaccttaagagtgaaagctatatggaaaagaatctaccttttcaattggtaattttttacttgatattgcaccctccctgatcctctgcacagagtgcaacgcagtgcctgccatccgttgcaggtttcacagttcctgcacttcaagatcaatctcaagtagatattttttccaacctcaacaaaaaatcatgcactaataattactttgaaattcagccaccgtagacattagacaggacaggatgatccttctaccatcaactgtcagtttagattgcactaagatggaaagaaaaataagttttccacagcatttacatgaatgggcttcataaaggcagtaataaatcaactttgaaactggattaaaaaaaagaaaggcatgcaacaaacaaaaattatggatgtaggaccttttcattccaggaaatcatattaaagtaattagtaaatgcaagcttggcagtggcgcctcaaaaaactttaagatattgcattacagaaggactgagtgcaaataatacattacaaaaggaagagtgcataataagataagagggaaaaaagaagaagaccacaatacaatgaagtcacaaggaaaagtaatggcgatgctggcattacctctgacaaatcactttttttcccagatcccatgctatgtcataagtccccagagtagctacagcctgcatttagccaatgttgaaaatataaaatttcacaacagcagacaatacaatgcagtatattaagtgtcattccaagaatatcaaggccatgtaacagacttattccattacgaataccgtccaaatgataaattgataatattactcaaacaaaagtttgaattcatccaatgaaggcaaattattaagaaaaagacatgcggacagatgacccatgcagccaaatggctaataaaaaccaaaaagtagcagaaaaaattgttaagagtttaataaattgtatgtactctaagaactcaaaacgcaacgttaaggtccagtgagacaattcaacaaacatctggtggctcataatagcagacaaattagcatactgggattgacaaataaaacaccccaaaaaaaaacggaagttaaataaaggaaaagtacgtggaacataaaaaaaaactcaacaaaaattagaaagcgtaagagagcttggagagta

SEQ ID NO: 228295 - DNA, 1186 bp, Cannabis indica
taaattttagcaacccgaactttcgattgggttagaaagtatatgtgatatactgtccaaaccgaccgatgtacaaccctagtcaagttttttattgtttgaattttgaatttttatgttatgttatgttttgatttttatattgttatttatatacacctattacatattattttaaatatatactttgaaaataaaagtaaaaaacttgtaaaaaaatgtacaattacttgaagaaaaaaaataagtgaataattataacttttgctcaaattgtggtttcgaactaaactattcttaattgtttggtttggtttggactaaactaattcggcacctgttattcactcaactaaatactgtcaagtaaaattatggcacctcaaattggggcatgcaagttagagaggacttgaagaaatcaaaaagcaaggaatgttcaaagagaagctaacagaaagacttgaattatgtgatgaatgtaattttgaaaaggcttgtaaattgaagttcaacaagacaaaacacaccaccacagaactgttagcttatgtccattttaacctttgggggccatctaggatttcatccaaaggtaaagcacattatttcataagcattataatagatggttatagcaggaaagtctggatttattttttgaaaaacaaagatgaggctctaggaaattttgacacataaaagagattgctagagaaccaaactggtaacaaaaactcaaggttctaaggactaacaatggccttgagtactgctcaaatgagttcaaggaattttgtgccaaaatgagaatccaaagacacagaactatgatcaaaaccccttagcaaaatagtgttgctgagaggatgaacatattttttgattgagagggttagatgcatgttgctaggagttggtttaaacagaatattttgggaagaagctctaaaaagagcctgctacctaatcaacagatcgccatctgtgccaaacaacttcaagacttcataagctatggacagataaaccctcaaacttagattacttgaaagtgtttggatgtactacatttgtgaatgttagacacgataagttacagcctagagctttgagatgcatgtttctaggctatcctgaaagagttaatacagagtatggtgcttagaacctggattcaagaagt

SEQ ID NO: 228296 - DNA, 1744 bp, Cannabis indica
caaccattgattttttttcctcagtttatcttttaagaagccaagaatagcgttcttatttttctcaatcgagtacgataaccccaaaaaagaaccattttcatcagcttcaaaaataccaagtaaatcacaaatagcctcatgcacaccaggactagtattgcagctgtaaaaaactgaagacttttggaaattaatattctggcttgaagccatttcaaacgtaagcagcaactctttgatattaaaaacttcctcttccgttgctttacaataaatataactatcatccgcaaacaacatgtaagaaatagttggagcttgtcgagatatcttacaacccgttaagagcccacttttttcatagctttgcaagaggcatgaaaatccttccacacaaagaataaaaagatatggcgataacggatctccttgtcttatcccacgagaggcttcaatagggtccatttcatgacctccatgaacaatagaaaaagacacagaactaacacaccacatgactaagtttatccatcttccatcaaagcccattctttcaagcatagctctaagatacccccattccaatctgtcgtaagctttgctcatatcaagttgtagagccatgaacccatctctccctcttcttttcctcttaagatagtgcataatctcgcaggagatcataatattatcagaaatcaatctcccttgcaagaaggaactttgggtttccgaaataatagaaggaaggatagctttaagcctatttgcaataaactttgaaatgattttgtaaataacattacaaagagcaatcggcctaaaatccaccatatttaaaggatgcttcttcttaggaatcaagacaaggttagtagcatttaaacttggaggaaaataaccagtttcaaagaatgaaagaacaagattgaaaatatcattacccaccatagaccaacgaaagaaaccaagagtcatttcgtcgggccccgaagacttattcggatgcatttggaaaagagccttgcgaacctcatcatgagtaacagttctcaagagatcttcattttggatagtcgtaacacgagattgtactaaagtcgtaacctcacgccaatcagtttgagcagaagcaaaaagagcagtgaaataatccttcataacatttggtaaaccagtgttccaatcaaccaaatgacctgctgaatttttaagcttctgaatggaattagtacgtcgtcttgccgaagctgaggcatgaaaaaacttgttgttattatcaccatcttggagccacatttgtttggatcgttgacgcaaaaaaacttccctttgagcatacgtttccaccaagttttgtttagcctgtttaaaattcttaatagacatctcatcacaaccaagcttccatctattcatctctttcttccacttcccaatcctttccttaaaattcccagtatattccttcccccagcgctgcaaatggcttgaaaaaactgccaccttactttgtaaatcactccctcgacactcctcccaactctctttaacaatatgaaaacataaggttcacgaatccatgcattctcaaacctaaaacgacgtaccgtttgtgagtttaagtcagttaacaaatccatgaagatgagataatgaccagatatagtagttttcaggttgtagagctttgctaaattaaaaatatccaaccaagattggttcaccaagcctctatcaa

SEQ ID NO: 228297 - DNA, 627 bp, Cannabis indica
gtgagtagatctaagattctggtaaaataatatctaacaatcacaagtttggagtttggaaaggaaattgacccattgattacctttgtttctcgtcttcagaagaggtgtgatcatcttcctgagccaaacctagcaacaatcactttgaacctccccttatcttcatcaggtatgtcctttttactcatgtatttgaactttcacgaatttgttgcttttaattcatttaggcatgctctgtttggggataaaattagtgttttctcgtttgtatgaacaccaccctaggtgggtcttgaagttacaaattactttacttcccaaattttgtaattaggaattttattagatgtgctagccaatatttcgccaaaaatccttcaggttttgagtcgaataccagtttgtgtagtctccctttgtacattgttttgggtttagactctggaacaaataattcctaagaactattgcttctaagtagtgtttctactggggacctctccaagcagtttatggggagctccctttctatactaggtagttacgacaactaactgcttggacctccttcttcctatacagaaaccatgacaaagttttcacatcggaaggaggttgact

SEQ ID NO: 228298 - DNA, 1146 bp, Cannabis indica
ttatgttatagaactgattctatgtttttttttttttttaatatttgagacatctacttttggtgacttttccagcaacggtgactttttcggcgacggtggcttttttggtgacaataatttttccaataacttttttggcaccggtgatattttcgacatcggtaattttttcgacgaaacttattattacaagttttattaaatttatttattgttttttctcatattttaaactttaattattttttaatctcatatttttttgtattatatatttatgccatataaaataaattctaccacattttcttataattatgaaaaaccttattaataacaatttatcaaattattatcttcagctaaccaatataattcaattaacaatattaatttataactatcatattttgtacttcaatattttaatttatcatattataaacggtaaatattattttagatattgtgttttgtaaaaattattaattagatcttctattttgttaaatgataaaatggaccctatatttctaaaatgataaaaataggaccatgagctcaatttttaataattttattttttaatataaccaactttaagataatttttaatacgaatggatacaaaaaatataactagttttgttataatatatgtagatcatattattattaagttttattttgataaaaacttaattcatggtcctatttgtataactttgaaaaatgcaagtctattttatcatttaataaaataaaaagtccaattaataatttttataaaatacagaattcaaaatagtatttacccaattttaaatttctccaatcaaataccccctaaacagcatataacttcttaattcattatttttgaaaaaaaaaaaaaaaaaagagaagaaaatcattatagtgaaaagtatacgaaataattggtaggatgagtcatatttcttatatagagacaaaattcactagattatgacagccaagtcaagagtcttccatggctaataattggtatcaattttaatacttctaccggcttgtttgtaattattatctcatatctaattagatattgtattttgaaaagataaatgctaaagggcatcagtggtgcttagcactctccta

SEQ ID NO: 228299 - DNA, 1299 bp, Cannabis indica
ataaatttctcaaccaaaggttctgataaatagtacagaaactaatagtaataaaacaattataactagaaaaaactatagttacacttacatacaagaacatattattaattgtacatgaatatatatatctactagtgtactctttcatttataatgttttattttaacttatataatatatatatactatagtactcaaaactatatacataccagtaagtaacaataataactcctttgttctaatcttctaatttttttagacaagagtatgaatatgggaaggttcaagagcaattaaaggtgacctataaaatgacacgtgtaatttatagaaagcacatatattaatgtgttgtatataattaattttgagatagaatttcatttattttattttaaattttaacaatgatatggtcattttattacaatttttagttaatattcatgcgtaaaaacacatgcggaatatttttttaaaaaaaaaaattcatggcgcgcggtattcgttatagctacaataatatttttctaaattttaatttaaaaaatttcgaataatttacagtactaaaaataagcttgaattgaacacgcgtgcatacgtagatttagactggaatatctagaaaattcaatttttaatactgtaaattattcggaatttttcgaaaattcacagaaataatattgtaactataacgaatattattattatgaagaaaaaataaaaaatattctaagatatgattttagacataaaaattgtaataataaattataattagcagtcctctaatatttaagttagtagtggttattagatacaagcctttaattccaacatggatagtgatggccgaaagctccattcaaccattctcacacacttaattatatacatcgatcatcatataaatatatttatatatatatatatttgtgtctgttataattaattacttatgcttatgaaatgggtcttaagaagaaaacaaaaatgtgtctttattataagaataaattatattttcaaaaattattaaaatatatatatttttaaaaaatattttttatttaaattcttaagatgggtggacggtaggccctaagtgcgggtctaacttttctgaccttgtatgttttagaacatacataaaattagctaaaatagtttaaaagataaaatataaagaaattttgttaaaaaagagctctatcaaataagctaaaatagctcaaagttttatattataattagtgcatttttacatataaagaagtaatatttat

SEQ ID NO: 228300 - DNA, 4286 bp, Cannabis indica
taaaattaaaaaaaaaatagatttcattctttagtgacacttaaaatatttagtgacccacattgtaggagattaacaaagattgattagagtctaattctgtatgtcactaaaaattattcccaactctagagtgacatgcacaaacttacatgtcactaaatagtgccactaaaaagtaaaattgtagtagtgaagacttcttcaaaaaaaaaaaaggataatgacctaaagatgcatggagaaagttattgttcttgaaatattttgcttttagaagaaaagcaagaaggaaatcaggattagtaaaaattcgacaagcttacttagccaacatagcttgattataatgtacaataactcaaaaaccttaaccccaaagaatttagatttacacaaaagagaccatttcttccaatgattatgtgctggttattactcatagactcccaccaaaagtcatatagttggggaaataagaaattaaggacttattatcttctttagtgattgtatgttaagtaccaggggctcaaaacactagcttaaaatctttgccaaaatggtatttaggagtatagtgtaattgtctggaatggtaatcatgtttccaatctatttgaaatttacagatttaaaaaagtaaaaaaaaaaaaaagagtaaattttaatatttactattatttgtaataaaaattattgttgtaaagacatcaataaagttaaaactgaaagatattatagctgttcttattagtcagtcattgttttgtactgtatcacataacacagtatctgtattatatacacataaaattacgattaaaaataccgaaaaagcaacctggataagaggcgaaaatagccgttaaggaaatttaaaaaggttattagtataattaataataaaagatgcctgcattcgataatgtcactgggtacagacagaatattacaaaattacatataaaatgtggtaattttggtttattaatataaaaataaataaattaataagagttaagaaattgaggtgggtgacttatagtgggtcggactgagaacaatggtcagatcttaaacacttagacaaatctaacggctctattttctcacaaatttgaaaattgaaaacagaaataaaaatgggaccctaaacggctctcccactcaaacaaacacactttctctcttcaccattttgaaatgtttcactgcctcgggcacagcacagttccttatcccttctgaaaattcaaattcgcgaatctcattctaactattttacatctctaaagcactctactccattgtctttggtcgtttcccaaatgggtacatgtcttagcaagaagaaaccttcttcatcttcttcaactgctgtcgttaatagtggttctactattaatggcgtttcttcttatccctcagttccactgtcagtcaagaaagctgtagagctaccgaaaaaggataaagaacaagaagaggtcaaagaagaagaagagcaaccaataacccaagtgaagaaagagatattcataatcaaacaccgccggagtcacgacgacagagcaacagagccaaatcccaagaaccataatcaaccattgccagcagtagcagcaccatccgatgaatatgataatgagactgcggcttctccccctccggttcatcagttttcggcgggctcctcctcctccgcagccgcgggtgtgaggacttccagctgtactaaggaagaggtggacgccattctcatacagtgtggaagactcagtcgtagctcctctggaaaagcagcttcttcctcttccgcctccagaaagtactctggttccaagcggagctacgacttcgacaacaacgatgcagccattgcagccaacaatggtggcgatggggatgatggggtggttgcagcgacagaggagagcagtcgccgccaccgcgagcggcgtaggtcgaggacaagggcttctccttctcctcagggaaggagaagaactcccagcagagaaaggggagaccagcagcaacggtctgcaagtcgagagaggcgtgtgagtaggtctccagggaggcgttcatcagagaccagtggcggcggcggttcttgttctaatactaataatgtcaatgttgttaattctaatagacctgggaagatggtatcggttccagccaccgtttcatctttggtgatggacaagagcaacaatttggactcttctgctgctgctactgtgaagagaatttcggtgaagagaaatgtaaccgacgctggcgctgcctcaaggggcgctgcatcacctcggtctcagtctccggcaagagctaatggcaatgctgctaaagcttcagcttccaacgaccagcagcaaccttctctgagccgcaactcttcgaggaaggcagaacactcgccttacagaagaaatcctttgagtgagattgatcccaattccttggcatatccacacactaccaataacagcaggccacaaaccaaaaccagacccagagaaactgatggaataactgatgacccaaatcaggtaaacttctttttagttctctcctttcgtttcaagatcctttttttacatgataaatgggaaacttgtaatgatggtaaagacctctacagaaatgtattgatcaacccaaaatattgaatataattagttgatttggttgagttgaaacacatcttattattaatttcaacatgaaatttatttacaatttttatttggaagaagtgcttgttacatttcaaatgctaaaacatgatatttggttttacaatgtggacttataaaatatatggtcgtactctgcaacttttaggttcagaaaacaaatgtggtgactaattacagaaacggcagcagagtttcatccacaaaggagcaacaagcaatggtggagactacagtggttatctctggccctcataaatcttcttctcaaacacagccacagacaataacaagaagcaggtctgctagacgatctcgagaccttgatttcaatcccgaagctctgttgcatccaaattcgaattcaaattctgatgcaactccttcttacaccagactgctgttggaggacatccagaattttcaccagaagaacacaaatactaccacaaccacagtggtatcactcccttcctgtgtcagcaaggcctgctccatcatggaagccgtggcagacctcaactcgacaactggttccaacttgtccgaagatcacttcaactctttgatgggttcaacttcaacccctaaaagcaaggacccttttgtggaatcagaggtagtaattggctgtgacgacttgacggagccaagcttccataagtacgtgacagtaagaaggggaggaggaggtggagatgctgcatcagaggatcaagagtcttctggcagcaacagctatatgcagcagcagcaacgggggtccgggattttctcatcctcttcggcagattcgacagactaccggacttggagatcgaatgatgaagaagcagagggaaggaagagactcaatgagtggagcaagagagattcatacgctgttcaaccgaacagtggtggcattggacgtggcaggcttggctccagcgccaaagggcttcaaacagtttctgtggctgcatccacatagtgttagtactttgttggttacatttgttaatctttttcgttgtttcctggtttaaacttgttcgttcatttagttttggggaaggagaactctttgctctctccattgttgtatttgctgttgctaactttgcattacagctacccatttttaaatcaaaagccatttgatttttattctcatcgcttttccttaatcgacttttcgtacagtcagtactatttattaacattgcttttttgataaaaatagactttctcgaaaaattatgtaactgatgtaatagttttttacaagttggggaatttttttctatacgactagtcaatgaccataggtagaaagaaaagtaaaataaaagaaaagataatccaaaggctatattaatatacaactcaggcttttttatatttatttttttatgtacctttctttcaagattccaaaggattcggtcactcaactactaataattaattacaaactcacaatttacaaactcaaactttcgtataaaaactttcactttacaagagtgagctagcatcaacctttgttataatcttttagtcaaatttttacagccaaacattgtactactagca

SEQ ID NO: 228301 - DNA, 1262 bp, Cannabis indica
aattagtttaaatttccaattcacccccctcttggaaacatatcttgggctaacattattgttcaagatgttaggaatttacttttggctttatcttttgttgagttgtgttttgtaaaacgatctgcaaacaagttggatcattgcttggcaagagactcttgtttctctataggttgtgtgcttcagttagaggtttgttcctctgaagtgcgtcctattattttgaacgagtttattaattaataaaaatcctaattttattcaaaaaaaaatattattttgtgtcaatttagtaaaaaccaatgcaattgagaaatggaacccaattaatgcattggttattaattgagttttgttatgtctttttttaataatttagttatcaaaatattatttaatttattgctaattttcttatgttaattttgtgattttgattgttcttttcctttaaggaaaattttatttacagctagtattttttgtttaggaaacttgtcttataagtaaaggaatttttttatggaaagttgtctatttttgaaaaacttggctttccctttctctaagtattaactttggttttgctatgtatataacaaatcaaattatctttatttcgtaagttttgaagaccaaatcgtgatcttaatccatttttgaaagtttcctgtttgatcttggtctactgtagtagaattcaaatttgatgctgcaaatcagggatttttttagaaaagttttgtacagttggggaaacatgtttgtggttgtctctagggtttctatgttctataaataggaactagagagcagccaaacgtttttatctcttctagtctcctattttcccatatctatctttgtgagaagtgtgtttcagttgtaaaaacctagagtgttcaactaggttttagttttcttgttatgatctcatactattcatagataggttgaagagaagctttgaacatacatgggtctttattgggagaagactttttcaagtctcattttgggagaaattgagcatatatcttcaggagaagatttgttaaaaccttacttcaagaggaagtaagcacacataaatagttgaagggtgttcactatttggtgtagattagcaaggtggattatagagggttaagacaaatcattaaacggagtctaaatttgtttgagtcaatagtttttgtaatctttgatactttactaattaattttattctttgagtgtggcctcgtggactagtagt

SEQ ID NO: 228302 - DNA, 1121 bp, Cannabis indica
gattgaaaatcaagtagtggctatgtcatggtttttaggagaatttggtctctggtctactaagaaacaggctgtagttgcgcgctctaatatcaaaagtgagtttcgtactttagccaatgctgtgtttgaagtcaaatgacttgtctcgttgctcagtgagctttatgtccaacttcatgcacctccaatatgtgggtggacaatcaggggcagcaacattagctgctaatccgatctttcatgcttgttgcaagcatatcgaaatcgatatgcattttgttcatcctagcaaactcacttcatgttttttatgtgtgccttctattaaccaaattgcggatgtacttaccgaggttttacttgtgaaccgattcaattacttgaaacttaaattcaaagtcgtctctacttcctttcgtttgaggagataataactaattctttataaagttattttgtcaagtgaattgaattagttaaagtccgttttgtagcttaaattccgtatgtgtcagttagagtgataagacccgagaactccaaactcaagatcacaataaaacagtaacaaaaagcacaaacagcagcaataataggagtagaacagtagcaaacaatagaaaatgtaattgaatgtatgagaaacccaattacaaagtatgggagcccttaggctcctttcatgcaaatagagatttactcaatacattgcatatccaccaatcctcctaagtattctatatatactattgtaatctcactcaaacactcctcttaatacaatgacccaattacccttttatttaatatatgttagaacaccacactaatcctagatcctaacattaccggccgcccgagtttcaccttgtcctcaaggtgattgatggcaacaaacgctaactccacaggttgagtctcagttgacaggttccaaacgaaagaatacggatcatgtgagtgaattccattggctggtctaaacaacagtcaccatccggcaattcgacctctatcataaaaccagttcagcaacgtcccctgttgagatatggtaatcccaggttggcaactcgaaaactcgcaccaaattcggccttcttcctcggtcaaaaatc

SEQ ID NO: 228303 - DNA, 2346 bp, Cannabis indica
agagacgaagagagagaggctgggtccgatggtcggaccatggggtctgatggcgtccgaccaatcggaccccatggtcccaccactttaattttttttttcttttttttttttcgatttgagagagacgaagagagagagggggctgcgcacggagagaggctatgggggccgctgcgccgtgcgccgtcaccgtcggttgaggcttcaggttctcggggttgaggcttcgcgaccgagagagggggctgggtgggttgatgcttcgggtccgagagaaacgaagagagagagggggctgtgtggttgagggggctgtgggggtcggtcggaatggtgctgtggggtgggccggcgttgggtcggtgttcttgcgatggggtatcgcacaacagagagagaaaaggggaaggagagagaaaaggaggaggtgattatgagaggggtattatggggataaagcaaaagtagtcatatattgcctatggtataacatttaggtttaaaaaaataattttaggattttttaagtatagaaaatcaaatttcccttcatttatcttataattatatttaatattattttttaatatactatacttttgacttacttcacttgtcaataaaaaaaatattatattaatagtagtgtttaattgtcataaaaaatatttcaaggaccatatgacaaagtaatgaagattttgaggactaccatggcaagtaccagttttgaaaagcattgtaatttcttgaaggaagaggcaacctcggatatataaactctcaacagcccaacactgtactcctcccatcggatccgaagtgccattgacgaccatctccccttaccccagcctagctctccgggactggttttccgatcgctggacactgaatcactgatcttagatctttatccctttacggtactctctacaatttcagttctttcttcatttccagtgatatggttttaattatgcttgcttcaattgaattatttagtgttaaatcttatcgaaggcattgagttttcatcaatcatacaaagtaacacgttactcatccctagtatataaatataatataaaaataaacagaaaataaataacctgctaaccctaatcttcggcgtcaatctccacacccccctctctccatttctctctcgtctgtttcattcactcatctctctccctttctcggcagtcagtgcaccacccacacagctcctccatagcatcgtctaagtgacagtggtttgacatattaagatttccttttttttttgacctattgatgggctaataatttcttttctttatattactagttattaaaaaagttctcatgcattttcccggaaattgagctactcttaacttagggttttgtggttcactctaatttttgacaggaagtttgtctgctaggattttaatttggttatcgaagatcgatcagtattaaactgaattaaatatggtaaggccctctttctctttgggttgttcgtgtcagaattcatttgactgcaaaatttaattatacatatgaattcgctcaacttccaggaaggaggaagtaatttggaggcgaccatagagcaattgctcaatgtggagaagcagatgaggcttgctggagatgtggccggcaccaagaaagctgctactgacattctacagctatgctttgaagcacgtgcttggaagaccctcaatgagcagattattgttttatcaaaacgccgtggtcaacttaagcaggtactacattaaaaaagaccaacataactctttaaggttgggcaatgaattttactttttttaatttgttctgtgttccaattaggtttttaatttagttacttgtaaacaaagaattacaaactgttaaaaggtagctaggatttgtgttttctgtctaattatttaaaaccagaaagttctttagagctgtatgtatgcttcataagctgtttataattttccagttttggtatgtgcaatttgtttgcttaggaatgttagacttgactatgtctagatgcctgtgtacatgttcgtgttagtggtattactttatgctacaagaaaataactttagctgtgtcgtattagttaggactttgttatggtaattcaccattttatgtgtggttagtttgtctacttgctatttgtggaacaactcaagtggtttaatgagttagtgttccgggcttcaaatcctgtaaattgtatctttaacaaagttttttcttctctatgctatatatgttttagttcgattgttattcacttcattgagcgactggtatgctatttgcagcggtatctc

SEQ ID NO: 228304 - DNA, 1520 bp, Cannabis indica
gattggttactgcctatattaacaaggtgcatcttgttttttggtagcccatcatgaaagaactccatggttaagtgtgcttgacctggagtaatttcaggatgggtgacctcctgggaagttttcccgtgaagcgtgcgagtgaggacaaagctcgctggaaacacttgtgttggtttgtaggaaaattcatcaatcctggaagcagccagagtggcgtactcatgtataagagccatgagtctgtgagtgtaagggcccaatggaggcttgaagcagggacgttacaagtgtgtattcggcgtgtcctccaaaaatttcctgggattcatggtcaatgagagaggtatagaagcaaaccttaaaaagattaaagcattaatagacatggaatcaccgaagtataggaaggatgtccagtgtctaaccgagagagtaccgctctgaatatgtttattttgaggtccaccgacaaatgtctcccattctttgacaccctcaaaggaaataagaagtttgtttgggacgagaattgcaagagagctttcacgagcttgaaggagcacctgggaaatctgcctttgttggccaaaccaaaaaggggtgagaagttgcacatacattttgcaatctctgaacacgccttaagcgatgcccttataagagggagggaaagtaacaacagcctgtgtactacatcagtaagcattttgtggattctaagacttgttactcgaagatcgagaagttggcttacgctttcatagtggtgtcgcaaaaaatgaagccatatttccacgtgcatgcaattgtggtgttgaccaataaccctttgagacaagtcttgcacaaacctgaaacctcagggcacttactcaagtggttgatagagctatgtcaatttgacatcacttacacctcaaaagtgttgatcaatgggcaagcgatggcagatttcatggtagagttcacctactatccaaacgagagagaccaagagcaagaaattgatggagagtcagaagaaaatggagaaggagaggccacttgggagttgcatgtggacagatcctggaatgataacagagtaggagctggagttgtgatgatagcccttggagggaccaaaatgtattgtgcgataatgttcaacttcaaggcatccaaaaacgaggctaagtatgaagcagtgttagccagactgagagtcaccaaggaattaaaagttacgtggctacggattttcagtgactcgcaattggtgattttctaagtgaggggagaatactaagcaaaagggccaaggatggtggcatacttggttaaggatatgagttacctagagtagccacaacacttcacagttgaacaaatcccaagggagagcaacgccaagaggatggtatcttaaagtctatgcgggtcgagttcttagcctaaccaactattgagtgtgatcaagtgttacaagtagagggtgttgggttttatgccctagataaaactcatttcaatataat

SEQ ID NO: 228305 - DNA, 2063 bp, Cannabis indica
taaaagagtaggcatatatatatggaattaaattaattaagatcccaaagtttggaaaaaaggaaagaaaaacgaggtgttctgtttggctttatggagaagctagctagaatgatataaaaaaaaatggcagtgtgacagtttggtataaaattgggagagaaactaagtaaagtgtaattgtgattattattattgataataataataataataattaagtgggtgtgttagagaagagagttgttagttggttaaactgtgcaactcaaaaacctgcaacttttgttgattgaattttttttgttgcattagttttttgctattgtgcccacggaccaaactttaataccatattaaagtggtactgtttctttcttttttgttaattaaaaagagtggtactgtttatgattattattattcattgtggtggggttcatagctttaattcgcaatggccctttctctcttccacaataagtcaagaattgttaaaatatcgtatacatttattgttggaaaatgttgttgcaacatatatatatatataagaaaatatttaaataaaaaagttatctatttttttaaaccactataatatgccacatatatagagtcttctaacaatgatatgtctttcctcttcaagtaacattttattgactttagtaataagaagaaattttagtttgcgttaataaacaaaatttaatacgtaaagacaaatcctagagttgaattctcttccaaacctatatgcatagacttatatattgtttttggttgacattattacagttatgtctgtgtttttaattttgaataaatatttaacaccaaatgattattattattattattattattattattattattattattatttcaatgattgagtaaatcacaagtgattggggtatcaaaattaaacattggcgtttgagtgttttgtccagctcaaggtaagaactgggattggatgatttctgtgatcagtatttaattattaatttaaatcttaaattaataccctttaaattattactatcattttaatacatatatattggcctaaattgtcttcatttattgtgcagcggattcatatgtaagtaatttaaactctaattataatttagctggagctacctttaagggtacttaaaatattttatccaattcctttgtctcgttattccatttctatatatttaagtttactataagtacaatatacttagatatgaatccgaatggaaatgttacttaaaaaaaaaacttacaaagattttttttttctattaaaatagaaaagcatattaaaacctatgaattttcctaaaataattctcttttacatttacaactagacaatttactccctattcgcgaaacaattttttagtattataataaaaaataataatttactaatataatatatccataattttatagaagagaaacgtggtacaactagaaagtaatcaccatccaaaatgggcccaagcaagattcggaacggacccatgcccaccaaagactcaaggctttgactccgagacataacactctttcgaaatccggaagcccgctccctagtcttttgggacatggaaggaatgaagatctcttaatgaagataagggcaggtctcacaggatgacacccaaaagcctaccacagattgggagtcggatgtctaccgcgggctggataccagatgtctaccgtagaatgacgtttccacctctctaacacaagattagatactgtctcctgcaccagactattgtagttcatgcaccaccatataccccttttctgtgacggctcccctaacacctttgtctgccacgcataacctttgtgcaacacgtgccttgtaccaaacaatctcctcatcagtacggaaccgttgtcccacgggttgaatattcttagtgggcctcatagtcatgtatgttttgtatttaccctagtagtgggctcacttttacaaaaaacttaaatgggtcaggtatgcctggacccaaattctagcctatataaacctc

SEQ ID NO: 228306 - DNA, 1685 bp, Cannabis indica
gccgatatgctcacttctactccattctggatccaagttttgggcagcccttttcttaagaggtctcgagccctcgcaaggaaacttggggaggttttaggacgttttattgaggttgacacagcctctctaaaagaaacgtggggaccatatcttcgggtttgcattgagattgatgtcacacaacctctgccccgtggaactggcttccactttcaaggtatggctgcccctgttaagcttgaatttaggtttgaaaacctcccttatttctgccacttttgtggctgccttagccatatcgtgaaccattgtcctgagttcttagctaagtgtgattcctcatcagcctcacccctcttcgttatgatcataccttaggagctaaggttcgcataacatctaatcctttctacattgctagcacccgcacccgtcttcgcccccatatcaccaatcccgtttccttggctgcccactgcaatcctcatgctcatcaatcctttatcattaccgaaagccccttcaatgagcaaacctctgaatacgggatccaacatctccaccaacctcgcactaccccggtcgggtgctatatgacacaaacaccccaaaatagccctgttaaccgcacccatagtatggctaattctcatttgaccttctcggcatggcctagcaatgagcaagtcgttgatttggatagtcctccggttcggtcaacaactcctgcatctttcttaactactatgggatcaactggccctctgcaccatgttgtatctgcccctgaacaagtagtagcctctgctactatttcagccactcccatggtggcaacaacggtgacatctgaagtcattgggcacactgttccggtttcttaggcctttgccaccatcatggccgatctcaatcacagtcagccccttcaatttgccattggatcatcttcttcacctgccacggcttccacctctactcgcaaataccggtcaaagcgtcctgaaagtgccaatgagattgagttttggaaaatgttgaagcgaactcgtgatctggcacgtactcttgatgaaggatatattgagcaggccggtgccgcctagcgcacccgccgggtgccatgattgtcattagttggaaggctcatggattagggagtaaacaagcattccgttccctctcccttttagttaggaaatttcggtcaacacttttgtttatatcggagactaaactccaagttgactctttaagtagatttaaaatgcatcttaattttcctaacggtttagaagttcctcgagtcgggcttagtggtggtcttttgttgctctggactcatgatgttaatgtaaacctgctttcatataatataagtcacttcttttgctatgtcaagcctactaatttatcttccttttattttactggtttctacggagcacctaattcaaataataagactttttcttggcaagtccttcatagaatcggctcaaatattccaaaggccccttggctcataatgggtgactttaaggactttcttaatttggaagataaaaatgggggtgatacctctcggagcccgtcaactcaatttaggaattaccttgatacttttactctccatgctctccctgtcaaaggtaactctttcacttggacaaataagcaac

SEQ ID NO: 228307 - DNA, 673 bp, Cannabis indica
tgtattttaaaatacaatgtaattactaccctagtaattacactacatagtaattacgcagttatttccaaatagacacttaataatcttgcaattgacttgggaataagttaaatgaattacatatataattttattgatcaatctttgcctttccaaactaacccaattagaatattattaagtcaactccaacttcaactccaactcccactatagccatatattatatattatataaatatataaatcccacttctgattattatagtgattactgactctaattgacgattcgaagacttctctttcatggcatatatatagtggctccacttatacatttcaagcattattagttaactacacgtaatcattatatcaattctataaaaatatgtaacacaaatacataaaaatatatgtatcaaatagacataactatatatggaatcccattttgttttcttattaaatcaaatgtatcaattttattgaatatattcattttttttttactttatcttttgttacatcattttttttttgtcatttgatatattgatacattctatctctatatatttaatttctttgggctcgtttgtaacgccgtattaggtcgtattgtattgtattgtattatattgaattgaattatatatcatatttt

SEQ ID NO: 228308 - DNA, 2647 bp, Cannabis indica
ttctgccatccatattaaaattattttctctctatcatcttcccaaaattcgtaatttttaggaaatattgagagataagaaaaacacggcttcaaataagaaggcaaaaagtagtagctcaaccacaaagctggaacaattccaatgtcgtagtgttttggcaactcccatacatcactttgaagtacatgtctccactccttacaagttgacatagatcgtaaaagacctgccatcgattttacagctaaaggaagacccttacactttttaacaatttgttctccaatttccttcaactcagatggcaccacctcattattatagcttgtatcatcaaaaacgtgttctacaaacaacttccaacattcacagtcagacatgggttgaagttcgtaaggttgaacatttctcgtcttcatcattaacgcaacttctctattacgcgtagtcacaatgaccatacttccatgtgcagaagattcaaaagaacatttcaaagagtcccacaatccgtaattttcattccatacatcatcgaaaacaaaaagaaatttcttccccatcaacatttttttcaattcaacttgaagttggcgtagctcatttgtttcatatctatgcgaagtaatagtctccaaaataatttttgttattttgtaaacatcaaaatcatcagagacagttacccatgccttcaaatcaaagtgttgtaggacaacactatcgtcatacacactataagttagagtagttttaccaataccgcccatacctactataggaataacaaagaacctatgatcgctacgataatcatcatcatcatcagataacaataacttaacgattgtatttttatcactctcccttccataaaccttggaaacatctaacaaaggggcaggtggtttatgtaacaacattgttgttttaaggtcaatttttttcaaacctaagtactctgtttgagccaaaagaccttttaaattatcaagtatcccttctatttcatatttcacattactttcaaatgaactaaaatattttttgacaaagttcaaagacttacttttctttgtcatgttaagtcgcaaagcttcagtattgatcttgtctaccacatggtcggcttggtacaagacttgcttaagctcgtcaagccactccttcacgttcgaatcttcgagttgtttctcctcagcatcgttcaacaacacattagccgaacgcaacatagtcttcaacttattaagcaatcgagaattgagtttgtttcctcgaaagaagtttaggacatcttcagaagcaagcctatcaaagaggacattaatgaaacccgaaagaagagcacctcccacaattaattcagccatggtttaaaatctttgagagagagagagaaagaaagaagaaagtgtatgcttttcttttgataacagaaagaaagtgaaaattagtgatggaaaaagtgttataaattatagtgatgagataatggattcagtcatattatttgatttttcttctttcctttgatgacttttgaataattggtaatatttttggtttttttcttcttttttatttatttattttttgacttacttgatgagagaacaagcattaaagaaaaaataaacgaccacacaaaatgagatatttttcatatacaatatatgatgtgagaggatagcttgataggtacgttataattaaaaagaaatcataattgaaagtttcaatatataaattcggggatttttctcttaaatttttacatgtaataaattatgcctttgaatttttatgcgttaaaatttttgcttgaactattaagattactagatttaaagatttttgtctattttactaattcggtgattatccatgtactcaatcatgctccttagaccttaatatctaataaatcatgcctcttgaactttgacatatactaaatcacgtctcctgaattttcatctatgtaagactttccttactaaaattagaaaacagtctttaaattcaacaatctcaatagttcaaggaagatttttaacagccttaaaagtttaggcgcatgataataactttggaaagaaatcctgcatcttgctaagagcatctctaatagtgcaccattttacaaaattagtgtgaaatcttcacactatttaatgacacaccaaaatggtgtgcaccaaattttgtgtttacaccaatttggtgtaaatcttttgtttttgttttttttttaatattaaataaaataaaaataacataatactaaattataaactaaaaagaacaacataacatattgtaatttttttaggtgatatttctttcttatattgtcttaggactggtaatagcgtgactcacattttagttaagttagcactttctttgaatgatcattatgtttgtttggtgggaaaagtgggaaaaatatgagagaaaatgatgattatgaccacttttgcatgagtaagtgggggcgaattgtcttgtactgaagtggttgcgcaaatcaggtactgtggagagtaagaggaccacgtgactctcttttgtgttgctggtctccgcgtgtagagtaaataaactcgacacatggaattctttgtaaattagattgag

SEQ ID NO: 228309 - DNA, 699 bp, Cannabis indica
taactgactagtcattcgttttagcttcgtgggtatgtctataacattgtttgttttgcagattcatctggtggaggaccggtttgcgccaaatgtaggccgaagagagttagtatggttacatggagctcagccgctagctacgtgagacttcaggatggtattgctaagttttctggaaagcctattcttaccaagcatgtgtccaaaaggaggtaatttctatggcatcaaacttcgagttgcgttcttgtatgaaataataatgttgctttaagtattggattttctatttgtttcattgtttaaatgcttcttttaagtataaacaagtgtgaatgtgattgggttcgtattcttaaaatttatgatatttagtatccattgtgtttgtagctgcgtggtcggttaaatttgcatctttttgtgtggttctgtgtaaaatttcagaggtggcactgttagagctgctacaattgaagaaatagaaagcagagaaaatcgtccattgagaaagatgttgtaagtcattttggcatggttgattgtttagtggatattcattgttgctattacaaatacttagttgactgacactgctatttaatatttagaaagaaaaggatggagaagacgattgaaactgtgcgaaccaatttcaattccattaggacaggacgatcaaacccatccatgctt

SEQ ID NO: 228310 - DNA, 1201 bp, Cannabis indica
tttactttcattttgggattaaaaaattagaaaacaaaagtgttaccaaacgtcaccataattaattataatttagctatagctagagacatggcttatgtatatattttataagcataataataaggctttaaggtggaattgattgcctactttgcaatttgctgtttgttatatatctaattcatttgattgtcaatattgaaaatatataacattgaccttgtatttcaactattattaagatcttttgcccaactatattttgggttcaattcggccaactaagatcaaaactattattagttattattatttttagtgagaagtaaaacattcaaaatttattatgtaaaacatatatatataaatatatatatatatatatcagatttattaaggagatatttagttaaacaattgtttttaagtttttttttaaaaacaaaaatatattctataaccatacactttttggaaaaatttaaataacaaaagtgtgttctataaattttatttttatttttatttattgattttatttaatttgggtcggatctgggtctgggttcaggaccgggatcgagtttggagattcgactctaattttgggtcttgtctcagggttaaggtcgaggtctaggtcagagtcagggttcgaggttcaagtccgggtcagagtttggggttggggtctggggtccgaggtacgggtcggggtcagagtcggtgtccgaggtccgaggtctgggtcggggtttgggtgtctgggtctgggttcaggaccgggactagggtcggggtcttggtccgagttcgggtctaggatatctgggtctgggtctgggcacagggttaggggttcggagtccgaggtccaagtcacggtcggggttcgggttccaggtcagggttcggctcagagtgtgggtcctagtcgaggttcgggtatggatcccaagttataggttggggtcagagtcataaatattaattatgaaaactaaaaattgtttaaaaaattgtgaaagtaatttttttatctcaaaattttaattcttaaattaaaaaaaataaaaaaagtgaaaataattttataagacatgattttttataatatttttagtttgtcaaatagaaaaaataaaaattaattaaaaaatattaccaaaagtacgataaagtactaacagtaaaattt

SEQ ID NO: 228311 - DNA, 908 bp, Cannabis indica
  modified_base (698)..(698): a, c, t, g, unknown or other
tttttagttataatgtcaaaagcactaagtttctctaagtaattctaaacataaatttaggggtgtaacttttaaacctatgaaaaaagaggcccctatatacttataggaaagatgatttgagagatatttacaatgaaaataataaatatttaaaatgacatattctaataatatttcttataggcaaataattaggacactaaatgtaattttttttgtcttgactactgtagaccttcaaggcttgatctcatctgctgatcatgttgtttcatgttgaagggttgacatttgaaattgttgagttgaatatgatcgttcattctgagatttggttagaatttaggatagaaggagtccattgttatatatcaaattatcacttattagtcaaatccatgagttgtgcatcatattaattccaagggaaaatatgatcgagcacctagctaggtggtgcccatttcttgggcacaaccaactaactacaaaaaagtacatcaaattcttgtacaaattaagatgcatatcatattattaaaattcaaactattttctccaatcaaaagaaaagaagcaaatatgattcttaattgtttggataagattagtttcgaactgagttaatattatagaaccgcaattagcagacaaaactagttgaatgaatctaaacaaatatggtattttcatcncttatgtctgtggcatcaataatcaaaagtgggtcgattataaattgatgttaatgatcttgtattgtaaagttccaattgaagctcaatatgaatgtgaactaaaagtatcgcaaacttcaaaaaagtaaagtcaaaaaaaaaacaaattgactgtaatcgttatgagctaaaaaaaaatgtcacttgtagtgaacgagtcctccaaga

SEQ ID NO: 228312 - DNA, 1612 bp, Cannabis indica
cagaaagttgagcttcccttttctctataaatatccgcccatctcttcttcttctccttgaacaatacacaacaatacaagagagatacaatttcgaatcctagtgagagagtagtgcccacacacagcaaacagtacctcaatcatagattggaagactgtgaaggatcaaatccaagagaaggacattcggactcagatcttgattatactctgcatcagaaaggaatcaagggttagagatctgagtggaaggagacatattattccgctgcacccactataaggttttcttaactttatatgtgttttctttttatcgttttagaagttcatatttaggttgttaatcaacatacttgtgagtagatctaagatcctggtaaaattaattccaacacttaagggatcaaggcataaacttccaatatccatgtcctcatgaccatgaacaaaatggaagagctgaaagaaaacaccgacatataactgaaacaggcttaacctttcttgctcagtctggtttatctttggcttattggtggtatgcatttcaaagtgctgtgtttacaattaataggatgcctactgttgttcttgactataaaacaccttatgagtgcttgtttggttcactgcctgattacaaactattaaaacctttcggttgtgcttgctatcctcacttgagaccatacagaagtcacaaacttgactacagatctgaataatgccttttccttggttactcacctcatcataaaggctacatttgtgaaaattctcaagggaggatctatattgcacgaaatgttgtttttcaagaacaacattttcctgccttacactcaaccgcatcacctcaggtacaacattcttcatcatttaatttccctactgctactttctcttttccagttggtaattcttctactaatacatcttctgggtttgttgctgcatcacactcaccttcaccttctgagctacctaccactgaacctgccctaccagaaaatgcccgacctgctacttcacccattttaccacatatcccacaaccgacacctattatccactcattcccagatattatccaatccccaaacacccaaattaccccaccagtaaccacaatatcaccatctgcaccagcaaacccaaatccaaactcagtacctgaaattcccaatccctcacctacacctaacacagaaactatatcagctgctcctacacaagctgctgctattcctactgaggtgacaaacatattaagcacaacaaaaagtacagctgctagaacacactctatgcaaaccagatctcagagtgcatccattaacccaaggcatatctctctactaagcatcctcttaaagaatctttattaccaagtgaaccaaagaatgtcaagcaagctctcaaggatcctaagttgttgcagtcaatgcaaagggaaaatactgctcttatcaaggcaaaaacatggactttagtgccttatgaaccatacatgagcataattgacaataagtgggtctgtagaatcaagcttaatgctgatggatctctcaacacctataagtctacacttgttgccaaaggttac

SEQ ID NO: 228313 - DNA, 1635 bp, Cannabis indica
ctcaaataggaactaatttattaaaccttaaatcattaattagtattctgacatttatatgtatgtggtttggtgtcatataactggtttctctactttttagttactagtcactaatgttttgagtttctaagttgtaatgatatcatgattagagaggagttgttattgtattactaatcttaaacatgttcaattgggctgataggatctgtctttaagttataacaagttattggattataagagaaatcaaatgaattgtattatgaattgttcctatgttaagaagaacctcttaaattaaaaaaagaaagaagggaaacctgtcagacaaccgaccgaccaccccagctagaagaactagctgagaacgatcctctacaaccgtgataatccgaagaagatctagccgttaatcacgctctgatcggacggccatggttcatccaccaggtttggtttcctgtctccttagaagtcaaggatacagaggtacgagcctatagaacagatcctgttcaagtaaggtcgtgaactgaacagtcaatgcttcaatataagaacactatttattttgtggagcctatcgatgtgggataaaataacaaagtaaacagcaatagaaaagggtttctcttttgtcttttttaattgtagtaagctgttctgttttgggttttaatgttgaatgttataggagtttgaagaaatgaaaggtcttaatatccgaaaatctgagttggaattttagttagatgatgagccaaagatgaaactagatttggagttagatatccttaataatcttctttatatatcttgagcattccaatgtcaaccgttgcttctaaagcttcctttagtttggtgattacattagttggaagattttgttgtagataatgttgatttggagaaaattagagtggacatttttatgatgggattgaatgaagaagcatcacccaaccacctcaaactctgttgcagttgtttttttgtgtgtttgatgagaagagtacagtattctgatttgtgggattgttgatacttgcttttgttgttgtttgttacaaaagtctttaattaaacatcttaattgagtttgatagaatatgcttaaaatttaccacgttgaagattgttgctttattttctcattttcttcaacatatcaactatacatagagccacatctcaaggattctctttacttgaagagaggattgtgaccccaacatatgttgatggacaaatttggcctcttctattccacaaacctgcaataacagtaaataaaaatctaggcaaatccacctcagactatcttcaattaacattttgtttgtgatgagacactattcagatttacaagtactattagacatcttaacttggggtaatgagactaaaactatattttattatatttattaatcttaaacaagtcttatcctccaatgaattgttcctatgttttctcagtttacactcaaacaacagctatgatcagaagaagaacatcttaaaccatcagttgtcaatgaaaattaactaacaaacatgcccaaaaaaaaagaacaaaagattggaacctgtcagacaaccaaccgaccaccccagctagagaac

SEQ ID NO: 228314 - DNA, 1029 bp, Cannabis indica
cctctacaagcctttattcaattaaaaatcttagtggagaataaatttgaaaggaaaataaagagactacacacggattggggaggtgaatataaagcctttaccgatcttattgttcaaatggaattaattttaatcacccttgtcctcacacctcagctcaaaatggtagagctgaaaggaagcatagacacattgttgaaatgggtgtaactcttcttgctcaagcaagcatgccctaaaaatattagtgggatgcttttcaaacaacagtttatcttattaataggttgccaactcctattcttaacaatgtttcaccctttgagatgattcattcaaagaagccagattataattttctaaaaaccttcggtacagcatgttaccctgcctcagaccatatcaaacacacaagttccaatatcactccactaaatgtgttaatctaggatacaatgatactcacaaaggctataagtgtcttagtagcactggaaggatttacatattaagaaatgtgatattcaatgagtttgaatttcctttaagaatggttttctcaacgcccacaggtctaaaacatcaatccaagttgaggttccattctggtctgctactcttaatccatttatcactgactcctatagcaaatctcagttgattgatactgataaaactcatcctctgactacccacgaggtacatcttgatgataactcacctaacattagtaataatcatgctaaaaataacttatttgatgatgttaatgttgaaattactaatgctagttctccacctcaagaaatgcgtagcaacaagtgactaatgatgttgtggaagaaatgatagcaaatgataatgttgtaacaagtcttgctcctattcaccctatgataactcgagcacgagctggaatatttaaacctaaagtgtatgttgggcaagcaaagtggaatcacatcaatgaagagccaagttcagtcagtgaagcattggtccatgaaggatggagagatgctatgg

SEQ ID NO: 228315 - DNA, 2709 bp, Cannabis indica
tgtctcccctccacaaaagcagattgcgtgtctgatattgtgtctcccaaaatgtactttagccttatagcgagtgctttagcaatgatcttatacacacttgttataaggctaattggtctaaagtcttttaccttgcagctgttcagttttttgggaatgaggcaaataaaagtttcattcatactcccttgaattctgccttccgtttcaaaagccttaaatatttctaaaaggtcacctttgattgtgtcccagttcgactgcaatactgccatactaaaaccatccggccccggggctttgtttccatcacagctaaagagagccctcttgatttcatcttcatcaaaggggatttcaagctgccgagctgaaaattctgaaattttttgccattcgattccttctatatctgccccttgttttctctcagatgtgtacagcttggtgaagaaggaaagtagctcgttggttatgtcttcttccctatcaaggatagtcccgtcttctctctctatccttgatatggtattctttgcctttctagcattcaacaaattgtgaaagaatctagagtttgcgtccccttccttggcccatttacatttagatttgagccagacgtttctttcttcctcaaagactttctgctgccaatccttttttatacttgttctttcatctgccaaggattgagtccacatcgaggtgccttctaatttatcgatctccataattcttctttccattgctgcctttgcaattttgctgtttccgaaggttgtcttgctccaactcttaactttttcttgtacaattcttagcttggtcatgaatcttgttcctggccaccccgacacagttgtcttgctccaccaaatctcaaaaagttttgagaaagagttgttttccagccattggttgtcgaagcggaatgggcaagggccccattttggtgggttggaatcaatgactaccggactatggtctgaaactagtctaaccatcatttcttgtctcacaaaaggaaatatcatattccaatcttttgtgaatagaaatctgtccagtctactacatattggcacttctctaaagtttgaccatgtaaatctcccattgttgagttttgggtcaatgagtcttagttcccgtatgagttcgtcgaacatcttcatacttctagtgttcgaagtgctatttagcttttcccccactctacggacaacattaaagtcaccccctaggcaccacgaatcgccacaaatttccttcaatcctgccagctcatcccaaaaatctggtctaagtttgtaagagcaaggtccatatatccctgaaaaccaccaagggcttttgtcttctgcctgaatcaaggcagaaatagaaaaatctcccactaatgagtccagaactgcgacgcttctagtgtcccaaatcagtaaagtacctcccgatctaccccatgctggatggtaaatccaagctttaaatctagacctccatatgttaccaataaaacttctatcaattgttgttcttttgacttcttgtagaataaccaagtccggattgattttacaaatagtcgccttaattgctctcttcttagccttgtctccacttcctctgatgttccaagtgagaatcttcattagtgtttcttttccttccctgattctttctgtttcttctcatagttcacgttgaacgttagattagataattctctgctctgttttttacttggcttggcctttgtctccctcctgatttgtggatccaaatttggaattatcttcattcccatctcagcaagagacacagtcaaagaattccattcctcttggttaatctttgcttctctattgtcattgcttgtttccacggtctgagtttgtactttaaattcttctttccacagtccgtttaagtcacaaataatgtcttcctctgtttcagcattgtcttcttccgcatctgttgtttcttcttctgaattttcactatccgaactcatgacttggggttcttcatcaatgaaatcgttgttgacctcctcctcaaaagaaaactggttttcaaatccctgactgccactatcttcagcagttatcctcagtgttttttttgcttttttccattttctctttctataatatacctttgtcaacctcttagacacccctgtatcatctttctcttctacttcatccatgtgtaagactgaattcttatcttttttggcatgtaactcaaaatctttccaagaaaaaatgactgctgatcgaaaatcattgcgatttttggccttgatgattctgagatggcagttcataaactcattgataacttgtcttgtattttactttcttgagagatccttttccatattagagcaacttaataattcacatagaaaattcggcctactgttcaatagaaggggcttcaatctattttctggatttaaataaaccttcaccggcccaattgattccagccttagaatatccaccgaagctggaccgtatacacatggtaattttagtgggctgggcctcgtgaagcccatcaagagcttggagaggcagactgtacttggcctttgaaaagaaattccccccctattcttagaaagccacgtgtcattaggggaaattaatagccgcatatttggacttctgtcaacatagcttaaatcca

SEQ ID NO: 228316 - DNA, 3195 bp, Cannabis indica
atcactattcagattagaggattggcattatatagccaaggattacagctgtttgataagaaaaggaattaacagaatcagttaagagaaataacaaacagtaccaaacttaactaactctaactaactctttctaacaaacagctaactgaatagtcactcctaacacggcccctcaagattacaatttgaagtatctttaagaacagagatgtcttcaattgtaagcttggaacgaaattgagagaaccgttgagtggatattgcctttgtaagaccatcaactaattgatcttgagctggaacatgctttacttggaccaatttttgaattactttctctcgcacaaagtaaagatcaagctcgatatgtttagtacgggcatgaagaacagggttggctgtgaggagaaccgtactgaggttgtcacaccagatgacaggaggcaatgttgtgcgaatgtgaagttcagtgaacaatgagtgtatccaagtaagctcagcaacagtactagctagacttcgaaattcggcttcagtgcttgatcttgagattgtgtgttgctttttacattgccaagcaatgagattgtttccataaaagattgtgaagccagaggtggatcttcgatcgtcgatgtccgtggcccaatcggcatcacaaaatccaaccagttctttgacagaggacttagtgagatgaagaccatgagtgatagtgccacttagataccgtagtattctttttactgccagccaatgtgtgagttgaggatttttcatgaattgacacactttgttaacactaaatgagatttcaggccgtgtaattagaagatattgaagagcgccaacaattgatctatatagctggggatccgaaactggttcactaccatatgcagagagtcgaagattactgaccatgggagtgggggctggtttagcatcatgcatttgagccttaaacaacaagtcccgaacatattttgcttgagacaaatgcaaaccagaagctgttttctgcacttcgattccaagaaagtaatgtaaatcaccaagatccttgagagagaacttgtgatcaagagctgaaatgagtttttgaatttcagttgtgttgctgcctgtcacaaggatatcatcaacatatacaagcactaaagtagtgtgtgttgaagtgtgttgtatgaaaagagaatggtcagatttggatgggacaaatccaaggtgcaataggcagctgtgaagcttatcaaaccaagcacgaggtgcttgtttgaggccatataaagctttgtgtaacttacacacaagatgaggagcagagggaagttcaaagcctgggggttgtaacatgtagacttcctcattcaatgtgccatttaaaaaggcattattgatgtcaagttgcttgattgaccagccatgagacaaagccatggataagacaacacgaatggtcacaggtttcacaaccggactaaaggtttctgtgaaatcaaatccgggttgttgatgaaaacccttagcaacaagacgggctttgaacctgtgatgtgtcccatcagaattttctttttctctgaaaacccacttgcagcctatgggagttctgtcttctggtagaggaacaagagtgtaagtttcatttctggttaaggctaacatttcatctgtcattgcttggttccattgctcttgctgcaatgcctcttttacatttcttggaattttggtagtgagatagactttgggcttgtggatgcctgattttgcccttgtctgcattgtatgagtattggtggtgatttctggttggacagcaatagcagaaacaggttcacaagcaacaggtgctaatgaacgagtatcagatgttgaagcagcaactgtaggattgattgctggtgctgcaatttctgttcgaacagtagcagcagctgatgaatcagtgttggtatcttcaacaggagctgggacaatttgctcaggttcttgctgctgagtgacaccagtaggtggcattgagaatgctgagttgatatgttcctgtgaattaacagcagtgcttgccatagcaggcataacattattagtgctaacaggagtagagtttaaatgtgtatgagtgagagggatgtgagatgaaacagcaaagtcagagtaagaataagactcattgacagatttgggaagagaggcaaagggaaaggatgtttcatcaaaaataacatctcttgagatgtacaaccgaccagatgaatcaaggcatttatatcccttatgatttaggctatacccgagaaaagtacatggagaagacctgaattgtaacttgtgtttgttgtagggtcgaatatttggaaaacatttgcaaccaaatgttttgagagtagtataatcaggtgagatagtgaacagtttctctatgggtgatttgttttgaagggtgggagtgggtagcctattggaaagataaacagaagttctaaaagcctcatcccaatatttgagtggcatagatgcatgagcaagaagagtaagaccattttcaacaacatgtctatgttttctctcaactattccattttgctcatgtgtagtgggacatggatgcctatgaatgatgccaaattgttttaaatggtcataaaggacctgaattcccctccccaatcggtttgtaggcacttaatctttttcccaagttgtaattcagcctcagttttgaattgcaaaaatgtttttaaagcttcaaatttgtttttaagcatatagatccatgtgaatctagagtaggcatcaatgaagtggatgtaatatttatatccatttaaagaggtggttttagcaggaccccacaaatcagcaacaattaattgcaatggttcattgtacacagtaagggaggcttttgggaagggtaatttgtgaatcttgcctagacaacatgatgaacaaacagagaaaggatttttattattaactgtgagattacaagagtgaagcacacttttgacaatcttttcagatggatggccaagcctattgtgccatatatcatactcagagattgaggaattgttacattgagtactattgaaggtggtggactcattattggatggaacagtggctgtataagcacatggggcagcagctggggtagatggttgcacatgaaactgagat

SEQ ID NO: 228317 - DNA, 826 bp, Cannabis indica
taatctcactgtaccgttggacacatagatattaataattatattaattaaatttttataaaaaaatttacatatatttattttcttatattttttatcattttatattaattaataattttttttgaaagcatattaattaataatttttaaaagttaaacatgattttctctaaattagcagcgttattatatgtcctatttcataacatacttaagtttttattttatccaatatttatttatttgtgattttcaaaatcaaacccatctgaagtgaatagggaaatccttaagcttaaacaaatttgaaaaaagaaaaaatcaaatgacaaaatcatataaatgtcctagttaggagtagtgttatacatatgaattgagctttttaacaatcacgtaagggtcatacatgaaaaagatgttggcttcatcggggtattcatgggatcacaattaatatttttaggtctatccagatctgattaaatattaaattttatcgttcgatctgatctaattcatttcagtcattcaatcaatttaacatttattggatcgattctattcattgaatgtattttatgtatatttattgcaataattcaggtttatcaaatattttaaacctagtgttttttttcttcatcagattagatccatctaatattttaaatccaatatttattggattggattgtatacatatagtttttcacatataataacataaaatcaaattactcatctaaactaaatgaaaatattaaagagttcgattgaatattgatgtattgaattttggacatcccatctaatatccgat

SEQ ID NO: 228318 - DNA, 1589 bp, Cannabis indica
taaatatgaaacgtgaggattgtccagtttcatgaacggttacttaaataaaatcaaaagagaataattgtcattcctagaactcttataaatatggacgaaacctaggagaaaagggatggatcatttttgggaaagaaaaaccctatgagattaagtgaatatccagagagaatatcttataatgaagacacattataaagaaatactcagaaataatactgactcatgaagtaagtagattttaactacaaagccacgtaaaagctcttgatgttttatctatatttattaattgtaaatagttactttttatttacaaggctacatttattgttaacaaaaatctgaattaacaaattgtattctacaaatgtagagcgtgaatagtaaattttgaagaagctttaaaatagagaatgagtttagagtattagatgtagcgtatttttagttagagcacttatatatatagaatcgtagcgtgaataatgaattctataaatgtagagcatgaatagtaaattttaaagaagctttaaaaaagaggagtttagagtatctgatgtagcgtgtaggggtgttcattggatcacatccaatggatttggacccaatcgatccaatctaattatttattggatattgaattttattatctgattcaatccaatcaaattgagtcatacgattcgattggatccaatgaatgtattggattggatcaattctaactattggatgcattaactggttttctattggattagattagatccatctatccattttagctaccatttacactacaagatatatcaaattagtggcgggaatccaccgcttataattttttttcttaaaaaataaaaacggactattagcgacaaaatttggggttcgtcgctaatactgccattattagcggcaaatttgacccgccgttaataagtctgttgtaaattgataaaattattatagtgttaagctgatttcattaaaataaaaaaaatatacataaaaatattatttaaattctaataatccaacatacataataaatattagtttagtccaacctaattctcatgatctcataatgaaactgccaaaaaataaaacttacttattcaatacacatttacaatttattattgtttaggaagatgagaattaatattttagattttaatttttttttctttaagctgatatgtccaggtgcacaataagaataatatcaataaatatttttaaaataaaatatataaatatataaaattataaacatatttcaaaaatatataaatttgattggatgaccattgaatgataattggatcagttcgatacggttatccattggatcagatgtcccattcagcaatcgatctgatccaaactgatttttaaaatttacatccgatctgatccaattatgattgcatatttgattctattagatcagtcagttgtaattggataagatgactttctgcacactcctagtagcatgtttttagttagcttgaaggagtttaaagaattgtactaaaaacacgctacagcaaatactctaaactctttca

SEQ ID NO: 228319 - DNA, 1483 bp, Cannabis indica
tttctaaagatttcgatagacacactctgataccaaaatgaaatttcatttttatgattactgaattaattatttaaattaattaattactcactgttatagagatgtttaaataggcataagaactatttagatatgtttaaatatataactaacaaagagtaaaaatgaacataaaaaaagaacacacaaaattatacgtggtatcaattatcttttaaaattactattagtctacggggccatactcaaagaatgaaatttattagaagaatctcaaagtgcttacaaaatctaattgacttatacaaataaagattctctctttgaatttgtcgcaactattacgatctaaactcctaatcaaatttttgaagtgctaagatattgaactcttttcaaatcataacacttgcactctttctttcaaaaattaactcaaacgagtcttctcccaaagcatgatgaacgatatctaagtgtgttcaacctgcacaatttttacaaataaataatatagaaataacacaataataaaatactaagaacttgttgggctaaaagtcagaatctgttcaaacagatttaccgaacttagacaaattttcagcaaagtttccttaaataataaagaaacaaagtatacattaatccacgatttattaataaaataatcaaattaaagaaataaaataaatattaatacttttcttataaacaaaaagtgaagataatattattatatatataagaaaactatacatttattttaacaatgagcacaatttaattcacaaaaatatttttcacaccaaacatagaaatattaagtttaaaaattcataaaatcaatttcgaaaatcacataatcaatttcaaaaatatttttataattatttttatttatttatcaaatatgtcaatataaaaattttaatttaaaaaataattttagaaacataattggttgtattgatatttataaatttttagtcttagaaaaaataaattggtgattagttagtaatttcaaaacaaatggagattttttttttatctctttttataattatttttaggggttttatcatttataaattttattattttttgtatttttacaaaactgtgcaacccacaaagttatctaaatcgcaatccacaccgtagtctttgaagcaatttaaatcgcaaattaatgaaacaactcaaatcgtaaaaataaaaaaattaaaaaaatcgtaaaaaaacagaaaaacaaagtttaaaaagtaatatatgcagtaattcctcttatttttataacaattaatatatatttttttactttaacaaattttaatatatttattgtatatataaaatatatttaatttagatctaaactgatttaaaatatatatatatataaaaagacaatttagtcggtgaaacccctttactgttataatttttatacacttaactcttttattttattttt

SEQ ID NO: 228320 - DNA, 4334 bp, Cannabis indica
taaccagtacggtgcatgtactgtcgaacagacacaatggttgtgtcactatgatatcacccaaaacatatacaatcacaaacacaacatgcatatataatatgttctatgatagtcttaccacgattccgaattcgagtgagttagccgacttgaacgaaaagcctcgtgctggatggatgccctcttcttggaaacacttcaatcctttgctgcaactcagaagattgaagggaaatgagctgattccctcaggttcaagctgaattcccaactgatgataaccaaatcacaagccgacctttgaaaaaaacagtcttcacttgaggttgtttgaacaattcatcaatcctgggcactgaatattaattcttaagtgttagcttgtttaattcccgataatcaatacacatctttccttttttcacagataaagtcagagctcgttaagggtgatacactgggtcgggtaaaccctaaattgagcatcccttgaagttgttttattagctccatgaattctactggagccattcaatatggtatttttgaaataggttttgccccaggtaccaaatctattataaaatttatcttttgttatggcggtaatctcgacaaatcctcaggaaatacacccagaaattcttttacaattctgactatcttaggcccaaatgtttcaagcctgctggagtcaatcgggaccgctaaaaaaatcctacccatccactgcgtagtaaatctttagcccttgaagctaaaatatctgggattcgagacccctaagcaaatccagcataagcaaatggatcttcgtcctctgattgaaaagttaccatttcccacttgcagccaatgctggtcaaatacttggacagagaatccatcccaagcatgataccaaactctgctaattccaattctactaagttagcactcaactccctatttttttttttaccctaaatggcatatacctaacttgccttttggagataaccaactcctcgctaggcattagggttccaaccctctttcaataaagtcacaaggcctacccatttaccatattgattaattacttataatgccacatatgaatgtgtagcccccaaagtcaagtaacacagtaaaataagagttgttgaccagaagctgacctgtcacaacaaaaagactggttcagcatcagcttgagtgatagcaaacactcaaacatgtatgggttttgctttgaatctttcttctttgccccagggcaagctttcttaaggtacccaaccatgccacactggaagcatgtttttcgattgcaccctctaaaatgatgtttcttacattgaggggcactcacggtaagaataatcctgacttccacctctgccttggttccccgaaaccttttgctttgtcccaatccaccaaataccaaggtagtcttacttttctgatcagcagtggaatcaccactactcctaccatatctagaagtagggagagtaggggttccaccaacacttaaagtctcgtggggctttagaagaaattcactacattctcgctcataaagcctttgaggtatcttaagataagttgttgcatcatttgtagtggttagcagattatatttaatcttggcatttaaatttgctaagtatttctcttccttacaaaaattcatagctacttcacccgtaactaacttggctaacaatcaagctttgttgtgtagtcagttactgacatactctctggttgtattgttataatacctagcattaaacaaatcctgaatctttttccaggttgtaacaataacgtctcggatgatggacaataaattccatcgctcatgtgcatcctcttggaattgaaacataaggcaggtcacctaatcattctcggtgatacccataaagtttaagatttcccctcaaacactatgggccgcagttcgaccccatagcatctggactctttggaaaaactagaagtgccagcttgcaaaacctcatataaaggttttattcagtcaccattaacaaattgttccactagcactagcaaattcgagcagccgatacctgcggtgatggtactgtaggaggaccttgctgtcacaaccctaaatctcctctcccttgataatccaagcttgcattcctgtcaatctttattccaagttctgagggctagtgatggattctcataaccgcccctttttaaaccttccacagcctttgccgcatccacggggttcagatggttttgacttcccctgaccgcctccaatctcaacctcatcaccctgattgtgcatttcgttggacgtccttacactaggacttagcctacgaacccttacgtcaggcaggtcagacaacgatcagatatactttatgtaccatactttatggattttaaggcaatacagttagacaattaattataaactattatgttccttagcatgctttctaaatataacaattactaattatgtaaaggcttactgaaccgtgagttgagcttttctctaacgatgattgtacacgtcttgatgatctttagtagacaaacctggcggttctgatactaaaattgtaacaccttgatacttaggcgcgctaaagtgattttttaattaaggtgcctcctttgctaatcaaagggtttttctcaaaagtcgtgtcaaattaaaagtttcaatttaaattattaaactttatatacatatatatttatctgtatacagacgggatcccatatttaaacttctacaaacattatcaaaatatttttacaacttgtcgcataacgactacaaaatatagcccaacatgtcccgagaccgaacactccaagttgcaccatcttgtcctgtacaatcattgctcgagctcggaactcactcctgttcaacatccacctttccttcacctacacataaaagtagaatacgtgagccaatagactcagtaagaaaagcatacaacaaatcatatgttatcaacctgtgactaggcgcccatacacctatcacaagacttccaaatgattaagaatgttaataatagtcggtgctattgaccatgatatcacccactaccagcactatggtcacactgcaggaccgacactatgtttgtaccgctatgataacatcaataacacctgaaagtacaattggccatgatatcactcttaatcagtactatgcccgtactgacgaactgacacaatggttgtgcccctatgatagcgccaattaatactatctagggtgaatatcactcttaatcagtacggtgcctgtactaccgaaccgacacaatagttgtgccgctatgatatcacccaaaatatatacaatcacaaacacaacatgcatatataatgtgttctacgctaatcttacatcatttataaattcgagtgagttagctgacctgcacggaaaacatcacgctggatgccctctacttagaaacacttcaatcctttgctgcaacttagaagattgaagggaaatgagctgattccctcaagttcaagctaggttcgagagagggagaggatgaacatggagtcttctagctatttcttatatttttcttaaatagatcaattctaataatcaatagacataagatgaatatagaaatttgatttgattgccagttgtcccaaaaacaacgactgccacctaatccccgaatgcaaattaccaaaatgtccatgatttgaatattaagtaattataatcctaggggtaaatattcaaaagtcataacccgcttaaacccaacattctacatatctcataagtttttcctactaagaaaagaattctaaacttactcatgtgacacaaacgaccatccatcgcatgtttcaacaaatactacttttctaagaaaatgactaagtctgaaaacaaagtagcaaaatagaggagatatttttttctttgattccaaaagtgttctatcatcatattcgaaataagatagtcccactgcctctgttgtcttgacacaaccgaagaggacaatacctttttagattcttagacagatagtcacggtacctcgtcgtagtggaagggtttcaaggaactcaccctgttatgacttggaagacactagtgacaaaatccattgttagtttaaacatgtaatggatagtcagaataaggaactaagaagtaaagccaagagaactatggttaaaaccattcatatggagttaccaaaggttttctattacatggacaagaaagcaaaatttgaaaataagcctattcaatggacttaacaaaacttcatgtt

SEQ ID NO: 228321 - DNA, 1978 bp, Cannabis indica
ataaaccaagaattataggtacattttatatagaatagatataaatatttcaaattgatattagggaaagattattaggaattctctccctaaactactatcaattttaaatcgtgttttctaaccttttcccgtcggtgaaattcctttcgcaagtattcttgagttatgcctattctgatagttttaggtttatgtgatagttttgaacttttggtgttaatgtgacattataatttaattaaaaatagttaaaaaatacttttttttaggaaaaggaatctccataggcaagtcagccattatagcatgactagcaaaggagggtcgaacccttatccaaataacactaattttgtgaaccaaagcataattggttagaacatgggctatgccattggcctcgcgaaatacaaacgagataccagcaacattttcaaataacaaaagaattctgatttgatctaccaagcaatcaatatctcggcaaccatcttcctttctttagattaattgaacaacttcatgacaatcagatttgatgctaaatcattgtatgttgcggcttattcccatgtgcaatcccataagaatagccatgagttccaattgcagtggttgaaactcgtgttgtagagctatagatgatgcaaactgtacctctcccttatctcctctgatcacacaacccatacccgaacatccatctcccaatttaaccccaacgcggacatttattttcaccgtcctaacctcaggtgctttccattagcttgttcccgttgagccattgatttctttctactgctctcactttgaaaatcaacaaaataattactgcactagtccactaattccactggttttagaggaacacctccatgaacagctgcaagcctgttgttccatatgctccaagtaacaactaggaaaaattcaaattgttctttattcgagagcttagccaagcgcattaaaaaagcaagttcatcttcatgtccaatgcgcttaacttccagtttgaatccataaagtttccaaactgtatggctcgccttacattcccataaagcatggaatatagattcgtgtgtctcttttgaacaccgagtacaaatatcactacacatgacatgtcgtttggctagagtagagatagttgacagccatccataaactaatttccacacaaagtatttaatttttggtggtattttgagtctccatagcttcctccaccactccacaaacaatgatcatcagattggtttcgttctcttctcaattcactttccattcgatagccactcttaactatatattccccatgttttgtgtaatgccacataattttgtcttctgtcccccaacccaagtttggaattgtgagaatcatttctgcatcatccttattaaacacagttcgaaagaattcctcatcccattgtccattccccagtttaagataatcaacaagaagttgagaaggaagtggtggttgatcataaatcttaaaagtcacaggccgaggaagccaaggatcttccaataccctcacttgatccccatctccaattctccatttatacccttttaagatgagtttcttcccccacactaagctacgccacacaaaggacgcataatttccacacttagcctccataacggacttattcgaaataagaagccttcaacacacgactacacaaggcagtaggattgcgtatgcaacgccaatttgttttgcgagcaacgcttgattaaacattcccaaatctcgaaacccaacccccttttatcttttggtttgcataagtggtcccatttacacaaataaattttaattttcttacttccgatgacccccaccaaaactcttgctgccattctatgaaaactagaaatggtccccttcgttagccaaaaacaactcatggtatatgtcaagattgcttgaacaatagccttgataagt

SEQ ID NO: 228322 - DNA, 2907 bp, Cannabis indica
gaaagttcttatttaggatgttaataaccatacttgtgagtagatctaagatcctggtaaaataatttccaacaaggaggcccttagttggctaaaagtcaaagggtggagcacgatcgaggtggaaactgacagcttactcactgttaaagcaatctttagtaaacaacaaatgtcttctgtctttggtttgattactaatgattgtaaaattttattatcttcttcacctaatactagtttacgttttattaaatgatcagcaaatcgagtggcccattttgtggctagacgctctcgattcttctctgatcgtagcattcttgaggataatattctggctgaccttcatgccatcttgtattcaaaatgctagttttaatgaagttgatatttcaattttttttttaaaaaaattataactagttaccatttacgtaatttaacttactaaaattcccacaactatttaatatttatatattactctaattcttgttttagtttagatcatgttattatattactcatttaaatattgacatgataactagtaactaattgtaaattgttactagttatagaagttgtaattaactaactagtttcttacgactagtaactaactatttgtgttatgcgtaatacgtttcctttaatatttatgcatttttagtaaaatttatcctaattttataaaaaatttgccagcataacgattgtaattagacgttcacaaaaattttaaacataccaaaattaacaaacaaagcaaataaaataacattacaaacaaacaaaataatattaacaatacaaaaattatccatctatcctactgcagtacatgtatttgcagaacctacttcactacggttaaatatttaagatgtttaaactcaactaaatccatattatttttcccatccgaccgcagtataatatatcgcagaacctacttcactacagatgaatatttaagatattcaaactccactaagcattgattatcaattaataataaaagttagtgagcgtatatacctattcctagctaaattcagatcaacaccaaattattcagaaccttaaaaattagctcacaatcagaccggagcccggacccaggatcgggacccagacctaggaccgggactcagactcgagatcgcgaccgggacatgagcctaggactgggacccaaatccatgacagggaccaagatccagaactcggacccaaacttaggactgagacccggaccgaacttgggaccaggacctggacttgggaccaagaccttgacttgggactgggacccgaacttgggagcgagacccagtttaggacccggaccccagttcaaacctgaacccaaacccggatgggggacctgaaccaagacccaaactcaggacccgaacctggacccaggaccaaaacacgaacctggacccaagactcgaacgggacccgcgacccggatttggacccgaacccagacctagacccgagaactgagaccctaacctggacctagaccccaaacctgagaacgggaccgagacccgggaccccatactacaaatgggtatggcaaggtcatcattctcaactcggttggtggtacgcgaggtatatgtgaaaacttttggcatttatcgtatttcttaacaaattcatgtgtgtctttgttaatcgttggccagtaatatcattgacggataatcttcttcgatagactctgccaacctgcatgatccccacagaatccttcataggtttctttgattatttcatttgcttctggtggtagcacacattgtaagagaggaatggaataaccccttctgtataatttcccctcgatcattgtatggcgaggtattgattataagagtttgcgcgcctcaattttgtctgtaggaaattctccattaactagatacttgacaattggtgatatccatgttggtgaagtatctatcatctcgatttcttcctcttcacatatactcgagtcgtctaagacttccactggtaccaaattcaacttatcgagaacaaattgggatgctagctttgctagcgcatctgcattatagttttgttccattagaattcgttcaattttaaaataatcaaacttttccaacttctttcaaactttctctaaatattttgccatctttaggcctttttcttggtattctcccaagacttggtttaggattagttgtgagttgttatacccaaaatttggctaccatctcaatggaggacacgtgtcaagataaagggaatgtgaatcgatgcaattgcttcttatggaataactcattaattacgtaagtatcagagtatatttgtaacccgctgactgtaaggtcttaggcgaggaatcaatgtacaaactgacacttagtatattagcgagaaaccatatgtcgctatatgcaaatagtgaggcaccaaagaaagcgacacgtatcaatcgtgaaagtccttagcatacaatgtacaaactaagtgtaaaagtcggatcggctcaagaacaagcaagtgaggtgcccgtctcggtatgggaagacttcatataatttcaccctgttagcgtcagcgaggcttacaatcctggtgagccagaagataacattaaaatgagccttgaagaattctttgtaaataagaaccccgatcaacactagacgtacatcgtcgacctcggaaggaataatggcccaaactcgctattgagatcattggaaccaagtttctatctagacatctccagatacaacaactaaaaacgtgtttaatacacaattgttttgacctagtataaggggaaaatcacagctatatgatttttaaatcataaaccgcatttacactatgtgatatgta

SEQ ID NO: 228323 - DNA, 1926 bp, Cannabis indica
caaaacattttactttatcattacttgttcttataccaaaaaacacctttgtaaagaggagactcatcatcactctcaacatagagacactcttttgcctctctccacacagctttaattattggagtctcatctaaacgataatactctcctaatattggcttcacagctttagttgcttcaactgcattgtaatatggtattgtggggaataaatggtgcacaacatgagtgtttgaaatgttatgaaaaatactattaagaactccaaagtctcgatcaactgtcaacaaagcacctctcaaccaatcccattcggacgagtcatagtgaggcaatgcagggtgagtgtgttgtaagtaagtgaccaaaacaagccaaccacttactaataccattggtaccccatacactaacataacccaactcaaccctcttgctaaggcgagttggtacaacacgaatatggtgatgaaaactcccacatcggaaattaatatttgaagcctttcattgttggagtatataggagagtaaggatcataatgagaagcgaaacggtcatattgtctgcctaataaattgaaagttaagtatgaagggaaaccaatagttaataaaaaaccaagggttaggactcttcctaatggattgtttaagtatttggagaaccatggcatttgagatttcgtctttggaacaaaagcttcatcgcggttaatggagccagtgtttgaatggtgacgacggtgactatacttaaatgagaagtatgggagaagaattgcagagtgaataacaaaaccaaccatgtcatcaatccatttgtagtcactaaaggcatggtgaccacattcatgaccaatgagcccaaaagcaaacaaagcgcaaccttggaagatccaataaagtggccaagctaagtatgggagtggatgggggagaaggtggaagtaagaggttgctaagtagtagaacaaagtgacatagaaaaggtctcgaaagacataaaagaaggagcgaagaagagagcgttggaagcaatggggtggaatggctttcttgatttggcttagtgtgaatggtggtttagtgtgtggtgctcgctcaattgggctattattattgttcttactatctttcaactcggattttggctcgagcattcgactaccaactcccatttttgcccctaattaagaaaaaagaacaagaaaaagaaaagaacaaaccgttagactacttcaaagtgagctaaaattgccttatttaagtgcaataaggaggaaactttggcattttaggaccacatataatttggataagagtatcaacaatgtaagcaatggatgaccccatattaaatattttattaattttttaaatcaaattgaaaaactaaaaaatataagttagcattgacaactgtaaataagtggcataaaaatatcattttgtgaccccacatagccctactaaaataacaacatcattgccgcatcactagtatttaacatcttctatatgtgtctttttacgattaattagcgatattctttaaaaatttacatgaattttgttactaattataccaataataatattacaacgacaaataagttagacactgcattttaacgtttctgaaatgacaaacaactttattaggtattgtcattggaattgatgtgtgtgtcaatttcaaaaattttagaataaaaacagagttattggcagtggacagctccattggcaaattaccaaccatgcaaaaaaatatattgaaaacaacatatcaattttatacagaaacagattataaattgtataaaggcatatatgtctgtctagaaagaagagaaaaaaaaacaacaacaagaagatttcattgcattaatcaagtattaaaaaaaactgtattatctt

SEQ ID NO: 228324 - DNA, 1063 bp, Cannabis indica
attgctatatatgattccgacttgatcgataatctttacaaataatctgttttgaaaattcaaacaaattgaaattctcaaccagttgtttgaaaattccatctcggatgatgtccgagacaggccatgcattatagtacacaaagtaaaaaatgagtaccaaatgaatatattgagagcatgcatgaagatgaatattgtccttattataatgtcatgtgatagtattgatatgtcatttagtgaaccatgtaataataatgctaaattgagtgtagaaacatctcaacttttcttcttatcaacaacaaaaagaaaaatactatctaattataacacaatataataatatcatgatcattattgtgtgtaatataataattagaaaaaaaattataattaagattgatgcatgggtaaattaactgacatggtattccattattaaaaacaatgacagtgttggtggggcaattttgctggttggaggactctacagcgttttgtggggaaagaagaaagaagataatactaataataataataatggtgaatgtgataatagcaagagaagaagtgaaacaaatgctgcccaaagacaagaaagtaaggaagaaatattatctaatgtataatatcatcagtgcattacacatcctacttgactcagatggataaatatatatatatatatatatatattatgaactatataaatatatatatatagtagtagtagtagtagtagctagttagattttattatggtgaaaaaagaaaagaagaaaaatgtcactacccaccatatgaaaatcaatatatatacatgttttatctttacagttgcaatataaagtaataactttttcttttggtacaaatgtcctatgaataatatatatatgtctagtcttggatcccattagttattacctttttcaaaataacaatcttcttgttgtgtttccattctttttgtttttatttggaaaaaaaaaatgataaaatgaaaatggtgttggtacaacaccactatacaagatatataatatattatttcttt

SEQ ID NO: 228325 - DNA, 912 bp, Cannabis indica
gaaacgtcattgtattacgattgcctccaaattctaaggaactacgatgagagaattcgttcataatctaacgaatacagaatcaatgtgatattcaccaaaagcacagagccatatagtagccacttgacaaaaatcaaaaaccaaaaaccaaataggacagacagaaggagaagaactgaaccttttcttgctcttttttggataccatagcagcttggcgaaagaattcttgttcttgagcatactgaaaaatggacatgggtagaaagttaagaaattgaaaaacagggttagtgatacgaaaaactagaggaaaatgaagcaaataagtacctcgcgagcgacctcttcggctcggcgttcgtgattggcgtgggtctgttcggcgatccatttgcggcgttggttaggataggaaagtgggtgccacggcttctggttcaggtacgagtggctccacgcggtgcctgacttggtcttgtaatcgacttctcctcctttttccgaagggaatctcttgctaagtcttatcccttctccttcttcaccttccatttttaccaacctctcgagttctgcaaccaacgtatattttctagcaatacctttgttcaaacatcagaggtttaatggcgtcaacgatctttacattgaatcctacaaagtaatcggagaaaacacagagaatattggagaaaactagattgaaggtatgaagttagaaacgacgacaaaggtggaatcagcccatatccatgggcatggctacgcaaaaagccctaatttgcagagaagattcaaaaaccggaaaacccacgtaattaaaatgggcctgattttcctttcttatcaaaaaatgggtctgaattaaaaaaaaaaaaaaacaaaaaaaaaaggaaaaagtaatac

SEQ ID NO: 228326 - DNA, 2733 bp, Cannabis indica
cccagaggcaaatttttgtgcatggttaaggccacatgccaaacatgttgcaatgctgcctttgcattcctatttgaaagaaatagccaactactatcacatatgttcgacctagctcacccccaagggcctaaagtaccttgccgcactgtttgtgctatatgctacccaaagatggggttagccatctgcccacgataacaactaatattttgacctgaagtcaacctaaacaaaatagatttgggtacttctacttttcccaaaatcaatgtaaatggctgaccgacaccacaaacacggatgtgtcaaagatttgcaggtttgtagaagacatcggtactaaccacatcacttctagcatattccatattattacaatcctactttcactctgggtcttagatcaagagcccaaaaaaatactccaacttctagagtcggctcggaatatttcacactcggccattgagggtaatttcattaagtatgggctctacccatccgatgaagttcaggagcctgagcaagtgactgaggaggttataactgagtaagaggctccaaagaagaagagaaagaaggcttcctatagtgatcaagtaacgattgagtggcccataaggattagggatgacatcgaggaggttgctcgtccttctgttcaggtggtaggaaagggaaatgtcatggtggtggaggaagaagaggaggactcttctgatgaggataccccttcattacttgtttgagaaagtgctcttgtcgacgtacaaggtagtttatcattctattttaaccttatttgtccttgtttgattatgtttttaacaagtattcattcttttaaatgcaatcaacaccgagaggagtttggctgttgactccacggatgttcctgatattgctcttgaagttagtccttcgacccacaagaatgcaaagtccaaggcctccactacctcggccaaaaactctaaagagactaacactgagggggccaggctgctaaggtcattggctactctgcccatactctagctagaaactaaaaaggttaaagaaatgctcaacttctattaggatagtgtgatgcctgaagtaaatgagaaacttacaggggcagaggagattccagtggagttgctggttggtggagttctgaaggaggtcacctgagtgagtgctttgctttttattgtttttatacaggtttcactatgtgtgagatttaactctgtattatcattcaggtttaatatgtaagttggcatacacctattcttgagcaaaattcgctgctctaaaaagccataacaaactactaagtgaattgaagaaggctctaaaagatgctaaaaaagaggctgagacaaaaaaaaaaaaaattcagttgggtgaactgaacaagcaaattgttgttgcgaacaagcttattgaagatcttaggaaagagattaaggaaatgccgtccacaaccaagcttgaggaggaccttaaggcgctgaccaaaggggtaaatactccgaaggatgaaagtgaaagtcttcatactctccttcaaaaccaagaagccaaggttatagagctgactggggagaaaacttccttgcaggaaactcttgatgttgtgagggtaacttttggtgccgagtgggaagcacttcagaaggaagttgagagcttggaaatagtttccttggatgttttctatgagttctggaaggcaaatcctgaggtcaactttgactatctcaaagaagatctctgtactagctttctcagcttgtttgaggcacaaaagtttaggaagaagcaaggctggccaaaaaaacactcgtctaccgtcgaagagcatgagaaccttaatgtcgctcaagtttcatccgatcaatacaaagaacttgggactcttttggagtaatattttgaaacttcttttatctatttggcccacaggcctttcctttagtacaatatggccgaccaagcagcttttgaatttgggaaaatgttttcattttgtttaggacaactggctggccatacaatataggataagtgtgagattaaaattgtatggccagccagttgtcctaaacaaaatgaatattttcctttaagtatgaattcaattttttgctttaagcttgttttttaccaatgcttgtataggtatagctgccccccaagtgaccgagcagacttttgactcttggtcacctgcatttctaaagttttattttacctgtctggttcacacaccttaatgatggcattgagaaacctcatctatacattacaccttccactattatgtaccgtgaaacctttctcatcatttttcaagcctcattcctgttgctcgaaagttttctggtattgagataggctgctgtgggagtcatccagtttggtgcgttgtctatcatctcgattttctctgtgcaagtgatgctaggttctttcaaaaactaaattgggactaggttggatttatctataactgtttgcttgccagccgtgctagtgcatcagctgttttgttttcttctttttggatttgcgtgagagtaaaacccttgtacgcattttaggtaattagataatttgctataatttgcgaaaaatgtataaaagttacacaatttgaatgataattaatatctctattcatatataggttgatatgtgctgttaccgtggcaacatatatttattgaattataaaag

SEQ ID NO: 228327 - DNA, 1626 bp, Cannabis indica
aaaggtttatttacttttgttaccttatattatataaaatatattattatattaaatattgacttgaaatattatacaatacaatacgacataatagaaagtatggctaactccatccttaattaattaagagccggaaagagttgtaaaccctttttcttgtctggattccaaggatagcaataatcataggcttgatgattagaattataaagacaaggtccagtgggaagaataatccatgagtttatatgataaacaaatctatgatgagtcttgtagatatcaaaccaatgaaattctcctttccatttaaacccgcaaaagaagagagttgatctccaaaaattaggagtaaaagaaaaccgataactctgatcgtatttaagaacatgaacaccaagatcatcgtttttcgatttgcaatgaacagttaagtccgattttttcacacggttttttattataactacatcgcttgaactttgtggcggtgtaggcaaaggaatatcgatatctctacttccttcgcataataaggaattattatgatctaaaattgaagaaaataaaatgactaaaacaaataatggaattatcatttggctttgatgatggcgattgttgttgttgattatcatcatttttggtacaaaataataataatgatttacttttctcttgttcttgtttttatagggttgtaaaaagatataagaattgtcccaattaaaggagtttgtctaattaaggtgaggtaggtaggtaacaaatctatttactaataataatggaatttatctcatgtatataaatatatataattgtttattttatagatcccagcaatatttttctttatttagagatttgaaaatagtcaaatcttaattttctatatttgagaagaaaaaaactaattaactctctatcttagaaatgtttggtgtatatgtgcattaagagaataatttaagaatatattaataaatatccaaaaataataaaagatttacaaaaattaaggatttatagttttttagatttttttacagatttaaactattttttttacaaaaatatgaacagttatttttatgttgtttttacaacaaaatcttactttaaattaatattagtgttgaatggttaacaaatattcttataaagaaaatagtaatttttttaaaagtaatttgtggcataaatacttaagtttaattacgggttgtaaataaatatctaaatttaatttttagcggtaataataagttatatttttagaactctgtaagtacctgatcaccattaaatattaattcattattcacatgtcatttttttatcggtctatttattttttaaaaaaaaaatcaataacttggactaagtaattaaggattgtcacgtggtaatttatttaatatttaacaagtaggtatctacaaaaattctaaattataacttaggtattattatcggcaaaaaataaacttaagtatttatttacaactgggatttaaaaatatttatgccgcaaattactgttttttttatgttgtgtcgtggatatgtgattatgtcaaccaaaagatatgagataaagatatatgatagagattagag

SEQ ID NO: 228328 - DNA, 2691 bp, Cannabis indica
aatagtgaaaactaaaataaaatgtgagtttgaaaggttttattatcgaaatattgatttgtagggttaagtgtcacaaactccaatatcccaattaattataatatattgaaaaatgttaatggtgcctaagtattaagtatattattgttattggtataatttaatattaaatcttatttattttatttcaataataatttagaaaattattaattatttagagggtacaagcttatgacgatgaacactatgatgcttaatattttaacataagtaataaaaatatgtttttttaacaaataaaatataagttaatttacatattgacatcaatatggttgtactaaggtgtaggctaaaataatagaaaaataaaataatatgtttatatataggtgaatctcattattgaaattagttaacatattaggtgttttttcctttttctttcctgaatggaaatataactttattaagaagacaaatcgcctaataaaatagatataaactcagcaagaataatacttccactgaaaatttaatttgggaaagaacatgaagccatagcaaaactatcagtcactctgttagaagaacaataaataaataaagagactccactcaaagaattaatcaattgtttgcagtcattaaccactagttcaaaaagagagttcattaacaactgactacaaattgcctcagctgccactaagcaatctatttcaagtaccaccgcctgcaaatctttatccctaatctaactgagagcctcattgatgtccataatttcagtcaactcaggttccatagccccccactatctgcttcaataaaaccgcccagatgatcccaagctaccatgccaattctaaactgatggtttgcagtggacaatgtagcctcaatatttatctttatttgattctcttgaggctttactaaaccttatcaccatcttgtgccacaccactaggtagtagtgtatatttatccttcatttaagtattcttctattgttcaagatacaggtatgatggggtaaccgcatcattcacacttggaattctcttattctaaacaaattaattttgcgcccaccaattagcctagaagatcacgaccaacattccttgcttctctttacccactcgagctttaacctgctaaaattacccccaacaacaactaccaaaccgatactgagactagctctatctagacattagtgtgacagtcagagttccgtgatccgcaagggaaaagaccaggagctatacaatctcacattacttgggaaaggtcaagtgttacgattctgagattttgtaggtatgagactacacagttaaagtgggcttaaatggattgatatatactacctatagtaacaaggtgcatcttgttttcttgtggcccatcactttagaactccaaagttaagcgtgcttgacttagagtaatatagggatgggtgacctcttgggaagctttctaaggaagcatgcgagtgagtataaagcacagtggaaacactcatgttggtttatagggccagccgtcattctaggaagaaagcagctaaagtgacgtactcgtgtataagagctatacgtctgtgggacggaagcccaatggaagattgaagcgagtacgttacaaatggtatcaaagccttgatttagctgaaagtgtggtgacaaggacgtcgaacccccaagggagtgattatgacagttagagtgttgtgatccgcaaggggaatgatcaagagctatacaatcccacattacttagggaaggtcaagtgtaatgattattatgagactgtgtaggtatgagactacatagttgaaaagagcttaaatggattgatggatactacctatattaacaatgtttgtcttgttattttctagtggcccatcgtttaagaactctaaagttaagcgtatttgacttgaagtaatattgggatgggtgacctcttggaaattttttgaaggaagcatgtgagtgaggacaaaacatactggaaacatttgtgttggtttgtagggccagccatcattccaagaagcaaccaaattgacgtatctgtatataaaagtcataagttcgtgtgggggggggggggggggagggggcgggggaagagcaattgaggcttgaagtaggaacgttacattcgaaaacaaaacggacagagaataagactatgaataatagtctcatcatcacacaaacaaagagaaatgtctttgaactgatacatgtttcaaactaaactgatacatcgtgggaagacactaagtgcaagcacaccatataagatctttcacccttgaagggattttgagttgccaaattatgacaaaaacctagagtttggatcaacatcctgataaccgttaaactattataataactgataagcactcttcactaatttaaaaaccggagacctccttactcaagtaataactatcattcatggcctcttacattattcttatttctcacatgttcaaccattacaatttgttagttttattataatcaaccatcaatcatttttaaatattatctccatcaaagaatcgatgtgcattcttggactattgtttgacatgaaatatataaatcttctagttaataatgtgagtattgaatcgattactcttaatc

SEQ ID NO: 228329 - DNA, 1625 bp, Cannabis indica
aaagagaaacaacaaaagacagagaaattaatacccacatttattgctgtaagacaccgaatatacagcaaatgagaagaaaaaccaccacatgaacagtatgggtggaccaaaatccccattgtagggaccagagttcgacaaggagaaacgagtgttctcatacttaccagagagttccagagagaaaaagacgtttatttgctaattgttggcttgttatatatttattgtttgaacttagacgttctccactaacaattattcgatacaacattattttctaaacaaaattttgtgtcttatatccttgagtttcgagcttctccaaaagtctctagttattaatttttattatttttcttttattctacagtttaaagcgtatgtatttttttttaaaaaaaaatttaaaacatatataaattaccatcaattatttccatttctttttttttttggttgaaagggaggggtttaaaaaccccattcattgaaacaaaacggccaagccgaacagtactactgacacaaaactaaccaaaaaaataaacttttagctaacaaacaacagcaactaccaacactacccactaccaaactaaaagagacccaacaacacccgaaggcacaaaacttataccaacattaatcaggatgccattcttgaacatcagagaacacattctcatccatgattcccaaatcaagaacaccagtagccccaactgcagcagcccactttgcaaagttgtgagccataaagttgtagattctgtcaattttcctgatcttgaaatcatctagtagcctgaccgtgtttctgaaccggtttattgcaccttcaatgccaataaattggttcgtgttgcaagtgatcgagcaatttgcaaccacaacttcgttgtcacattggaaagccactttccccttcagatgctcccttgcgtactcagttgcattggccaaaatggtcgcttctgctaacagagggttcgtagcagaaagtctctccgcgaagattgtcacaactctgtcctgctcatctctgaaaacaaccgctccaaaagattggtttggctgaattgacacatcagtgcagcaattccaccatcctgcttcggacgtgcgcagatgacctctcttctcgttattcggtttccatctggataagtgatcattgtatgaccgatgcactgaattgacgatctccgttatagggcggagtctcgtaccatgtattactccatttcgagcctcccagattgctttaaaaatacagagggcccctgtcatgaattcatcaaaagacaaaaggcttggtctatgattattatcctggaaccaagtcatccattctgtccaggagctacgaattaagaaattagttctcattccccacatacttccaaaccatattgcctttgcaaagtagcaatcccaaaacaaatgtaatgttgattcctctccttcctcacaaatgggacattcctttgattggagagataaagctattccaatcttttctctagtagggaaagcatctctcattatttgccaccacaacaacttcaacctcccatggataggcgaattccataaaattctccaatcccaagaggtat

SEQ ID NO: 228330 - DNA, 1871 bp, Cannabis indica
catgcaaaatttcacttccttaaacttcaagaaaatacaaaagaggtacaagagctataccttggcttggatttacactatgagctgctggaaaacacagaattgaggaagcaaaatcaaaagccctagctgctctaagggtggccgaaagagagagagagcttgagagagaaaaagtgattttctagcttttctaattttgtataaaatgagtaaaagaatggattttcttatttaattgaattgcttcagccaaactaaagaataaaaatcagatttaaaactttattaaaaattcatacaagacaaagcacatatgggcaaaatgatctttttgccctctcacattaaaatgacataaaaagggtactaagggtattttagaaaattctaaattcccgactaaactcaacaatctccatgtctaattctaccgatccgctatactaaaataccaagatgtgattctactgagccatacaccgcgttccaatattgtcgggcaccgaacatgcaaaaatatgaaatttctatatatgacatataaaatgcattctgaattcaaaataaatcaccataaataattattttaatatcaataaataattttcataattaaaccctaattatctgctaattcctaaatttaaactaagcggtctttacaccgaggtttctcggtcaaggggtagacaaatcccattttcgtctgagctacgcgcgcataatgggttgtgtgcagcctctcttggcagcctgggcactcaaacaaggtgttttgcttagcacccaaaaaatctaattttttgtgattttttcacaaaatttcaaaaaatttcttttcaaaatcctaaatatcaatataaaatattattcttaatatttgaacataaatatcaaattttgaaattaataatatttaattattttaatagtttattattaatttttgatattttgaagttttaatttaaaaattagttattttatatttgaattatggttagattttaaagtttgttaatttcttaaattttacaaattagattagatattttaatattagatatattttaaattaaaagatatttattttatctttttaatttaaaatattatattataaattatcttatatgataaattatataacaataaatttgaaattaactaagataatttcatagatatcctaaccataaaatagttgttttatgatacaatttattatttataaatcataagttagaaaaataatatttattacaatgttatatcattttacttattagaaatttataaataatattatatatatttaaataacctagatatttttgtaaaaatttataaaaggcttaaaatgagatattttagcatataattttgaaaattatcattagtttattattttattattaaaatagtactttcttaaccatatctattttaaaattggtttatttgattattttaattttattaaattataagattagaaaataatatgaaaaatatctagttggttatgtcatatcatttatcttattaaatattgaatttaatttgataaaataatcttaataaaacctagaaattttaaatataattaaaattagaaatcctgaaaaagatattttagattattttaaaaaccctaaagttttaaaaattattgattatttaattgataatttaattatataattattaaatatctcaattcacatttgttacatatttgtttgtttatttaattgtttaattcaaaaaattttaacaaacatattatttatttgatttaaattgctaggattaacgtgttgataaatccaataatctaattttaatcatagtccaattgtcaatag

SEQ ID NO: 228331 - DNA, 1159 bp, Cannabis indica
gggattaatgtgaggagacacagaaagagagacagagggtgcgtcgacgctgttgacattttcaaataacgtggtcgtccttacccctttagttgactcatgttgatgatgatgatcatcttcatgttcatgactacttgtgttattattagtagtagtgacaatccggtcaagcattgtccatgcatggtctgggtcttgatcagtgtccgaccttccagcacctacctcaagcccagatgtctgctgagggtcacaattagtattggatgggtagcgcaagggcagagcagtatcgctgccactctcgcagtcccgagcagggccagcgggggcgtagtgatcgtaggatgatgcaggcaaaagaggagtagacttgtgaggtggaatgaggttatggagtagagatgagctattgtagtgagctgtcgggtaagtagtgttgttgtgatgaagagccacgttctgctgttgctgatgttgcatcatcaaattaagatgtgggagttcagtggtactttcctgatgttgaggttggcgaagcatttggtagtactgctggttgttgtgatctgatcggatattgaatgcgttattattggtcatgctgttattgtggttcatcaggttgtgttgatgatgatgatgatgatctgatgatgataaattattggatgaggatgagttgatcatcatcatcatattggcagtagtagtagtagtgggtgaagtgcctaattcattgttaatattaagatgatgagaattattgttaatagtattatgattatgattattagtagtagtagaggatgatgatgagagtttgaataggtttttcttcttgaacaccctgcacaccacccaaccatcctcatggtgatcaggctggttgtcttgctcttctagccgatactcgtgcattatccagtcgctcttctggccgtgaggagctcttcctcggtagaaaaccaaggttttacgcataccaatcttcttgaaggcgttgcgaatgcacttgtctcttcctgtggccttccaaaacccagcgttggtcgccctattcgtccgagacccagttggatacttcctgtccttgtggctgaagaagtaccattcgttctgcggtgtcgatcctattctgcatctctctgcattt

SEQ ID NO: 228332 - DNA, 2002 bp, Cannabis indica
  modified_base (1134)..(1134): a, c, t, g, unknown or other
taaataagtaataaagaaaaaaaaaacgattagatcttgattctccttctcactcccgcttcatcgttctcctctccctctttcctccggtgagtctttctctaacgttaatggtgcattgttgtctacccaaaaccaccacgatgttttctctttgttgtatgcccaaaagagcactaaatggtggtcgttctctcttcgaccgtctacccatatgaaaagcgtctaattctcattccctctcgtcctcttttttgatcatctatctcatcttctcttaacatttttgtgcgagaaaccaccgtgtatctgtccagattgttggtattggaggggttgagtggggtacaagatctgggtttcgatactcaaaaagtggggaagaagagatgaagacgacgatgtgctcgtagggtctacataaaaattgggttgagcttcttcctgacctccttccacactctttcttcctccttctccacagtgttcttcttcttcttcttcctcttcctctacctctagtaaaccagccctaatcacctagagcccagatccctaaaatagcccagagccccaatcaccgccttttttaataacaactgtcttcttcttcctccgtaatcgccactgtcttctccttcaacctcttcccctagaaagccagctccaatcatctagatttgaagccctaaaaccacacaaagccccaaatcacgttcttgcattccccttagcttctgcttctcctcttgttagcccaatgttaatgaatatgtctgaatgtttgccgccgtctactttaagaataaccccaaagcctgatggacttctgttgcctctcctaatgagcccaacgtcatggaatctccttcccctatacctgacctagagaaggatgatatcaaagccttaactaatattcttttttttcttttcaattcttctcggaaaaaacgtatctaatttttttgcaacctataaatagtgtttattgtatatgatttgatttttaatatattattattagttgattatacctttactttacatgttttgttattttgaaaaatcttgattggttagagaattgtattttgataaccagttaaaaaattagtttatgccgagataagngtttttttttcttttttatttattttctaaaataatattttaattaccttttaaaataaaaatagagatggactaataagagcatgacatgtggcataggaaatagtccagttaacatttagcatattagtagtaactgaagtagaaaaaatgtaacgtttagtatttaatttgtagaaaagaaagatgtgatatttaagtgtatgaaattaaaaacataaggtatttatgacgcaaatatcctttattattattattattattattattattattattattattattattattattattttttttaaaggtaaaaagtttcaatcaccaaacactaaaagcaacaagtactttaaatggtgggaacaagaatttattcaaagatagcatcctctagcaacaaatccacaataaatcttgaatattaagactccttgccaccaaaacatactattacttgtatgaaaataagtttgactaatgtatgagcaacaccattacaagacctattataatggataaaataacaactttgagcatattataaagaccaataatatcatccaatactagacccaaagaagaaataatagagagattgttttcaattttaaacacaatattcaagcaatcaaactcaataatgattttcaatacccgaaagaaagacattgagataaagcctttctaatagccaacgcttcaatcaccataggcataaaacaaccatccaaacaccaactcaccgaagcacgaacaactcaaacctcgtctctaattacaatgcccaagctactataattgcccatagaactaataggagtgcttgtgttaacttgagacagccaataagggtccatttgggagc

SEQ ID NO: 228333 - DNA, 1376 bp, Cannabis indica
ccccgacccgaaccgcccaaagatatgagagtcatcccgaccactaacccgagttataggcaggcatccctagatacgatcgactgagatataagagtcatcccgactgatcgagtgaggatatgagagtcatcccgactgaccgactaagatatgtgagtcgagctgattgaaataggctatatctcaaaaatgaccgtgataggtcatatctaagactagtccgagataagatagattttagactgattcaagatagaagagtccaggactgaatcgagatagacaccttccgatccgagataatatcctccttgacatgatttgagatgagaattattttagatcgatcataattagacattattttgactcatccaatgcacgttaaccactttatttatattcttgtatcttaactcttgatcttgatctttcttaaacttttttattatatttttctaatctttcatgggctttacctgtatttgtttattagacatttttctatatttttaatatggacctttcattggcccattgaaatttcccatggagtgtagggttaaataaaaaaaaagaaaaaaaaaagaaagaataatagaatatggaataaagaaagtggtgagtgtaaaccatgaacaatgattggagataagagtggtcatctgatccaatttaatattttttttgtcattcgatccaatccaattaataattagatttgaaaaattatcacttgatctaatctgattagaccttaaaatctaatccaatctaattaattattaattgaattggatcgatttttattaagatatctaagtacacacctaattttttttatattaacttaaaaatatgaagaaagaaaatacgtaaaaaataaatatcacattttatttaagtttaatacttcataaaaatatcattgttacaaatgtaatgcaactaaaactttgaaataagaaaacaataatattatcaaataataaaatagaagggattattttacaaatacacaaaaataataaaaaagttacaaaaatagagttgtacggaattttaaatatttttacgatttttatgattttctttacagaaaatatagtcttttgatgtatttttatgttgtactcttgttaatttattgttgattttttgttatttgtatgttatttattttttttttgttttattgttatttagatgttattttcttgttactattacgtagtagttgttgttttcatcttatttttatagataactgtaaaaatatatatatatatataaaatctttaaacgtaaaaatgtaaatttttacaaaagatagtgtttatgtattatttcaaaatagaacaaaatatcatgaa

SEQ ID NO: 228334 - DNA, 1859 bp, Cannabis indica
agtgtctcatagatttattggataacgagataagccttcatttgattctccataggttgaaatcatttgaactagccattcaaactaggttttttattgcttgaatctaattcttgaaagtttgagtttgattcttgaaatattaaagatgaatcttgattggttgaatgtgattattgaattctaaatcctgagctgtgataccatttattgtgaatgatcaccctcaaaacccgattgttatagtagtaataatattcaagaaaacacaattcaaactagaaccaatcacaaaataaaaaactagaacttatatgaaattagacaagaataaactttgctcgagaatgaataaattatggatatttattgattgaataatcagtagcacgcaatgaaatatgtccaagaatacaacttaacacaatgaacaattacaaagaaacgtcttataatgagaaaaatcacctcaagagtgatactcccattacatccctccacccacacactcacactgatcttggactttctctctctttaaaatactgaattatgagcattggagattatcttgagagagtagatgcacttctatttatagatgttggtgagattctctttaagttggtgacaaagctaactgttataactaacaactttctttagattcttcctttaagtgaaaagatggacctgctgactttgacagattaagtgagtttaatcctaaaaaatgcatataaattcaagaaaagacacttaagatttgagattcaatttaagaagtaacctacacctatgcatctttagttttgtaagagacacatatttgataacatatcaatatacaaaaacatgtgtaattaatgtttgtacttttatgtgacttaacattagaggcaaattaagtcaggtaaattcaaataatgtggtatcggatgaactttgtatataggctaattagaatttttgtcccttaacattgataagtataaagttatgccctctgaacttttaagattgttaaaaatttctcttgaactattgagattgttggatttaagaatttttatctaattttagtaagaaaattctaatcaagggatataatttagtacatgtcaaagttcaagagacatggtttgatagatatctaagtcaggggagtataatttagtatataaatcatcactgaattagtaaaaattcatgtaattggacaaaaattcttaaatctaacaattttaataattcataagaaatttttaacagccaaaataatttaagaaatataatttgatacatgttaaaatttaaaatacaaaaattttaattagccttttatataatcattgagttatatataaaagttatttataacaatcaaattctttcttttgatttaagcgtttatatattttataacatgttttatctgggactcgaaccaggacctccaacactcacacacccacttatggtcacttgagctagcctcaagtagtttataacaatcaaattcaaaaccttagtaataatgattcttacattagttaacaaaattaagtgaatttatatcaatacattttgtgactttatgtacaatattttaacatatatgagtattttctaaaccaaaatattctttttttttgaataaaaatgcaacttcattactttaaatcatccaaaaccaacgaagaagttacaaaaggtaaagtaaaactattaaacgtacgatcaacctcaagtagagaggatcgcgccaaactatgcgcaaccctattcgcggatcgcttcacaaaactaagagagatgttaccaatcttggcacagaaagccttacactctgaaattat

SEQ ID NO: 228335 - DNA, 1070 bp, Cannabis indica
tttaatcactttgtcaaaaaaataaaaataaataacaacacaaataaaaaaaaatcgtaaaaaaataatagtatgtacgtttttttgtcatcttcttcaacctcacttcatcgtcaaaaccagaaaatttctacaacagagccctaatctcctctctttctctcttctctctcccgatcccctctttctgacgaaggtgtttgaatggccaagaccttcgacgacggagaggaaggtgcttgaacgtccaggagcttcgatgttcgcacccgaaagtcgtcgccgcatattgagtttttacaggttggtaatttgttttcaaattctcaatccaaatccttttctaaaataataaacgagagatctacgttttcattaaatccaaatacagatcatgactcatcaaagatcatctgcgtttcttcattcaataactccacagccaaacttatgtgttgtactcaatttaaatttctgaaacaattccttacttccattctatcttgagcttaataattattttacagatttatgaaatgtgtgtgcatgtaaactgtttgatgaaatttctgaataaattgtatttgcttcaaaatgttttgagttatatataatgtgtttgtgtcatggctgaaatagaatctctattaaattataaatttgttaaaaaatattaaattaaaaaattgctcttaaattagtaacttaaaaataattaagaatgaaatttaaaaattaggtaacttgggttggtggagtaaggctgtagggtataggtagtcattttcttgtttaatgtttttatttaatttaattttggttctttaatttacttaaaaccattttttttatttatttttctcatttctttttaaaaaattaaggccatctctctctcttcctttacctcatttatttttctatttactcttgtgtaaaaattctaactttgatgaatttttgaaggattgggtagtgaaaatctagttggtgaggtcccaaaactgaaagaactcttagctcaaaaggttgagcacagacaaaggtaaaaaagcacacttcatatttac

SEQ ID NO: 228336 - DNA, 1292 bp, Cannabis indica
tgaatatattaagaaaggatcattcatgtcccagggctagaccatcaaatcgatgtgaagcagagtcgagtgggacgataggcgtagtgctcaggtatcagtgcctaacgttcaaggaaggaaaaactgccacagtatttctattaaccagaccatcaaagtggaagagttaaatcccaaagacaacatgtcaacaacaaaccttagggacaacttaaatgcaaagagagaaaaagccagatgtggaaaagtcaggcctcgtagaggagacctcaggaataatataaataagtaaatatgaggatgtgatgtcctggacaacaacactagaaggctggaggatcaaatcattgtcttaaccaagatcacggtccgtctggtccgcaagcaaagttgcactgtgtctaattcagaagataaagaactggagccatttattaaaagaagtttagaaacgtcgctaccagcacgcttcagcatgcctcaaattgacttatatgagggtaggacaaatcccagggttcatctatcccagtttaataagttgatgcaagtggcactggttagcgatgatgggaaatgtttatgcttctccttcactctagttaaatttattgaggagtggtggaagatgtttttagggtttatgcctagaaaagcctgtaaagatttttttgattattaataagagttgaacattttgatatatgcatgaatgttgaattattaatattgaataatttatataaatatcaaaaaattccttattcatgcatacatgaggttgtcggagaattaagatcacatagccatgaatatgaatctttaatcaatggttactagtgtagtttactgttaaccgttattcggtgcaagtaatcttgattcggattactgatgtagcatgacatctaagtgaaggtgttgtatataatagagattatatgtgataaggacctatatgaataaagatgttgttatcctacttttttcccacgtgacgtggcatgtccacctaggcaagattgatgtcacgtggagtacatcctgtcagtaagaggaccaagttatcatgcataatgtaccagttgacgaagagtctaaatactcaagcgggacaaagatacaaccaaatggccaaccaggagggtctggcaagaccaccgttggccgaccataagatggtaagggccggcgagcctctaactgttgagttttatgccctaaataaaactcattttgatataatcagatttacttattaatatagatcagaaataacatttaatgtt

SEQ ID NO: 228337 - DNA, 3095 bp, Cannabis indica
cagcaacaacagcaacctactttggtttgcccgcagactcgacaatttgtggagatcttacatacactgcagattggacaaccttattaccctaccccgccggctccttaatctcgtgataatcccgacggttcaagacttagctcgaatgcagataaatttctggaatttactaatttgaacaatgataattaggtttttttaattatgtaaatttttatgttttaaagtttatttgaagacaatttcctagttttatttaagttaatagtttatattgtaatagacaaattaaaattaatgttatgattaatgtttgatttctaattaataatatatttataaaataattattaaatatattattatataattataattaattttattatatattaaaaataataatttttttatataaagaaatattaataccggaggaatactaaatgtggtccgccggtattaatgtgtcagcgtataaaactgctgacactaatatcggcggaccccaccgctattaatctgccggtattaatattattaccggcggaagtcccttttggtcgctaatagtcattaatagcgaccaattaatactggcggataattaccggcggtttagacaaaattcttgtagtgtataatcctttctaaatctatgaaagaaaaaataagcaaataaattttatgaaaaaacataactctaaagcaaagcaaaaataaggtgtgttgaaatgaaagttggtggaattcaaagtgttatacagttgatacaattgtaaaaagagtgaaaaatgatgtcaaatatagaagttagattgtttttgacaaaaaaagttagtaaggaggataaaaggtggattaaaatgttgtaaatagattggtttttttagaaccaatggtgaataggttgtaaaaagatatttgatgcaatacaaacttctctgatttatcaaaaaaaaaaagtgttactttctaattgtagaagttagtaacatgtgtttgaagagagagagttgaaagagtatgagattgatcttagagagatagatccaacaccctcaaatttgatattagaaaaaaaaatacatagtatatgaaatgaataacataactatatacaccaattcattttctttttttcttttttttaatttccaagaccaaaccatcttacagagtaattcaaagatctcataaactattcatatttatgatgatatcattataatttaaaactattagtctcactaaggcataatcatttaaaaaaaaaaaactaagcatgtcttgcagacttgcatttaagacgataacaaaattaacgaataaattgacctataaactactgaatattaatgtaaacaaaattacttacgaataatggtgacaccttgctgcattcattaattaaatcgcaagaccatacagctagaagttgtgtttacacctacaaaccgtagtacaataaccttgtgaataatagttagtaatacttaacaaaaggtgtgaggtgcgattttctctcccgatgaagaaggaaaagtcaaaccagaagccaacaagattaggttcaatcgatcgacttccagctcgatttcacaatgcgcaagaagctgtgatgactgaagattcatcagctgagtttatggatgttatggatgggaattttcccctgttacaggttgaagaagatgctcgagttcctgcaaagggatctctctaggtacctgcgactagtggttccggtccgaaactgcaatctgcaaggggttctcatcagccacctgcaaatggagtttctagtttgaacctgcaagaagaggcatcaaatctctgggcaaagctggcgccgaaggccaattatgttggtgctaagcttcacttcactcctccggcgaaacatgagggcaaggtaattgctaagcttgacctaactggaattgaatatgaatctgagtactggaaaacagcaatgctatgtgttgttatgggtgctaatccacccattaaagtttttgagggatttgctagaagagtttggggagatttagggattgaaaaaattgccagaatgaataatggtgtaacattagtgaaattcaaggatgaagccaccagagattatgtccttgaggcaggggtagtgaacttcgataacaagcctgttatcatgcgaccttggactcctgaggttaattctatgaaattgatcaaatttgtgtctgtttgggtgaagcttcctggtttgggtcttcaatattggggcaccaactgtcttagtgctcttgttagcactattggtactcctattatggtagacaacataaccaaagaaagatcccaggtgaagtttgcacgagttctagtggagatagagattaaagatgaagttcctgcagctatagaatttgaaaatgaatggggagttcttgatactgtccctgttgagtatgaatggttacccacaaaatgctccaagtgtggtgggttatgtcacagggctgatgtttgtcgatcaaacaaaggacattctaggatgtctaaaactgaggccaaatccactatacaagttgaggaaaaatataataaatccctagaaggattaagggaccaagaggcattaccagtacatgagaagagccccattatattggtggagaaggatgtcattaatgaagtggggaattgtttgcaccaacagtttgaccaaggaggagaaaaggatgttttgaataggtctgctaagttaattaagcaaccagaggagagtcaattaggagattgtattgtggagaattgggaacttccaaaaaggaaaagtaactgtattcagaaaagaatgacaaggaagcagggaaatatgtttagtgatttgcaagacaacactgatcctcttattgttcatggatagatgcaacattttatgctgggacattaggtgattcaacaggcaaaagaaagcaagagaaagtaagggaaattcttaacagtaataaggtgggaattggagcaattttggagactaaagtcaaaggcaataaaattaaggacattatggatacttccttgtatggatgggaccattacac

SEQ ID NO: 228338 - DNA, 694 bp, Cannabis indica
atataatataataagaaatttaaaatgttaaaaaccgatacgaacgtaccttgggaagtaacatactgctcccgaatctgatcatagagaaagaaagtaaaaatagcatggacctcccaaccaatagggagattggtgtctattaatctcaagaaaacagaaatatgatcttccccaccatttgttttgtctccatttgggaatatacttatttccctgccattaaaacccacatattgtcagtaaaataaataaaaaaaaacaaaaaaattctaacaggcacccatggtattagtatcaatattgttatcggtgcttagtaccacttaattaaaggtagcttattttgattctctaacaatatttaataaaagttattactttaaattatataaaatttaatatacttaattctagtgctttttgacattaatctgtctacctttatgaacatttcttagaggaccaatattagacagcggaatgtgaatgttcgtaaataaaatttctttttgagtggtgcatgtcaattaagtaaaattcgataattttttaataattttcataaatttatacaatactctagtaaatatgagcataggcggacccacattgtagcgagggggggcagtcgcccccctgaaaaaaaaaaaacgagaaaaaaatgtatatgtattttaattagttacaacat

SEQ ID NO: 228339 - DNA, 2625 bp, Cannabis indica
ggtgtaggaagtctatttatgagatagacagcagtttgaaaagcttcccaccaatattttagaggcatgtgagcttgagccaaaagagtgaggcccatttcaacgatgtgcctatgttttctctcagctctgccattttgagcagaggtgtgaggacagggatgatgaaaatctatcccatgggctgtaacagtttcttgaagagcttgatattcacctccccaatctgtcctaagtcttttaatttttctttcaaattgagtttcaacaaaggctttaaattgtagaaatgctgcactagcttcagctttagttttaagtggatagatccaggtgtaacgagtgcagtcatcaataaaatgtatgtaaaatctaaagccattattggatactacaggtgaaggcccccacagatcactatgaacaagatcaagaatgttagatgctttgctgttagaacttttaaaaggtagagcatgagacttgccaaattggcatgcatcacagaaatggatcatttcattcttggaaattttaacatgacatgaatttaagacttgactcaagactttgggtgatggatggcctaatctcctatgccatacatcacttttggaaattaaagactcatcagtgtgaaaccgatttacaccagatctggttttgacagcaacaccagagaatacttgacctttgtttttatttgactcgatagacttagcagacttgatggttgattgggattgtggtgattggagttgatagagtccatccttaagcatcccttgaagaagaaccttctttgttaatttgtccttcacaacacaacaatcagaatgaaattcaatgagcacattattgtcatgagtaagttttgacacacttaacaaatttttagcaatttcagggacaagaagcatttctttgagcaacaaagtttgaccagtattggttaataacacaccactaccaagatgagaaatagcaagttgtgtaccattaccaactatgactttctccttaccaccatagtcctgtttctgtgtcattgaggcagcatccgaggtaatgtggttgcttgctccactatcggcaaaccacgcttcactctccagaatttcaggggttgctacaaaggcagaaggattgttgtttttggcttgagttccactgttaggatcactccccatgtagtgctcatcaaatcgattgtagcatatggctgctgaatgtccatacttcccacatacttgacaagtgggcttggagttgttggatctgccactgaacctgccccttcctcttgaacgactttcctcctctgttagagtgtctaccaccgtgatactgtgagtgttgatttgatcctctgccttgtccgttgttttgtggttttttgggcaaagttggcttgcggttcagacagattagtgttgattttgttgttggatgaaaaggcctggagcctttcgatcttgctgtcgaagctcagcaataattcctgtagttcttgccaagaagttttgggtctcgcttcgtatctgcagaactatggtgagataattaactatcaagaccagagaggacattggttaccagttgtgattccggatatggctctccagctagagccaagagatcagcccagtttttcttctgtctcaagtattctgtcatgggagtgtttcctttccttgtcacttgaatcaaggtttcgtgtctcatccattttcgacttggagtgagcaccatacagctgttcaagggcttgccacaaggcagcagcagttgcaacgcccataacttcggttgctatagtctcagtcattgagctatacaaccatcccatgagcaactggtcatttatgatccagttttcgtaagctggattgacagtttgtgaatctccaccatcgatactttccataatcgttcctgcatcaacaagttcagggggacaaacattagaaccattgagatagccatctaacctgtggcctcttactatggcagaaaccatagttttccatagactataattgtgtctatcaagtttcaatgagaaaggttggttcaaggtactgaaatggtgagagacagagttttggagctgagtattgcttgggcttgcaccagaaatattcgatgcagcagctgtggctgatggttgagcagggttagtgtttccagggttttggggatcgactgacattgtgagaacacaataaatgctctgataccaagttgaaattcaagataaaattgatttggtaattactcagctcaattaatgctgaggtatttcattgccttatatagagtttcaggccatcggccaaatacaaagataagagcagattttgctctgtacagctgtcaaaccaaatcaaaacagaaaagggaatattcctaaaataaatgatttcctaatcattacaattcaacggtataattccttgaattcagcattgtgcaaaatgctacaggatggtgacacctggtatgagcaggaccacttgaataacagaatttgacaatgacagaattcctcatttcttcacatttttttccaccgcctttaatttgtgcaccctgtttatcttaatattatcactttaagatttt

SEQ ID NO: 228340 - DNA, 872 bp, Cannabis indica
cactggtattgcaatgcagcattacggtaatttccatatgcagcaggcctttgatacacagcaggacgttggaaaccagcatcccgagaaatgctagaattgctaaggaattgccctgctaccttttgcatgactgtaggatgttgatgcctattatccatggtgtcgttccctgaaagaataccatacaaacacaagcatgagaaacatagcaaagaccgaaaacatctaattacatacagctttcaaacaaaaagaatgttatggtaaaacttcatttaaaacgatgtactagataacaacgttagacttgaacaacacaatcaatctgtggattcttagatcccccatttcatttcctataatccaggaattaaagtagatatttgctacaactttcaactacatctataaaacgaagtatcacttcacaagcttaaatctaaaaacaagcatgaagatttattaagaaataacagtcacagcttaagaaaatcatactaaatccatctgacaacatactctagctcagaccaagtaaaatataagcttatattccactatatcaatagcagtgatcgatcctaaaagaaagaatatgataaactttatccaattcgattctaaaacggtgctaatattattaaaacagataacccatcatagataaagccctaaagaatacgcatcagatccacacacacatgaaaataacaacacattataaactaaacctaatcaaaccataacagttaactcattcagatcacagatctaacaaaactaaaatcactaaacaaatttcaaaccgatctagaaagccatcacaagccataaaactaacagaataccaaaacccaaatccagatcca

SEQ ID NO: 228341 - DNA, 1442 bp, Cannabis indica
caaacttggtatcagagctgttaatcgcaccggtggtgcccttcgttgtctcagcttcatggcagaacaaacttcagcccgttcaggtgaacaaagtatttcaagtgtcatggcccagtcatccgttcctgcagcaggtgctgcaagttctcaaatcgtcaccaccctcaaccaaccttttgccttaaagcttgacaggaataactacacgctgtggaagacgatggtgtctgcgattgttcgtggtcacaggttagatgggtatttgaaaggcacaaaagttagaccggttgagtttctgcctacagatacttcaacaggtgaagaaaatgctattgttaatccagaatttgagatctggatcgtgaatgatcagcttctacttgggtggctttacggatcgatgatggaaagtatcgccactgaagtcatgggctgtgaatcatcgtcaagcttgtggcaggccctagagacgttatttggagctcattcttgtgtgaagatggatgagtatcggaccaaaatccaaacagccagaaaaggagccatgtctatggccgattaccttcgacagaagcgtcagtgggccgatgtgttagcattggcaggagatccctatcttgagaagcagttggtgtctaatatactctcaggactcgatatcgagtatcttcctattgtgcttcaagttgaagcaagggtctccacaacatggcaagagctacaagacactttgttgagctttgatagcaaactcgacagacttactacactgtcaggagctactaaaaatttgaatctatcctcaccttcagccaaccttgttgcaactaagccatctggttttcctggaaacagaggtggtcactccggtcatgctagtcctggaaatcgtggaagctctaataatcaaaaaggaggaagaggtccaggcaggtttcgaggcagaggaggtggcagaagcaacaattccaagccgacttgccaagtgtgtggccgttatgggcattctgctgcgtactgttataatcggtatgatgaaaattatatgggtttagacccctctgctggcagttctggtctcagtggtaaaggctctcaaaatggaaataacagtggagcttcagcatttgtggctacacccgaaatggtggaggatggtgcttggtatgtggactcaggtgcaagtagccatatcactgcagacacaaacaacatgaatcaaaagagtgactacaatggtgaggaaacccttacagtaggcaatggtaatcatttaaagattgctcatgttggtactagctctttaatctctattgataacaaatgtttagtgctgaagaatgttttacatgtgcctaatatcactaaaaatttgttaagtatatctcaactaacatctgaaaataatgtgtttgttgaattttttgccaaacaatgtt

SEQ ID NO: 228342 - DNA, 1333 bp, Cannabis indica
tcaatcaaaaacggttttatctattttgaaattggttaactcctaaccccttagtacaaagagcattattttcattctcattagtgtttttactctatcttttgaaatatgttaccaaaacttaactaacttaactttctctattcggtaccatacatcatcatttttattgaaatatatcacaaaaatctcattttttttcgttcttttaaagttaaaatttggattttctcgactattataatcagtcaactaatgtattgatgtcagtctctataatcgttacatattcgactgtcgcaaaatagggtagaataggcgacgatagaaaaccgtcaaaaacaattaccgatgagttaaaactgtcaacaatagtggagactatagcttacggtttaaaaccatcggctatagtatagcctacggtgtaaaaccgtaggttacagtattatagccaacgattttaaattgtaggtgttgagtcgaaaagttggattagacttctaagccacatccactcactatagattggcaagaataaaaaagtaattaattaattgtaaaagatacatgaaatttatagtaattcacttcttgtatcgcgagggtaattggagctatatcaagtttgagtttttatttcacacaagatggtattatagaaaaaagctaattgttagaatctccaatttcaagagagaaaaacgagagagagaagcttcaacttgttagtagttttctgaaagtgaaaaatgagtttaaggaactctccttttataggtgaatgagacctacaaaaatagagaaaaaaaaatataaattagatgtttttgaccgtagatgatgatctaatagaaaaaatttgcttctggtggtgatggccattcttttggagcccggcaggtcccgctgcaggtaacccaaggcttattttcgtaactcccttgaggttaaattttggtgtcgatagcctcaaagttgtgattgaagtgtgagacatgacttgatagaacattgaatcaacttcaaaattcaagttcaatcgcatcaatcaaatcaatattgagtgagttatggttgttttactgaaggtagttcatgacctagcgcccgggttgacatatgacgtcaacttggacaatgggtaagtgtaaaaacgtctaagggatgtactttaagatgcctaagtaatattttgacatcacttagtttgtttctgtattttggtgaagctagtcacctgttcatggatgttgctgtcatgcgaaaatgagggactcaaaactcttcagttctgagagagtttctcaagttggaaatgagaaatgcaaag

SEQ ID NO: 228343 - DNA, 2625 bp, Cannabis indica
aaattatataaataaaaataaatgacgcctaattgccattacaaacaatattgttcgttattatagaagcttcaaaaatatcagttacatattgagtaaatgcccacttaactaaattgtgagcaaaaaagttgaacgatattgaaacttttgaaaaattacatcctaaaaaagaattcataagatttctacaatgagtaacatagttgtcaattttccaccttgaataagaacccttgagagcttcaataactatgtacgaatcacatgccagagtaataaattgcatctctttcttcacagcaagttccagtgccaacaaacaagcagatacttccccactaagagcattagaaaaagccagtcgcttggtaccaactcgaagcatatttcctacatggtcacaagccacaactgccagcatcacaattccctccctaactgccacatcacagttaagtttgatccatttcataggcagaagggtctacccattgatagcatgggatgattgtaattgatacatgagagagtgactacattctatataccaatgagcattagaattatgataataaagtatgttatgcatatggttgttatgtgccttgtcatttcgtgctcttcatatagtattaactatgattgacacataaaaatacatcattaatattcacatctctctcatgcaaacttgaaatgaatttgactcattcccacattctagtccccaatccccgtagaggaatgagaccctaagcagatgctctccaaatatgagaagccatgttacaatgaagaaaaggatgctccattgtttcttcctctctcccacaaatcgggcaatatgagtcttcaatgtctattcattctctaaggatggaccgaatgggaatctcatttgatagaatgctgtaccaaaatatcttgtcgttcaagcattttgctattctaaagtttattccacaaagagggagcaacatgatagtgttgatctctaaaaggtatgaagatttggtggagaatttatcattcagttccttaatctagacccaatgatccctcccttgtcctgatggctttcctccttccaaaatggcatgaacactatcctgattatacaaccaattcagcttacaaagattccactccccattctgtaataataaatttgacacaatcataaagcttgaagtaggaaccccattcaaaattggaaaaaaaatcattatcatgagccacccacgaatcttatcagatatagatatctttcccatcaactatcccatagcaaataccctttctcaaaatatttttagcctttaccacattcctccgaaactacaaatcataattcttataattgcattgaaaaaaggggtatccttaaatatttggttgtaagaaccttgcatcataaccttattaatgagttgccatcctcattttcaaagaaaggctcaattcatctcattttttttttggaagcctaaccctccctgagacttggaaagacagattttatcccatgctttgagacataatccactgttccatttctcgctttcccataaaaaaatctagatgaaatgattaattttggatgccacctgctaagaaagttttgtagtttccatggtataaatcagaagggaaagaccaaaaaaatttaagaagcatgggacgacctatttttaaaaatgttttcattttccaaccctttagcgttgcctcagaaatctggattagacttctaagccacacccgctcgctagattggcgagaatgaaatagttgttaagaaattataagagagacacaacaaattttatagtatttcagtccatgtatcgcgacagtaatgaagctacatctacttcgaattttcatttctcacaagatggaattacaaaaaaaaaaagactaatgtcagaagctctagccttgtgggtagttttctgaatatgaaaaatgagctaagcggagttctccttttatagttgaaggagtcccaaaaaaataggagaaaaatgaaaattagatcttttttaccgtagatgatgatctaatggtatattagcttttgatggtgatatttatttttagacccgataggacccgttacgggtaacttaggcatatttttgtaactctattggggtgaaatttaagattgatagcttcagaattgcaattatagtgtgagaaattacttgatgaagcattgaaatagctttgaaatgcaagttgagtcgcatcaatcaaatcggtattgaatgagttatgttcgttttactgaaggcagttatgacccaacacccatgttgacattatctcaaacagcccagcaaaccaaacaaaaaatctacagaatgcagataccgagagtctacaccaatgaggttccaacaagaaatggtaaatggacaattcactaacacatgcgagatggactcagttgtaacattacagaacaaacaactagtttgcacgggtacatgcttttacaggagcttaacacgagtagggagacaacctgtaagcgccttccaaagaaaaaattgaacttttggagggatcttcgacttccagagatgactctagcacttggaatcctctctcaaa

SEQ ID NO: 228344 - DNA, 901 bp, Cannabis indica
ttggaagtgtccttgcaaagaatagtctccaagattgagtgatcaatagcttgaaacagataattctttgcctttaaatctttcaacctttgagcttctagctatgttctttgtccatttgacactgctgtgtcacctgctggttcaataattccttcagagaccacttgccaatactctttagatcttaaaaaattctccattaacatgctccaatggtcatagtgaccatcaaacttgggaatagctggttgaacaaaactattggtggccatgattgatctgcaagaccaaaagaataaatgaaatagaaataaaactgctgtattactctctatctcacacttactttttttcctctctcttatattttggctctgataccactgatacaataaatatattatatatatttatacgaaagaaactcaaagtaaagaaatccaaataatacaccgcttgaattgatacttgattggcctatatataggcattacaaacaaaagttaaagcattgaaatgactacatgacatcacgttatttacccattaacccactacccattaacatcatgaacacctaaagaataggacaaaatattgactcaacaaaaagattaaacaaactacatgactcatcaatttaaaacatcaacacatgctccacactttaacaacatcctccttggcacatcaggctagtctttctagcccccactgggagtcgcctccacctagccatttgaagttgaatactgaggcagcataagatctcaaagcttgcaaaatgggtctaggatttctgcttcgagatggtaatggaacagtccttgccgctgcatcttttccttgggcaagagttttgttcacctcttatgatggaagctctctctctctctct

SEQ ID NO: 228345 - DNA, 5187 bp, Cannabis indica
gttgaacctttaattctcttaatttcacaggagccattcggtaaggtgctttagatactggttccactcctggaactaattcaatggcgaactcaatttttcattggggaggtaatataggcaaatccaaaaacacatccaaaaactcacattcaagcctcgtatttttcaggtctggttgttataggtcttccagtatcctcaaatgtaactagaaaccctatgcaactcctttttcattaaatccttagctttcaaagctaaaattctaggtatacgagatccttgtatcgtacccacaaatacaattggtttagcattatcaggtcaatcaccaccatctttcgtttacaatcaatcgttgctccatacttggacaagaattccattcccaaaattatgtcgaagtgacacaattatgattcgactaagtctgtggttaacttacagccatcaatccaaaaagataaagatataatccatctagtaaatatatcaattatccaaatggtaacagggttccaaaccccaaagcataaatatcgagaagtttatggaaattttctattaccctacttgagtgtgtagttctaaaatcaaataacactgtataaaaaaaaccattaatagataactgacatgtcacaactaatgaactagcgtcaacgtcacatgagttacagtaaataagcgtcttgaattctaattattactcttatttggttcctctttcttagcttgaggacaatctttgataaaatagcctaccatacgacactgaaagttcatctcagcccagtattcactttgatggtgtttcttacacttaggacacttcgagtatgatttgaatgtagcaccacgaccttgacggttgcttctatttccacgaaattgcttaattcaaccttgatgatctgaattctctatcttacttttttgatctgaaatgctgccaccggttcccttactgaagttactaccaacactgggggttgatgtcgtactggcatccttagcatcctgtttcctaatttattgctctgcctcctcggcattaagtgctctctctacgactttcttatacaaagtatcatgatcagtagtaatcttcaagtgtcggctaattatggcatccaacctcgtaacttacttttatttttgggtaaagtctgctggtaccaagttaccagcgaacttggacaaatggtcaaactccaacatatacttagctcctgtcatgttcccttgaattagtttcaaaaattcttccatgtgagttgacgaatggcgatatgtaaaactttttttcaaacagatttatgaattcctcccatgtcacaatgttgaggtcttgagactgacctaccgaatcccaccaagtgtgggcatgctcttgaaacatgaaatcaacacagttgacccactcaattccaactactccgatgttatccaagatacgggcgacgatactcatccactgctctgccttgataatatcagtaccacccaggaatgttggaggttgcaacttgacaaaccttttaaaaattgaatccctatgtggttgtagagttattctagggttagctaccactggagcaagaattggaagaatcactggttctactacagctgcctgaactggttggctaatctggttcaactcttcctctttgatgaagtacaatagctcgcatttcggtaaatatctgctgccaattggtaagagaattagcattattcaagctcgtattatccttaagattttacggaggcattggcagtgtcggtagaatggtttgattaaaatcatgctctactagcccaccctgtgatctagttgatttattaaggtccattctttttcaaataaccctaaattcaacaatcccagcgagtcagacaccaatcccgcacttacacacttcatgccaaaaccctaaattaacaagtacaatttcttcttcctatatataacaattattactcacaacttataactatacttttcattaaataaaattattctctcgatgctcatatgttgtctattactaaaagtagtaaacatttaatcacatgcaaataagtatttactctcaacacttactgcaccatgagtcgagattgtctttgacgatgattatacatgttcggtcaatcttcaggaagtttaaaatattgacgctctgataccacattgtaacaccctaattaaggaaacgccacatgtcatgattacattctgctaattctattaatcgggatccaatgagccaagtgaacaaaaacaatttaacttatggtctagcttggtcagaacatgtacaattcaccatcaaaactatcaaacttatggctagcttgacattgctctacccttgcctatacaacaaagaaactgtgagccaaggcccagcaagaaagcataattgaacccaaatgaaacatatagcctatatatcacacttaatacacaactgcgtagataatcgtaccaccgcacttatgatgatgcaactacatcctaataacactcacacatttatttatttatatgaagtcttatcagggttttttctcgattttggtcaccgaatctaatccaattatgtcttgatcacataacctacatatactcaattaatttatgtattgcatgcatagaaatggaaactttagggtgataatccttactcacatttctaactaagtattcacataatttacaagcgcgctactacactatactctttgtgcaaggttagctttcttacctgaatttcgaagtgtgaggaaaatttccagtccataagtgatctcgagaaaatgtcggtattcttagtcacaatctcgggtttatataaaatagaattaattccaaaatcacatttaataaatattcaaatttaggactccaactttaaaccaagtaatagagctcgtaacaagctttccaacgatgtaaaaacatctaaaacagaattcgaaatcaaaagttatgaccaaaacaaatttcaagaaaatggaggatcaaagggaattattgccacgaagcaaggccttgcccaaaacaagggatgctccctgtaagagtttgctgcggctacctcgcggcaataattttatactatgttaattggccaaactaacttaacggttattcttaacaatttcgatacttgattcaatagcctatttaaagcagcttgaagtgagagtttgtgcgctagaataggggaaattatatgaagcaacacaactatttaaaagtattagctctaggttgagagtttcttgagtgttgagagattacactaaaaagaaacttgttgtgattatttatcttgtagctcgagtatttggtaacgctgttctaggatcaatgaaaagtagtgagtattttcaaattagagtaggctcaagatcacattgatcttgcaactgcacaatcatctttgtgtttagtttacttaactatgtttcgttttattaggttgtgatcttcaacataagaatcaagtttatattttctacagatcaaagcaaaattctttataagcaagcttcctcatcaagaattttgagaacacaatttaaaaaaagatgccaatcaaatgactttgaactatggaaaaaaaaaaattgaaggaaatgcttgtgcaccaaaaagttgcaaaggtgatgggagaaatgaaacttttagtagaaaataagtaagatgaaatatatgaaatggagtatggcatattataccatcatcacgtatatatccaatggagctaaaagaaaactaataagagcaaaaaggatatgagctaagttagaacagctatatatatggattaagaatgaattcttctctatctttggttgaaaatattaataagtttaataaaataatcattgattctctcaaaagaaataaataaaataattgttaatttagctaacattgaacaaaaagtagataaaaataaccaagcaatcgtactgctcaaatctttgtcattaccctaccaagaagtcaaaacagcatcaaatatggcaaaaaggagatttctttggaagttgttcatggagttttgaactcaaaagattttgagttacaactaatagaaggaaaccaaaaaagatgaggcttatattgcaaagggaaggcatccaaaaagaggctagacaaggaacagtctcatttaagatctaaattaagaggcaaagacttaagacaatgctaccaaggtggagagattagtcacatcaagaggttctccaatcagttgaagactcaacaaggattcagattaaatcaagatgaaaaaagctaccacaagcatcagtttcagcaagatactcaacacaacaccaatattcaaagatataagaccaaggaaatcaaagaagtgacgcagttgttgctaagagcacatcagatgaggaattatttttaagttcagaaaattaggatttaaagaacggatcttgaattcaggatgcacctttcaaatgtgtcctaacatagtctttctttaataataaagaaattaacaatggtagagtgctaatgggaagtgatgtttcatgcaaggtagttggcattgggaaggtggcaatcagacaaatcaataaagagatcaagatatttaacaatgtaagtcctaatttttaattgaagtgaaagaacccttgaagatgagggcttggatacaaatcattaaatggatgtctcaagatcagtaagggatcaccactaattatggaaggaagaagaatacatgatatatatatacatgtacctatgggagagagagtcctactgcagaagcaaatgtagtgaaaggagaagaatgatatgcaactttgacaccaaaaacttgggcacattaagtgctcaaagagttagagaattgcataagagtagtgtcattaagaagccgcagacttgtgccttgcctttggtgagacttgtgtcagtggaaagcaacataagataaagttcataacaacacacaacacaaatacagttttggactatgtgcatgctgatacttgagggccaagcaaaattctaactcattcaggtaaattctatttcctagatggaaaatcaaaccagcgtgaaacttaaagccacttgagacaataatggacttgaattcacaacacacaagttgatagaatgtg

SEQ ID NO: 228346 - DNA, 1328 bp, Cannabis indica
ctactaagttactggttagcaaccagtgattgattttagcatccccctaaatgaagcagaagagtattcagatgttcataccgcacaaacttataacagtaagtcgtccaatccaaggcaagaagtccaaacttggaccaaatagtagacggttagatcttgccagaccgccccctgggaggaggtactcatttgaacaactatactcagatagagatatcaggccaacctttcaaccaagtagttcaaacactgagaccacctagtgcattggacagtcaaaacattccaccaaccgtctagccaaataattatgcccaagaccctgctcaaagagggcctaatgtgacacatgtcgatctacgacctggtcaagttgatccacttgttcaagcacaaataaatcaacataagagcctagtacaaggtctaatcggcccaaaacatacaattcttgaactagaccagccacgaggatcacccttgtcccctaaaatcaatgctcttaaccaacccctaaatttcaaaattccactatagaagacgtatacaagaaaagaagatctaatatctcatttgaaatacattgaggtgcaaatggattagcaggggtaagaagcaatgtgcgatgtagaatttttctaactagtagaggccactgaacaattttatttcaaattacccccaggaaagtttaattcattgaattccttttcgtttgaattccatgcacaattttcttcctcccgttagcttccctcccacttagaagacatggtagaagtgaaacaaatgccaggacaacctttaggtgcctacattagcaggttcatgattaaagtaacaaaagctaagggactgactgaggattgaagacttgcagccatactagggggcattgagcctatgggagaatagtggaaggagattaagagattaattgtgggatcgttggttcagtttctggatcgagcagatggattcattaagctcaaagaggcaatatggcttggggatatagtagggcacaagaaaaatcaacaacacaccactacgggtagtgcatctgcccagaattaactacatcacaacaatttgaattcaattggaaagaggtctaacaataacaatagataggggaatggaaagaagagtaagttcaatggcaactccgagtaacatccaagggagaatctaagtttacttatttcttaatcctaacagaggatatagaaacaatctatgcaaccaccatatctatggtgtcatacaagaaaccctcacccatgaaaaaggacttgagagaaagagatacaactaagttttat

SEQ ID NO: 228347 - DNA, 1667 bp, Cannabis indica
ttacaaattcttaacacattctataatctgtttctccattttggacaatttagaaaccttaacaaataaaacccttgccttaatgttctctttgacaagttgatcaatacattgaggtgacatacatttaccttcaaacacacataggtttctattcaaccatataccatacgtagcacctgccattgctgcatagaagacatcattcaaaatgttcttgggaatctctttttgaattttttggcactattgttaggatttacagttttcattattttgtgtctagttaggccttgcttgtagttttaccattaaattgaatgaatagaatctgtacccttctagtaacacctatgaagtcaaaacaaactatgagatggtaacagtagtctcagcgaccttttctttttaatgttatttaaactttatttcttgatatttgttggtatcatctaatactcttatctttttcaatatttagtagagaagaggatcccttgctccatctcttgacaaaaatggcaactgcaaggacagtcaaagatgtttcgccacatgagtttgtcaaggcctatgctgcccatcttaaaagatcaggcaaggtggagctccccgagtacaccgaccttgtaaaaacagccaagttcaaggagttggctccttatgaccctgactggtactacgtgagagctggtatgtggttgattattgtgtgcttgctatgtaatattttgcagctctttacatctgatggttgcatgtgtttctattcattctttgtgcagcctcagtagctcggaagatatatcttagagggggtcttggagttggagctttccgcaggatctacggcggtagcaagaggaacggtagccgtcctcctcacttctgccggagcagtggtgccattctgcgccacattctacatcagctccaaaacatgaacattgttgatgttgaccctaagggaggaaggaagatcacttccaatggtcgacgggatcttgaccaggttgccgggaggatcgtggttgtatctccatgaacatgatttttcaaaccttcggaatactagaattttctgagttttctttagctttattttagtttttgagagacattgttttggataattttggttcaattttcctgaatattgtatgagatgaaacatgagttgctagttggtatctttgttttattttttgagtaatctacaacacaagttatttctcgattaactgaatttattgttgaatgtgcttttttacttttgaatgtttgatccgtttctttaagtctcttgtgctttttattggttcctatatactgtataggacattaaaaattgtaacagtttctatttatataacattttagtattccattcaaaaaaagaaaaatttaagtattataaaattatatcaacataaaaatacaaaaagggtattattttccatctataaacattttttcataaatgtactctatccagacttcttatatgatttcaataacatctagttattcattgcgtgtcttgttctttaaaatggttttgtatttgttgtatttttatatgttggatgaggggtcttctttgtaaaaaagaaaattactttctcatttataatgcaaggctatagcctatctgggttgtcgtatag

SEQ ID NO: 228348 - DNA, 2429 bp, Cannabis indica
ttctatgtttttctgaagaagaagttggatctgtgtaatttcttcatttttttttatctgatctggtttctgaatatttttgatctggtctgttgtattgttctctcttgaaatgttgttgttgatttttgccttttatatatgttgtagaggaatacaggaaaaaagttaataatagagttttaaacaaaactttattcattaacttataaacctgtctaggtaaatagaggccagaggccacctagtattttactgctcttgtaaactctttgtaaatgtttggttttacagtgcatggttaatatggggtttacttcaacatatggattaaggtacgcttccactatttggctttttctctttgaatcaacaaatgtattctttagatctatggttatacacttataattatatgtaatatgtttatctataaaactgaatattgttatggcatattttatatgagtgataaagaaattaacatgttgaactaaaacagagaaaaatcataatccttgaatcgttttaacaagagaagaaaaaagagaaacctatttcattggaacctattaatttttctatagttaaaacaagagaagaaaattaattaaattcattgcttttcgaaaattgtagaggagatggtgccttagctttattggttttcttttttatcaatattttaattgccatgtacatcaatgttcaagaaaatatttctatattgtaaggataatgagggcatgaataaaagagctaaaaggatatcatcatcaccatcagtatcttcaatggtgggtaatgatggtgatgatgacagaatttcgaaactacctgatacattgatccttcacatcttatcgtttctcccaactgaagaagtggttcgaacatgtattctttcaaagcgttggaagctcatatggtattcagtctccacaatctttttctctaataatgttaaccttagtagtacaatggacactgcaaaaattaatggaatgggaacatggtctagaaaaattttacaattatgtcgataaatatttggaacaccgcaagaaaggtatgtactttatggggaattcagctgtaaccagctttaagcttgaaatgaagggttcctatcaaacaagtaaggatgagttcctagataaatggttagcttttgcagctgagaataaggttactgaaatgtatctgtgcataggccatggggcctttctattgcatacctaaaataaatgcaagatatttgactattttggagttgaattgggtacaattggatgcttctcattttaactttccatcactaaaaactttgtcaatggaaactgttaagaattcagatattgttgagcatggagaggcatttaagtttttgttgggtttgtccttctcttgagaaattgcaagtacaaaattatttcttcttgcgcagtgatgaaatggcgctccggctacaaagtttaagcctcaagttcttggaactgaaagatacagtatatgatgaattacaagtagaagccataaatcttgaatctctagtactatgtggtgcttctgtgcacaatataaatctctctgcttgcaagaaaattagaaatctctcattttatgatactagttatcattgcaagccatcattaagtgctcttatttctcaaattcctcttcttgagaatttgactttggtcaccaaggagaaatataaggaccatgtcaaaatctcgggtcaactgaaaagtttcaattttatgaagtgttactttggaccttgcaatattacaattggaacagctcctgaatttgagtacttttgctatgaaggttatattgatctaagcatatcaataaagccatctaattccttgagtggaaaaattgttatttttgagggggacaatgatggatatgaagactatgatgcaaactggtttactgatatgttaaattttcttttgaatctcaattgctcttggaatactcttagcctacatgttgaaaaatatgaggtacttgtattatgtttttattttaataattttgattatgatttatttatagtatgttaagtggtatgtttatgtgtttggattggatgaagtctctcatttggccagaaaagttgaagaggatatgtcgtggatctccattgcttaattcgaagcatctcaaagtttatactaattctagcaatcctgaaagaatatctgatttgaaggagtccttgttgtggctttcaccatctttacaaacattgtctattaacaaaaagcacatattttagttgctttagaattttgtaactgttgattataagtttaagaatgactgtcttttattagtttcagaatatggcacaatagttctttatgagatggagtttgttttattagtagctttgtactaatgaagatgaa

SEQ ID NO: 228349 - DNA, 1719 bp, Cannabis indica
tatgaccatctcagaaactatggctgtcttacctatgcttcacatatcaatatctcccacaaacttgcccctcgtgcaagagcaagcattttcataggttaccccgaacagatgaaagcatacactttgcttgatcttcaaagcaaacaaatatttcactcacgagatgttgttttctatgagaatatattccctctacaaaacaaccaaaaccatcacaacattagtcattttttcaacaatcactcacatcaccctgttgacaccactaccattcctactacggacaatactcatactgtagaaccaattactccccatacagaaccccacaacactgcagaaatcaataatcccaccactttccctcaaccacaatccaaacctacagtaaaaataaaaacagggagaaaagtcaagcaaccaaaacacctacaagattattcttgccattccacttcttaccctcttgctaactatctgtcatatacaaaattcttgaaattttttactgctgcattacttgccacagctcaatgcacagaaccaacttcctatgcagaagcttcaaaatataaaatatggaacaatgcaatagatgtggaaatcgatgcattagagaaaaaccacacttggattgtggttcccctaccacctggtcaacatgtaataggaaataaatgggtatatcgtatcaaatataacccagatggtacaatagagagattcaaggctcggttagtagccaaaggctacaaccagcaataaggaatcgatttctttgatacatatgcccccgtagaaaaatttaacacattaaaattgctctttgctcttgcagctatcaaaaactggcatcttcaccacatggacattaataacgccttccttcatggtgatttatatgaggaagtgtatatgaaactccctcaaggatacactcccaaaggagtgattcccaaagatatcgtttgcaaattacaaaagaatttgtatggtcttaaacaagcatcatgccaatggtatgctaaacttagcactaccctcatcaaccaaggcttcaaaaaatctcaaaatgaccattccttattcatcaaaatcattcaggaattttccttgcacttctcatctatgtagatgacataatcgttgcaacaaacaatatgaatgccttaaaaactttcatttccacacttgatgctcaattcaagctcaaagacttaggcagtctccatttcttcctcggccttgagattgctcaaaactacaaaggaatctctgttacacagagacccttcacagttcagctcctccaagaaactgggacacttggcacaaaacctgtttccactcctatggaacctaacaccaaactcagccaagacaatggtccactcttggaaaatccaacacaataccgcagtctcattggtaaattactttatctcactatcactaggcccgacatcagcttcgcagtaaacaaactcaaccaatatctccaagctcctcgaaaacttcacatgactgctgcaacacgagtacttcaatacatcaaaggcaccctggccaaggactctactttcatgcatcatccagcaaccctctcacattacaagccttcacagatgcagattggggcgcctgcctcgatactaggaggtccataactggctattgcatattccttggtaaatccctcatatcatggaagtccaa

SEQ ID NO: 228350 - DNA, 1509 bp, Cannabis indica
cattggttaagaactaatgaaacgtaccgaactgcttgtgcaatgaaattactaacaacacgaccatcatcaatattcatacgaggtccataggtgttaaaaatcctagcaatccttatctctgtcaagagcatcattattcagtcaaaatagagcccaacaaactaatttaatcacattatagccaacacaaaaaaagcaaaaagatgtcagggatggaatcaagggaatttcttaccaatcccatgctgtctgtgataatcgtacatcaaagtctcagcaactcgctttccctcatcataacaactcctaactcctgtaatgcataagtgcaagcacataaataaatggtgacacatttgggtcttataaaataactttttgccttgaaataacattcatattaccagttgtaaatcaaataaatcagatgtagagtgagtacataccaattgggttgacattgccccagtaagtttcatcctgaggatgcataagaggatctccgtacacttcagaagttgatgtaagcaaaatcctgtttagcattgtcatttcattagtagaacaatacatataatatgaccaactcaaataaaaacggagaatagatcccaacctggcaccaacacgcttggcaagtcccaacatattcaatgtaccgatcacatttgtctttatagtctgccaaagaagatatgttagttagatcagcactcagaaccatcaaaactgaccatggaagtcaatgcttttaagagaaggatcattagataaagagagaagacaatggcatggatgtcagttagagccagttctgcaagacatgaaaagaaaagaccaagaactaaagaactctgggagacagacgcatctctcctgttctgaaatagaattgaaatacagaaatgtgccacctttacagggttgtatttgtagaagatgggggaagcagggcaagcaagatggtatatttgatcaacctcaaccagcaatgtctctgtcacatctgcacagggaaaaggaaaacaatttaaacaagtcaacaacaagagtacatggtctcactaagtaaaaaaatggttttacaagatcactgcaataatatagctagataacattattacacgaagtggggtgagaaattcacaatgaaaaaattagggaataaacacaccatgacggataagctcaaatcttggatgaccaatccatttcttcagattgtcctttgagccagtgaaataattatccacaacaatcacctgagatgcagaaaacaggaatccatttcaactgagaattctagaagatagtttattctcacaagagacagtggaaggtatcctttgagccctcttaggttatgccagattctctaaaacacaaaaatatgaatgatgaatacttcaaatgaactgctttcttgtcttgtgttctattatttagattgacttatcagtacaggcacttctgtcatatgcacaccatgccatcctaatcaattgt

SEQ ID NO: 228351 - DNA, 2667 bp, Cannabis indica
gtaaatttttagaaaatttcaatgtgctacagtgcctaaaataaagttcaaacagttgtgtgtgcaacgaaatatttaaaccttattttcagcattgtaaattactcgaaattttctaaaaacttacaggtggtcttaaataactataacgtacatcatcataaaagaaaaaattggattaaaaaagctctattagatgctaaaacaaatagggagtctacagaatcatatattgtagcaatgtgatctaattggctgtcaaattagagatgaaattgatatattggggaacaattacaacacagtcaaaaatttatagcagagttagtaagcatttgagatagttaaattagtgtacattgctaagtttttgacctttgactctttgaagagctactcttctcatgaggaaagaacttaactttacctgtttctacagactttctcttcttggaatgaagctgtgaaactgagaatcgcccatttctcaatgctcttgttgtgacagcttcgtcgttcttctcagattccatcgaagtcgggtcactgacactttggcatgattcacagatccaacattcaggcacctcatgctttacttttcttctcatgcaataactgaaaacacaaagatataaaagccataagttagtgacacttgaacaagtaataaaaaggacagcaataacaaccatagacatctatctaatccatgtcacacaagtaatttctattgacctcatttatcaaatcatgaacataattcaataattgttagagagttctacatttctagttcatggaaaaataatatcatatatagagttcataatctacttacttctcttttagattttgagatggtaccttatgcatcttacaattctaagattgtatcggaggcaaaaacaaaaacttctaacaagtatccgaaaacaaaaagtagatcgagaaaaagtaggccaacaaaagccaccaaaaatccaaaaagttggctcaatagagccgcttgtgatcgaaatataatgtcacatataagatagatgaattacttctcccatcgccaattaattttgagatgaaaccccgtacattttacaattcttacaataatcaaagttaaagtaaacaaaggcacttccatgctgagatagagaaagagagaatcttacacatgttcaaaagttgtgttgcacacagagcaagttacaagtaaatgtttaaaattgccaccattatcaccacatacttcacaaactttttcctgaaaaggcgaaaggaataaatcatattaattatataagaaatgttgttactatattacatgcaaaatagctatagaccaattgaagcaaattaaatcataacaaatgaaatcaataacaactcagcaaagaattcccaatcaaaagcaccaacttcaactgggtaagactaagtttcatcaaaactgtaaaattcttactagcataatctacagtaagaacttgactattactagtatattatataagtatttttttcatttttacactttaaaatagtttttatttttttatttatttttttttttttgtcatttttacataaatccacgtagcaactatcagagcaacttaaatcacaagatttacataacaatccaacgtagaaatcactgtaaaaattaaccgaaacaacccaaacaaaaaaaaagttgaaaaaaataatactaacatatatatacatacaaaatataaagaaaaaaggaaactttaccactctgatgagcaacaaacatgaaaaagagaccctcttgattcaaaaaggaaaaatcttttgagtacttcaaaattctggtagattagaagatatttggtctatcaccaaaaattttacccacccaaaatttaattataccctttacacgtaaaccagcaattttgtttaaacttttaaaagttaaatcaaagattgttcaaaacatattaactacaataaaacataatcataccttaaacactgcatccttctttttattacgatgacttgaagaaaaggttttctttcgtttattttgacgacatgatgaagctctcctttttttcttcattagggaactaattgtcatatctacaatgataagataaacaataaacatagttaagcaagatgacatagattgaaactaccaacaagcaacaataacttgcaaagtcaaaatcaactattatatttgtggatttcggaagtacactcccttaaaaggatgttcgggtaaaactttcggcccgcttcagcatctataaaagttttaaaagtctaattttctttatagtcacgtacgttgtaactatttaggatcatctataaattttcagaaaattttgaatgtgttacaacgcccaaaataaagttcaaacagttacttaacacgttttttgcatcaaaaagttgtgtgtgcaacgaaatatttaaaccttattttcagcattgtaaactactcggaattttttaaaaacttacaggcagtcttaaataactataatgtacatcatcatgaaaaaaaattaggaactgaaaaaagctctcttagacgctgaaacagatagggggtctaccgaaacactcctctaagggtgtactatagacttactctatatatttgttatattgtagcaatgtgat

SEQ ID NO: 228352 - DNA, 2436 bp, Cannabis indica
cggtgttcgagtttggggtttgggggtctagttcgggtctggggtcaaggtcaatgttcgggtccagggttcgggttcgagtttggatttgagttcaggattggggtcggagtttagggattggggttaggttcttggttcgggtttggagtctggggtcggggtcccgatcctagttggggtccaagttcggtttcaggtctgctatttggggtcggggtctaggttcaaatcggggcctgtgtcggggtctgggttcagatcagggcctgggtcgaggtttgggtcgggttcgaggtcgaggtttgagttcgtgttccaagatctaggttggggtcagagttcaaaaatatgattaagaaaaaaaaattgacttaaaaaaaaggtaaatatcggcatatgtatccaaagatttgagtttgtaagctacataaatccagtaatttttttagtggcataagtactcaatgtttgtaaaactataatttttctttagttttatgagtatagattttgttttgaatttattataagaagatttaaaagcaactgatattaaatatttttatcaaaacctaataatttagaatttgagctttctatgtctcctgtataagtcactaacaaagtctgtactgatgaaattgaaggaaaattaaagttttataaacatcaagtacttatgccactaaaaaaaattattgggtttatgccgcttataaaaattaaaattttgagtacttatgctactacttatcttaaaaaaatttgaaagtgatttttccttgtttttaaaattttgaaaattttgattcctaattaaaaaattaaaaagaaaaaacagttataattactaaacgcactaataatattatccacatgtgatgttgtgattcaaattcaaaaatgataaatgcaatgctttaagaaattttacaaatataatattgaattaggagtgttcatcaaattcaatttctattattttgttcagtgtatttgattcgtagtgttaaattttatattttgactccaatatgcacaatagcaaaatataatccaatccacttattttaaattagttgcttttttaataattgatttttttttgaaagaatattgaattatttaatattaattaaaaaatatatagataaaataaagtactttattattattttatgtctacaacaataaattcaaacaacaaaatcaataattacaaaatctaaagatgaaaaaaatgtatatagataaagaatatttggttttattttaaattatattttattgatatgtaaatatggaatatacatttaatatcttaaattttaaatatttttgtagaacatgtattagatttttatattattattagttttctactttgaaatattaaatatatataatttttaaataaatataaactaggacaagttatttttacatattaaatgttgaattgtgattttagattttttcaattcacaaatgcatatatctacactatgcaattggaattggatatatgatacaaacaaaatatcttcattcccaattttctcataatttatagtggatttcaccttgcagtataaagagttgtaaaatttaatcatctaccttttaatcataggacaatacaatttaagattcagtattgtacaaaagttatagaaatcaacttgagaatgttttttaggatttttacaaaaaatacgataaaagtattgtgcaaataattcagtattgtacaaataatttttagcacagattatttgtagagtaaattctattttggactctgtgttttccaaaaattaacaattaaactctttattttactaaatgataaaatggactctgagcttaatttttgacaatttttttttttaatataacaactttaaaaatacgaacatatacagaaaatgtaaacagttttgtcataacatctttagatcgaattattattaacttttattttgacaaaaaaatcaatttagggtcctatattctattttggaaaaatacagagtccattttgtcatttataaaacagaaggttcaatcggtaacttttgcaaaacacaaaatctaaaatgatatttaccctagtttttaaaactcatgatattattttgtataattttaaaaattacaatttttaatttatcatttaacaaaataaaaattcaattgttagtttttttccaaaacagtccaaataatatttactcttatattatttagacaccttttttctttttctttaacaattaaaaggtaaaatgttgttaaatgttacccaacccaacatactaatatactataaataaataaaggaataattacataaaacacaatttttttgttaaaaaattacatttttacgtttaaagagttttttttttttacttttttacggttttctat

SEQ ID NO: 228353 - DNA, 1077 bp, Cannabis indica
tttttattattttactatcacatttatatttataaaaaatattatctacgtcaaaaattcatttcattgacaatgtcataaattttggcctataactagtaatcatcacacattctatctacattaataaaatatatacttttagccactcatttaaattatataatatatatacaattattgacatatataattaatctaaagagtaacacataaattcagtaaataaatttagtattatatacaagttgtaattaattatactcaagctgcaaacatatataatcctaaaaaacaaaacacacaaacataggtattaattgttgcactatagttacatatatatgtccctttacaattgtgtgaaaaaaaatggctataatgctctataaaaaccttatcataaatatatactatattaatttaccatgtagttgcttcaatactacatataaatatatataatgtaccatatatattatatatatatccaatgtacctagattttataaatttcatataataatgtatagtatataatatatatagtgttaaaagtagaaaaagccatgtgtgggtttgtgtaaaaaatatcctatgctatgctcatcctttaatttgaataacaacctataattaagcccatgcatgcatggtccataagctagctaaaccaaattgatattaattttagtataatattattttccatcctctattttataaaagttatgaagtaaatattctattttattaaatgataataatttaaatttagtattttttaaaatggtacaagacaatatatccttataaattcaatttttattaaaataaaatttaataataatctaacttggagataatgttataacaccatagttacattttttttcatatcatttcactacaagaaatgtcacttttgccagcatatttttgtgctggcaaaagtttagtattgcactggtaaaatggaatttacttctgatgtgttggcaaaaggggttagcaatcaacgttggtattagaacttttgccagcacaaaataaaaagcgctggcaaaaataattttt

SEQ ID NO: 228354 - DNA, 1945 bp, Cannabis indica
ttggaaaatagtaacagagcagggaggtctcaaagagataatgcagaatttattaagggtcaaatatgtgctaaaaatttaaagagaagaagtgggtgatgtggttatggagtataagttcaataaggaagaattcatcaaagctcaagaggctctagctttgaatcctacagatgctcaattacagtagcaggaacatcaaaagcatctgatttatttagccttgctgccttgttatactagctatctaaagcaatagagtaaaatcagttgggtgaagtgtaatgatgaaaactcgagatcttttcatgctagtattaggaagagaagagttgaaaactaaattaccacttttaaagttggtgataaagttggtgaggaaggctttgtttagtatccactcctcaaatagtcttggattggatgggttcagctcgggtttctttaagggtttttgggaggacattcctgatgatatttcttaagcggacttaaaattcttttagaaaggtcacttgcctaagtctatgaatgaaatagtgatttctttaattcccaaaattgaggacctgaaagtggctatgactatagacccatatcttgttgtaatacgctttacaagtgtacatcaaagacgctctatttttgagattatctgaagttctctataatgccctactagatttggcacactatcatgttttaaaattactgtacactccttcgctaatcaaagagtttactaaaaaaaatgtgaataattaaaattttcagaaataaacttggatacataaatatataatatattccggggtctcatttataaagttacatcattttttgaaatacaacagttacaaaagttgtcgcctagcaactataaaaataatgtctaattgttctaaagatttaaacactccaagtctaatcttctcgatatgtacaatcttaatatagctcaagctcattgatgctcatcatttgctttgcctttacctacacacattaacaatatatgtgagtcgataggctcagtaagaaaagcatgaacaaaacataaaaataaacataattataaccagacgcccatacactcctgtctcgaatttgcttgcatgtggtggaggcttctgcccttctccatgggcttctcctttgtgtgtggttgggatatactcgtatcaatatattctcttattgttagcgcctagtgaactctctttcaaacaaaaagaatgattgcaatgagtatcgtattgttcttactgatatccttcacgtttggaagtctttttctcatgcctctatttctcattataaccgagctagtaatgttcttgcccattctctagaaaaattttctctttcattagaaacttctcaagtttggtggccgggtcttccccccaacttactatagatggtttatgcttgtattgatctcatgatctctttggcttcatgtcttttttaatggaattattcatttttctccaaaaaaaaattccattattcatagttgattgtagtaactacttatcatttacactcaaaattatattcattaagagtaaattgcagcaaaaactctaatactttcacttcgctagcaattaaccaccaaaacctaaattttagtagccaaactcccgaaactcatgttctgttaatatttagccattttcatccatcttcagcagttaagtgttaagttggttatccatgtgtagatagggtattgtccacatgtacacaatatacatgtggcaaaatttaattggctcacgtaaataaatattttaaaataacataaaaaataaaaagttaattaatttaaaataaaaagtaaatcataaaaaataattatttcttttttctttccatttgctttttgctttttttccctcatttatagactacagacacacacacacactctctctct

SEQ ID NO: 228355 - DNA, 2197 bp, Cannabis indica
cttcgggtcgcctgtctcttgctacctggaactgcttcttaaaatctttagacagctgttcccaatgattgaatgattggtaaatttgttgaaccaactgctcgctgccccaactagtgagatagggaataaaatacagcgaaaattattcgtcacattcctggctcgcatgatagtattgaaattatttaagtgtgtgactggatctgtagtcctatcgtatgatgagacatgagggtttttaaatccctagggaattcgacattcataatgtctggatggaaaggctctggttcctcgttcgagttgtaaccaggcagtttcccaaattccccatctcggtacctcctaaacttgttctctaacttgttgattcgcaattggataggatgctcttacttttgattgagctattggcgtaggtcaggtttcttctaatttagttgattacgaagatccgattgttgttgatcatagttacttacagacctcgtccttgagtaactatcaattctagttgtgcccgtaccgtactctctcgatcagtactacggcgagttctatcccttcctcgcgtagatcgactatgagttcttgtacgttcagagctagaactgacctcatcacgtactagccttctcctttgggaacgggttgatacatgcccccagctaggatttgtatgagcccctttcttattagtgcgagaaggacgttgacgatgtctcgggggcaacctacctgtcctaggttcaatcccaggatctctctcgttaccatgagggatttcttgttccctagtctggggttgccttctatttgcattcctgcgagaagattctggcaaatcacggtttccattctcctaggttgtaaatccccggggcctccaaggtacttcttgatgatgtgtctgatcatttggttgctcatcttcaggggcatctcagtttccccgggttgttcttcctaagcgttctaagggtgccattgtgctgtctcctgtctcctggttcgtgaaccgcgaggcttgcctcgtggcctcctcactccaaggtaagggttggttttgagcattgtcttcctgagcctccctagccgcggttgcctcctgttccaactcaacatttcgtcaatttgcctcctccaaatgtcgcttgagttgacgattttccaactccatcaatggcacgtatctagtggggtcatatgcatcctcctccctaggtacataaccaccagcttcagtattagtttcctcattcctagtttctgggttttagtcaccttcacattgagttctcctcgaacgtgctaaccgtgtagatcgtattgtccatgaattgggaggcctcccttagtcagccggctcttttccaggatgataagtagtctcttcaggttgattattattattttccctgttgtcagccatggagaaaagttttctttttggttaggagggattttctgagcttttatcacgtaggctctcaatgaaagcaccaaactattaacgcaaatttttgttaatgataataagcctattttcatgataggatcatcacagaatttagtagaaatctaagaaagaataataaagtaaaaacaacaccaagtttttacgtggtttggcagttaactctgcatggtccacaaatcaatcttattcacatttttctaatacaaactagggttcttttccctcaagaattttttcatccctttttctgtatattttgcccctgtttataatgacataaggtggcagttaattacattcaaatatgaatcccataataatattttcccaaaattttgggctttaattacggcccgcgtaaataaatacggttattatttgaaaatcatacatctgtgatttaaaccgcttttaatgggtcaacgttgatgtggatttagatatgctgcaaagtgtatctcaccgggacatctggctaggtgcttgaacactcagtagcaacaataaccctagcagcgagttggaacttttctcatgtctttccgaggttgataatgtaaattttgtcgcttctttgattaaagacataacgctccatctcacaatcgcagtttttggtgacaaggcgaacctcaatagccaacatcatttgaatgtcagcttctttctaagagagatgacgcaacgtagcagtggaattcattaaaagatgta

SEQ ID NO: 228356 - DNA, 2054 bp, Cannabis indica
ttttgattctcaattaaaatatttaaaagtaaaaatagttttatagattatgattttagaaaatatttttatttttttaattttaaaaataaaaaaaattaaatttaaaaaatagttactaaacacaaatcaatttcatgcttattaatttttcattaaaaacatagatttgaacattaatgatgaagtttaactcttataaaaagtcagaataactatctaccacttgagttttctattggacaacaatttaattcacatagttgacatattatgattctcttaagcgggcttaagtggatataattgaataaattccactaagaaaactcaactcaaggcctaaaagaaacgaaaaaaaaaaagaacaataaaaagttcttgctttgcttacatatgaatttgtcacaccaattgttggagctaattttaggaaataaaataatatattcttttaattgatgagtaattcaatttcttttatcttaaactcattattacatgggtgacaagccagagttagagcacccacaacaaatgagttacaatagctaaaaggtaaaataaaatagctaagagtttaaaattaagctccatcaaatactttaaactcttagctattatacatattaccaaactccaagaaaataatctctacatatagctcaatgaatagtgaagagataaacatattttatatttttttctttttatttttttgtttctttaattaatttttattcttctttttattcatttgtgtattggttttttttttttttttattaataaaatatatgtgaagatataatatttaaatgatatagagaaaaatataaaaaaaactgatgtatggtgtaatgtaaatgtgtgaggtaaaataaaaaaataaagttttagtgaggtattttaaagaatagaatagagaaactgttgagagtactcttactaaggtaagtgagggtgacaactaaaccaaaaggaagatgccatttcttagaacacttccaataaaatatatcattctttaaattttttttaaaaaattatatacatcaagtaatgcatagctaaggaatttacctaaacactattcattctttcatatgattttatgattattattattatttttctttctaaactctttcatctttatgagtttaataaacatgttactatcctaatggagaagtagaactatgataatgacttagaactttttttcctaacaaacgaaatagggtatttctaatcttgattagcaaaaggtacgtatcaaaccttttatttttgttaatatacactatattttacaaaagaagtttatacataacagactaaatttttttaaaaaaaaaattacagaacaagttaacatataaatttttatttttacgctttaagtttatttatttacaaaaatacgtagtttggtaaaaataataaactatttattaattgttttattgtttatttatagttgtattataattgtcaataggttgtgttatagtttaataatagttatcgtgaggttaattacttattattttttagttgttttcttactttttgctaaaaagtgtatttttatgaataaaaattttaggctgtaaaattgtaaataaaatataaaaaaaataatatttttgaaaatttctcataaaatggaatacaataatatgatgagtaacttcaagcaaaaaaaaaaaagataattacataaaatactaatttttaaaaatttgttatatttctactttcaaagttttttcccttacatatttacggtattctataaaaacacaagaaaacaataaaaaaaaaccatatgaaaataacataaaaaaaataatatataaataaaaattcaacataaaaatacataaaagaccgtatttatgtaaacaaaatctaaaaaactgtaaaaatattgaaaattctgtaaaaaactgtattttttttgttgcttttgtatattttttgaaagggaaatttgattttctatacttacatatacttaatattttttctctaaacacataacattt

SEQ ID NO: 228357 - DNA, 920 bp, Cannabis indica
tgattttggttttgaagttccccatatagagcatagtgggggactttttcttttctggaactcaaacattgatgtaactattcctaattattcggctaatcacattcactgttttgtttcgtctgctgttttttctagttttaatttcactgctttttatggtgcccctaatcctagaaatacagttcacacttgggaaattttatctaggattggtttgtcttgcatttcaataccctggcttgtgataggtgattttaatgatttcttaacttgggatgataagtcaagtggtaatcttagaaatggcccctccactcttttccgtacttttatgaacaaatttcaccttcaggctttacaaccaaatggtcctcgcttgacctggacaaataatggccagggcattagaaacactctggagcgtctcgattgggctgtagagaatagcatttggtatttccaccaccccaacagtggcctcaaccaccttgattttaacagtggccttaaccaccttgatttttttttgttctggccatagatccattcaaatcttgtttgatcagatccaacactcccacattcactaaaagaaagacaaaaaattcctctttgaaaatgtttggctctctgagccacgatggaatgatgtccttctagaagcctggtcttccaatgttcccagtgatgatccttccagtagccttctgtcaaaacaatccacttgtgcaaaatttctttccaactggaagaacaaagctttttttggaatccagagccgaattaaaagagccaaacatgatcttgagcaggctaggaactctgaggacacctctcctgagtcttactctcgacaaaaagcactccaagagaatcttgattctctcttgttcaaggaagaaacgtactggaggcag

SEQ ID NO: 228358 - DNA, 1518 bp, Cannabis indica
caagcgttttttattcggtacttttaaatggatatcctctaaagaagttgcttccccaaagagggttaaggcaaggggatcccttatccccgtttctgtttctacttttccaagaggtgttatccaagttaataatcaaggctgaagatcgaggatcggtacacggaatcaagattacacacttgacacctcccattttctcatctcatgtttgcagatgacaccatcctgtttgctcgtgccaatgaaattgatgcaaggatgttgataaagttcctatcagtttacgagaaatggtcaggccaatcgtgtagtaagtccaagtctggggtgttattctctaagaatttgaataatgaaaggaaaaatggattgcttagcattctcaagatttatcatattcgaggtgatgagaagcatttgggcaatcctttcatattcaagagaaggaaaaaagaagattatgtgaggttgaaagagagcatgactatgaaactggagggagtgaagatgaaattgctatcatatgctgggagattaactctcttaaaatcagtggcctcttcgatggcagtctatgctatgcctacaaacaaaatccccttatcttgttttcgccaactggatgccttgatgaggaaatattggtggcttgtcaatgttgaaaaggatagattcttggctcttaaggcatgggaccagatctgtactctgaaagcttcggggggcttaggcctgcgaaggtgcgaggatatgaataaggcattgttgacaaagttggcctggtacctggcaacaataaagagaagccttggggttgcttgcttgctgaataaatactacaaatatgaaagcttctgggttgtaagtccaaaaagcagcgactctcgtcaatggaagggtaatctggagtcaagggatattcttttcaaaggatcgatgtctatagctgccttggggatatccatcaatttttggaggtagctgtggataccatggacggaataccaggaattctcagacctaatgcaacagatccagttaagaaggtacacgatttctacgattgctgatgtttctttaggtaatgattggaatgatgatattatattccagatttttggccatgatttggggaatcgtatacttcagattcctagaattccctatcctttttcggaccaggtttattggaaacatagtcataagggtaaattttttgttaaatctgcctacttcattgaccaatcttggaggtttgcaccagaaagactcatttggaagtggatttgggatggggggatccatccaaaaatctctgtgttattatggagaattctcaacgaagctattcccataaagaatagacttcccttcgtcggagataaaggatgtaactattgtgtggaaggggaggggaaagtgctattcatttatttcgtgattgtagttttacaaaagctgtgtggctaggtgttggaattattttactaggatattagatctactcacaagtat

SEQ ID NO: 228359 - DNA, 1526 bp, Cannabis indica
ttttttttttaatttttggttgggtttaaggtataatcatgtgaagtgaataaattgtcccacaagactaaatataattaaaagctgagatttcaatttccaaagctcttcaaaatcataagactactactaatatatgcttctgcaacatttttctgaattatgtactttgttgctaaatatcatcaaaatgaaagaaagtcctaccaaatttaaagggattttaacataaacattcatgagttttcattaccatatgattctgttttttataatgaagaacatttggcaatcaaatatctctaaattctataaataatacattgtgatgtgtgttaaaaaataaaaataaaaaaaaatacaatgaaaatacctattttacccatctaagacttgagaatttgcgtcaaaaaaaatattcattaataggtgaatcagatacactaggataacactcgtaaactgatataagcttaccaagcatttacaactaaaaatatgagctattactcgtccaacgagaaatttaactcaataatcttctaaaaaaattacgaaataataaacctatgtttatgtgttacaacacaagagattattttaccaaatacaaggccaataaagatctggaaatcccccgaacctaagaaccgaggtgaagaacaatgacaccccgcaaaagtgactagaactatttgatgaaacgaacctaatagctactttttaaatatcaataaatatctcagaaaataaaaagtgaagtataaactcagcataaatgcaatgaatggtagcacaattaaagcaatggagtttcaatatagttcaagttttctaactatcatttgatcattttgggtggctaatcaaagctcctttcagtaagtcataacatatttaaagcatatgcagagagtagagatggcaaaactcaacaacaacaacaacagaagggacaggtccaataacattaaataaggtctttatgagtaaccctttagcccattcagtgcaacaaacaagctcattaagacaaacaataatctgtaccattgtaaataaaaagtggccatgtcatgagttcccaatatgctaacttccattgccagcagcatagaaagaattggtgacctttttctgaattagcatgaaaactttgcaacgaaactacctcagattttaatggcaaaactacctaagatcgctaaaacacagttttcgtagctgttttgtgggaaatttactaacctttggtagtttattcgccataagaatacgtgtactaataaccctttatcacaatttattatgctaactaactccatttccagcagcatagaaagaattggaacctttttccgaattataatgaaaaatttgcaacaaaactacccgagatcactaaaacacagtttttgtagctatacaccgctaactcttgctgatatggaggaaattttatgtgaaattttacaacctttgctagtttttttcactagcaatttttgccacaagactaactgtaa

SEQ ID NO: 228360 - DNA, 1701 bp, Cannabis indica
ataatcatcaataccttcttcttgattagccatttaaatatatgtattaagaaatgagagggtttttgtctattatttattataagagtttgagaatatgcttagtttatcacttgtgccttttatagagagaaaaatctcgaataaaatttgggttatattttcaaaaaagaatattttatatttatagtactatcacacccaacaaaaatttatagagcattgttattgggcaccagtggtgcctagcaccttctagatgtgtcgacttgcaattggctagcgatactctataaaaattattatattaaactatatgggacccgatacttaattgcactaatagcgatattgacacgtaggagggtgttaggcaccagtggtactctttagcatttctcaaaattatatttaccaactattaattaactaattattaattgtgtgtaaatgtgtgccatattttcaactaaaaatgtattaaaacacaccaaaacgtgtcatttatttcacaacaacaacaaaaattgttggctagcaggtaatgcgaccaaataacatgctatcgttattatttattaattccatttaattgaaatatcaaagtgataagatttgtattaataagatttggagaaaccacattaattgggggaatgtatttaataatttatatgatataataaaaaaaaatgatggtataataatacaaatccagttaaaaaaataaaataaaaaatacaaatacaaatacaaatcttttcaataaataaataaataaatcgtgtggaagaggaatttgtcagcgctttcttcaaaagttcaaactgagaagaaagtggaaaaagtgtgcggacaaacttatcattatcctcattaataattaatcaataaaaatatataataaaattttacaatgcatcatttaaattttttaatctaatccaaacatttttttaatccaattttttttatgatattataaattataaataattaaaatattctgtaaaattttgagaaatttaaaaaatttagcacgcttaaaataaaatttaaactatgtgttgtatatgtggttgttttatttcatactcgtgtgaaatagaatgtttaaatatttctttctatattataaattatattgaatttttcagaattttacaagatgtcttaaacaactataacgtacacgactataaaaaaaataagagtaaaaagttatgaaaaaatagaacaattatgaaatacaaattatgatttcaaatcaaaccaatctattcgtaagtggattggtttgatttcactttataagtttaaagatttaattagtctcgttttgattttgaattcttaaaaattgtaactagtttggattgaaaaaaataataattatacacattttattacacataataatttgtaattaaattcaaccctataattataagtgatatggttggcagttggcacttcaagaatcaagagaacatataaaaattgtgcataattacttgtcaatatagtgaggaaataaaaaagtttgtgtatatttttcagttttgcatattaatatagctagctacttctacttgactctacattattattgatagtaaaatgtttgatgaaacatatattttatagggtaaatacccttttggaccctatgttttgcaaaagttacagattggaccctgt

SEQ ID NO: 228361 - DNA, 1492 bp, Cannabis indica
atttattaaaatattttatttggcttaatttccttttattattattgttcttttaaaatattgattctctctctaaaaatgtttgtttgtatcaatcaatgttgagaagtgtcattctctgtttctttgtccctctttctcttccttttataggggacgattttaaaccgtcggaaagtccacataagcaatgatttttaaccgtcgcctattttacctgttttgcgacagtcgtataggtgacggttataaaatcgatggaaatatttttaaacgacggtttaaaaatatcgagaaaaactatttttgtaatagtgaatctttgtatttatagtttgtatgaaatatatcttttacctatttatattacaaattaaataaagcaaaaatataataaaataccattcgattatgacttatttattaattatatattttacatgggcataatttgaagagctttcaaaaaaattaaactttaaaaagttcatgaattaccaatctaattattgattaattactacacacaaaataaacaaataacttactctttttgtaacatataaaaaatatttatttgtatgtaataaaaaaaaataatatatataaacaattatttattttgtaatataactgtaatgatatttatggtttgtttgatattatgttgtattgtattattgtacaatattatattaaattatattttatagtataattttatataatgttaccctatattttaatttatattgatatattatatatgtatacaatactaaaaaaaatattatataattaaaatataaatatagtttaatataatattatacaatataatattatgtaacggaccattaatatacatacatatatatttgacatgcataaaataaaataaaaaaaataaagagaaaatagtattgaacatatgtatgtatgatatacacatatatacatatatataatataataccgtttggacgaagtagaagaagtcatattgtacaagttcaggaggaggaggaggaggatcagcatcatcaaaagaagcaataatgattgttggtgatgatgatagatgccccagttgtagaagcttcaccaaaataatcaaaatcaaactaatactactcttcatgatgctcatcttgatttttatatatatagtagttttgtgagatcataagtactatatatgtatatgattttgtgttgagttttatctatttatagccagaaaaataaatgatcattgtgaaattgtaattagaggttgagttttagttgttattgatgtaatttaattactataaaaaactttaggataatgcttcaataatagagctattgaaaatgattttatatagagtcatttgtttttaataggtgtcattgtttcattttatgtccatatttaattttaattttttgtttattttttttataattatttgacaaaaatattcatatccacagaaaaaaaaaaaaa

SEQ ID NO: 228362 - DNA, 2344 bp, Cannabis indica
tgtaaaatttatgggtcacatattttgtaagataaatataggtaattaggaattaattttactcgaaatgcataagcaactataacattaaacattttggatcatggatcccacaaagagcttcaagaaacagtttttatgtagacagtataattaaaatagatcacttagttttcatttacaacgtagtattgtattgtattatattgaatttaattatatatatatatattatatttttatataatactatgttaaactttaacttatactaaagtattatatatttaggtgtccatataagttaatcacacaaatagttttacataaaatataatttaatataatattatacaatacaatacagtctaatacggcgtagcaaacgaacccttaatgttctgatggaaacaagccaaataaacagcaggattacaaactctcactcaaagatgaaagcatacgtatcaaaaataaaataaacaaattgctacaagtcatagctaaacaccagaaaaggaatgaaggccacatagcatactaaaactcaatcaactgtccttgtcaaggatattgatcaatggagactgagtaatgtcaccccaaattagcatcttgtcacgtacaatctttcttgaaaattcctctggcatgtcagttagcttcaattcagctagtgtcttcaagttcttcaatccatctgggacttgcaatctctcacaaccccttatctccaagtcccgaagttttttgcagtgctttttcttcaataatcaactctttcaaatcgtttatcttccatatctttaagactagaagctgaggaaatccgtcactcttgcaaaccatgcttgcttccttgtaagagtcagaatataagtatagttgtttaaggttggggagttttcctagcttaggcattggatcatctgtaagagctgaggctgataaggtaatctcggtaagtttgtgaatgtgagtgagttcgtctataaggagaggattcactatcctcccaaataactctatcctagagagattggtaaggctcgaagggctcaagaataggctattgggcttacctgtttcatcaatcgatcttagtcttagagtttgaaggcgcttcagtttagacattcgcgatgacaatctcatttgctcaaatccatccaagtggaacaccattgctaacttcctcagatcgtttgacttgtctaggcaatccttgagagggctatctttatcaacaaacacaccccacaaagtttgaagcttcttcaggaaattgcctcttggatgatgcataaatttgcatcggttgctgtgatgcaagtacagatttcgaagtctctgcagtttccagatggaactggggagagagcggacataagtatgcttcacatccaaggtttcaaggtgcactaagtcacctatgcacgatgcgattctctgcgagtaagtccaccttaagcctagatacttcaaccttctaagctttcctatgctgttgggcaattcaggtttgaaaacgccttcaagatcaagaacctccaattgttgaaaatgaccaagttgaattcccttgcaaagaaagtttccaattgtttctccaggttcttctccttctcgagggtcaaaagttagaaaggagtgaaggtttttgtagtctagttcaaaagtacattttgcaaagccaccttctagaaattcattgcctgcgcgagaaagcaaccaacgtcatctctgggttcatcgtcctgttgaggatcgaaaggtagaaaagagtgaagtctattatggtctcccatatcatcaagttttgagtcaatgtcactgtggatgaggcagaggctgagaccatttttgttaaaatgatgagcgagcctttgaaggcgcatgagcttttgtggtgaatcatgagaaaactggagatatcgtggttgttttgtacatggaaagcggcatgtcttcactttcccgctggtatttttcttaactatctgcacaattccatgatcaatcagctcataaagctgcttctctgcaatttcttcaagagtttcgttatcatctccactttgttctactaatccttctgagacccacaacgtcaataatctcctaacagggatatcaaagtccttgggaaagatttcaaagttctctagtagtttttgtatatgtgaaggaaacttcctctgtccagtttctgtgaaactactttttaacaatggtaatgtggcaagagcctcagaagcggtggcgttctgcttcaacatcatatatccaacacgcatgatgttaagcggtaaagcccaaaacatcttctagcaatatcatgtgc

SEQ ID NO: 228363 - DNA, 1082 bp, Cannabis indica
aaaagaacaaaacaaaatagaacagcaaaatgacgatgaaaaggcagctaacaaccattgtgtggttggattggagcagctaataatagattaaaattaaactcaaaagacaaaagtagcattgagacttgagagtccacatacaacaacataggttacccaaagggacccacccacccacccaccccattatattggattttttttcttaattagaaataaaaaaaagtggggtccatacatataaaaagtatgttagttttagaataatacactgttaggaaaatcagcactcaaatttaccaaaacatagttgtctaaaaatttacatgttttaaagttgcaaactatataagcatgagaggagtatataattgatgtagttgtagagtgtagtagagacattaaagaagaaagaaaggaaaaagctgtatcttataattggcataatgttgttgttggataaaagcacaaacatgtggtgatgaagaagagaagagagaagagacccaatgggggcatggcatggccccatacaattaccttcctttcaactgcccttctttcctattgaccactctgttctgttctcttgtggtttggttttattagcccaccaaaaatcaaatttcttcttcttttctttttatacttcctcttgttttgaaaattgtacctttactttacaaactccattttttttgttgggtaccatgtgtcgtgtaagataagctagctttttggcatttcttcacactcccatcccataatgtttctattgttttttttcgtaaaataatatatatattattaataataaatatatattttcctatattcatgtatttttcattggataccttctacttgtaccaacattacattaacatatacgatagtcctaagagaacattgaatcataggaagttcgcatggactgtaacttacggttatggtaatttatggtatcttatcaagaaaacaaaatctacatttcactttcttcttctctttcttttttctaataaaaattcagaagttttttttctctctcttaaataataaaatgtaccttttttttt

SEQ ID NO: 228364 - DNA, 868 bp, Cannabis indica
aaacccaacaagtccatgatctggggaggaactacctccatccctagtttagttccctaaacaaatcgatcgtaaaattcaccacctattcgctctgaatagcaatagtgttggaccttaggttctagagaaccgctgctaaccttgaaattactcgaggggctacccaaaaaacccttggaagaagagctggttgaaggaactagacgatggtatttaaagagaagactaagcaagtcttcatcgatctggctttcacctcccctaaagtcacgcgggttcatttgtgtaaaaaggcatagggagttgagaaaccaaatgaaataaaaaggcctagacatactagccttaaaactctagtgtacgaagccgatagtcagcaacgcacaagttttaggtgcaaaaaattaaatagacattgggtcttaggctattaatttgctaagatagacttgtcttaagatatgccatacagacttcctatgaaaactgagtattggataagggtggaaagggctcaaaatcaaggagtccttgttaaggttaagtgtaggctagaaccagccaggttagtgagaccaaagccacgtgttggccaaggtcccagaacagaagcacaaatcggtcaggttctcaagcttgaagccacgaaccggccaagttcttaggccaaaattatgtgctggctagggtcataaacaaaccctgtgtgccggccaggggttcttaaggataaaaatcctattttttaaaaactcaaacattgttctttgtgttatttgtgactcaaatagtcaagaatctaaaagaagcccaaaatctaatctttttcatcaagatgtgatacattatatatcctaaagctatc

SEQ ID NO: 228365 - DNA, 980 bp, Cannabis indica
tattatttattttctatgtgagcgattgatcaacttaatcatgtactatatataaaggagagtccaaacaaagttgaggtggcatgctataattttttttttgttgtattttctccctttgtttatatttagaatattagagttattttaaaaaagtcccacatggtttggaaactattgttgtaatatacttttggttatatattgatcactattctttcactttaatttatcacaaagttagtattatttatttatttttatgtgggtgattgaagaacttaattatgtccaattaattgtattttttttttttaaaatgatgcaaatcacaattttgcatttttcaatatttgtataaaaagcatttttgtaaaaagaattattgtaatttttatttaaatatatttaaaacaatatatatatatttatataaaaatatatcaaacaaagtctaaacaaaattgaggtgacatactatgaatctttctttgtattttctcttttttctcctttcttcacatttttttataaatttttctttatatctttagaatgtgagagttattttaaaaagtaacacatggtttagaaactattgtgctgacatagattcagattatatatagatcactattttttcactttagtttatcccaaagttagtgtaatttatttatttttacgtaggtgattgaagaacttaatcatgctcaataagttgtaattttttttaaatatgcaaaccatatattttttaattttttaatttttgtcaagtatttcatataaaaagtattttctcaaaaaaaaaaaattattgtaatttttatttaaatatatttaaaattattacttatataaaataattaaaagataaattgttagtctcccttatattttattttttaaaatgaaaataacacgtatctttgtatttctaaaaaattgtaatatattaaaaattaaaagaaaaaaac

SEQ ID NO: 228366 - DNA, 1011 bp, Cannabis indica
tggactaacataattaagtgttggttgcttagtgtcgatattagcatataatgataactatagatgagcgatgcatggtattatcatcaggtcataatgtgatggacataacgtactaacatgctcaaagcccataaacacgttgtctttaggccagtctattgggtcaagacatctaattctctctcattggatatttaggcccaataaacttattatttctcataaaaacgggcacaatccctattattatgtggagaaataaaatagatatgttagagaattttatagacaaaagaggatgatagagagaaagtattcatgtataccccaagcattttctcttgtttactttgtgtgaaggttgtagaaagcttaaaataaagagctctcaacgtcaattatttaaagtatgtatccattacataatattaaattagtatcattcatatatataagttttgtgttatatgacttgatgagtataatcattattatattttatactcatcacattataattattacaattagtctcaagagcttactcaagtactcatatagatttaaaattgttaaaatattttattttgtattatttggatgcatttctattttttctaaaaaaaaagtttaaaactacatagttttagcctacataaatgatggattaagtttacataacaaatatataatttgtgagtgatattttgtaattatttgacaagtattttggctgactttatattaattttgaagcttttttgagcaagaaatgggtttagttgcaatccaattttaattaataaatgttatagttcaagagaaaatgaaatttggagtacagcacctcaaacggcatcaaaaatagtgtatcggaggctgaaactagatcgggtcagctcgagaggttgaagacgaccccaaaaacgacttgtcatttttttgtatggtttcagttcctttatgtcgcttttcagtattattgtcatttttaaattggctgataaa

SEQ ID NO: 228367 - DNA, 1197 bp, Cannabis indica
gtgctttcgagactattacaagacgccctggctcagggaagaattcaaggcttaaagttaagtagaggtggcccagttctctcccatatatttttcgctgatgatttaagtcggatgggtagagccaatttaaacgaggttgatggtttctgaagttgtctggagaaattctgtttgtggtctggtcaataggttaataaattaaaaacctctattttctttagtaagaacaccccgtagagcatgagaagagagatcaaggaaaagctggggatcgattcgcctgatgggtgtatcaagtatttaggcctgcccctgttccgttcaagaccaaaggacgctgacttcaactttattctagatagtctcacttcgaaactccagggttggaaggctaagactttgtcaaaggcgggtcgtgcaactcttataaaatctgtgggcctttcattgcccatgtatgctatgcagaccaccaacctctctaatcgtatggtcagccgaatcgatggcctggttagggacttctggtggggttttgagaaaggaaatcatgggctccatttaaaagcgtgggacaagttgtgtcttcctaaatctcttggtggcctcagcttccggaaaacaatggaaatgaatcaggcatttctggctaagtggggggcgcatatccttactggtagtcaatcgttgtgctggagagttttaacgacaaaatatttaaaagggaaggattttctcaagtataagtataaaaactctgactcttggttctggaagagtgttgtaaaggctaactctattttaaagagaggtgcttgtaaacttgtggctaatggagagagtactgctatttgggaggatccctggattccccacttcaaaggcttctgtccaaaaccaaaaaggggatgtgcgtcttatctcaaccgtgtgtctgatctgttacttcccaatggacactggaacgtcaataagctgaatgaaaactttgatcatgaaactgttgtagccatcttaaaaggggggcaaccctctggaagtggcactgacagatggatatggactcaaactagtaatggtagtttctcgtgtaagtcggcttatcttgttcaagcgttggatagagccccccagtgtgaggttgccctaagcctctggaacaagctctggtatagcaaaatcctggaacgacac

SEQ ID NO: 228368 - DNA, 1365 bp, Cannabis indica
tttgatttttattaatgttttaagttgataattaataaaataatacccttttatcattatctcattttacaaaaatattaaattagaaacaaagatacctttctctccaaagctctctctttctcgagctccgtagaacagctagggtttgtgattgttttttaataattgatggaggttttagcaagctttaagtgtatttaagtcacggtaaggttcttagcttctctttcttcggtttaaagagctttaagttgagattttttgcatgcatgattttgaaagattgagttatgtagctgttgttagtgtttaattttgtattcagaagattatttaagtttagatatgttgatttgagctagttgttatggttgttaatagatgtaaccaagttttgagttttagaactcaaacttggagctttaatggtgaaatttgattctgagtttgggtactagttttattgcttagattatgtttattgaggtataatatgcagatctggaaggtttggtaaggtttggagtcgatttggttgagatttgaacttgtttggattttctggggaaacctgttttcgcagttggaattcacaaaaaattccggttgtcgattcgttctagtttcaggtttctgtttggttaattccctgcttgtttagggtattgccatattaagttgcagtagataggttttttgtttgaaacctaagtccccggttgtgatttagcatatcacttatccatgttgtaatcgatgtgatttaggagcctataattcgccgagcagttgttccactcaggttggccgacacacatgaatccgaaattgaggtaagattagtataatgttatgcatatatttatacatgtttagcgtacatgttagtttccatcagaataagcaaacctatagccatcaaattagcatatcagggcatcagtgaggtgtacatagagatgcaccgagatgcgaccagatatatgctagaatatcagatagtatgagtgatctgctaccacatcaatatgactagagtactgagtatacgttggattcgcagttaatcatactttgttagaacgttcctaacccagttagggttatggttgggtgtatgggcacttgattataattcaggatattattatgttttatgttatgcttttcttactgagcctgtcgactcacagtgttatttccatgtgtaggtaagggcaaggctaaagctgaggagccgtgagagggagcaggtgaagattgtacatgtcacgacgattaggcctggagcatacgtctttgggacatcagggcttattttgtatagccgctaggcgacaaacttttgttatatacagttaa

SEQ ID NO: 228369 - DNA, 3889 bp, Cannabis indica
gtagtaaatatagatcctggtaaaacatattccacattaacttcctctactaatcatatagactgtataattacttttgctaatgatatgaaatggcatattacttgttattatggctctccttatcccattcataagcatgattcttggcttttacttagtagaatctttgatgtttccccctctatgccttggatggtttttgatgattttaatgactatctatctataaattatacaaatactccatcccagccccctgcctatgccattacgcatttcagctcttttctgcacaaattcaacatgctgctgttgccacccattgggcacaaattcacttggaagcatggtcgtctttatgagcggttagattggtgcattgtcaattcatattggaaagatctcttcccaagtgcatcccatttttacctccctttccatggatttaatcatagacctcttaagttaacccttcaagtgcttcacttaaacccatcgcgttcaaataatttttctttgaaaatcattggctcaccgaggcaaacttttataatgttgtgaactcctcttcgtaaattcggttcctgctctttcaactgatagcctccaaaatttcttggccaaacaacaatcctgtactaatgatcttgtccattggtctcagcaatctaaccccctcaggaaatgaatcaaatcccttcagattgaaattgataaaatccatagtgccacgatcactgatgaacatgatattcagtgtgtaaagatgaaatatattggaaacagagatctagggtggcttggctcaaatctggtgataaaaataccaagtattttcatcataaagccactgccaggaatagaaacaatctcactcgatccataactcttgaggatggatctgtggtcaacaggcttgttgatattgaagcgcagtttgttagtttctattcctctctgcatacctcccagggaagagataatgatgcgataaacattgttctttcaggtatttccaacacccttgcccctgatcaggttttactgctagataaaccttactctgaggatgaaatcaagaatgcgcttttctctcttttgggtgagaaagcccctagttctgatgggttcaatgctttcttttatcagaagaattggtccactctcagaactgagttcacctctgccattctggccattcttaatcatgattcaaacatatctctcatcaatgagtttgtcattgtccttatccctaaaaagaaaaatgcgtgcaaagttcgtgatttccgacccatcagtctctgcactaccatgtacaaagtggttgcaaaagtcctagctaataggatcaaacctgttcttgactctctcatttctaaaaatcaaagtgctttcctgtctgactgtttaatttttgataacatcttccttgataatgaagttgttaatgccatcactatagaaagcgaggttgtataggttgggccactcttaagttagacatggaaaaagcctttgatagagtggaatggagttttgttgatgctattctcaaatgtgttggttttccaaattgttttgtcaatctcatccttagatgtatttcttcggtcacttttagactcttgattaatggtaaactttctgaaagcttccccttctccagaggcattagaaagggtgatcctttatccccttacctttttttgatgatcgctgaaggtctctctgctgctatccgcgtctatgaggaacaaagaacgtttactggttttgccatttgtagaaatgctcctattgtttcccaccttctctttacggatgacagcctttcactactgttaacgacacctcttgcagggtcatccaagacatcctttccatccacaatcatgccactggccaaatcctctatccttttctcacccaataccagccctatggacaaaacaaagttctgcaataagttgagactcagtaatgaaagcttcatcagtaaataccttgggatccctcactgctctggcaaaattaaccattctgtgtttcattacctagtccaaaatgtttcttccaaaatgagtgtgtggaactctaaatatttttccagagcgggaaaagaaactctcataaaagaagtggtccaagcagttccttcttatgccatgtcttgtttcaaacttccccttcgcacaactaagcagctgcaaagcctcattgccaacttctggtggagttccttaaaccacaagaaaaaaatacattggaaaaattgaaacagtctttgtgtctctaaatttactgggggtcttagtttccgatccatcacattgcaaaatcaagcatcactgcccaaacaagcctggagagtcttgtccaacccttcttcccttctttcctccctactcaaacccaaatactttaaacggaatgacttcctttctgcccatgttggtcacaaccactctaatacctggaaatgtctactttgggggagagaccttcttctcaaaggccttatctggagagttggaaaaggtacaaccatccctatcactgacaatcgatgggctcctggacttcatagccaaatctttatgaacattgaccatcttagtgacaaaactatctctttcttcattgacatggatcatacttggaatcgtaatagactaaagctttaccttcctgactaccaagtagaatctactctccaagttcccatttattcaactagataggatagtctcatttggggtcaccataattcaggtttgtttactgtcaactcggcttaccaccttgcacactctcttaccctaactcactcctcctccacttcgaatcaggctagcttaacttcatggtggaagcatttatggtccttaaatgttccccctaaaataaaacactttgtttggaaagccttccaccacattctcccttgtgcttataatctcttaaaaaaaaagtatcccttcacccttttgttttggttgcaaatcttatgaggaaactgtctctcatgccctcatagactgtcgtagagccaaggattcgtgggagagaacttctttcaaacagttttacaaacaaaataagcattgtgacattagagagttttttctccggggatatgattttttttaacaaaacaggaatttagtacttttgtgtgtgttatttggcttatatggacacaaagaaatgaacttcttttctagaaaaaaccacattatgttcatgattttgagacctatgctaacacttatttccaagaataattaatggctcaacattctcaaagtcctgtttcttcaacaacaggaaaaccaaatcctcaagtttctattgtaactgacagtgaccctcctagcatttctccccagctagttgttggtgaatacatcctaaatgtggatgcgacattagatttaaaaagcaatcatactgggttgggtgtgctgtcatccgaaattggaatggcaaactggtggctactttctcttctccatggatgggcgctcactcagccaccctagctgaagcacaagctcttcttgctggcctcacttggtgtaagttagacatccctctaaagtgcattgcatcagactaccttcagctagtaaagaaagtgaataatttcaaagaagaccagccagcactttcggggatcatcacttgtatcatcaactccttatctgcttttcctagtaactcccttaatcatgtttcaagagtgctaaacacattggcacacaatgaagcaagggattctttacgctatgatagggatcgtataaagagagtttgatgactctcttgttttcaagattgtaattgtatcttagtcctttccttcttgtgggttgttgcaatt

SEQ ID NO: 228370 - DNA, 2597 bp, Cannabis indica
tatatataataatgtgtgatatcataattatagcacctatgttactattagagatgctcttaggtcaatatattctcacggctggtcctggtgatatatgatctctctaaactttttttacctttacaaattaagatggtttgatttaaagagcattattatttaattttactaataaaagtctcatgtggacaaataaattatggatacgatttagtacatgttagtttgaggtataatttagtacatattaaagttttagaaatataatttaatacatgaacaattttttgttgataaagttgaataaaattagatggagttcttaaatcaacaatctgagcagtttacaaaatttaacgattctaaaaatttgaaaaaattaatttagtacatatcgggaaaaaaaaatagcctatattattgaataattagccaagcctataagacaatatttatgctacatatttgtgagtgcatatataaatgtaaaaggtaattgctttcgtaaggagtgattatgaagtccagcgaatgttccactaatctttgcagaataaagagttttgttcattagtttaataatttcttcaataagaaaatagtaaaaatacttgattttaattgtatcctacggtgcgtgtgataagaacgtgcatagtctgaaaatgaaaatccactaacaaatacttgcccacagaaaagaataattctcaggatgaaatcatgcatgttgccagttacatacattttttatttaaaacatgactgcatttgatataaataatgttaatcaatattgttgggccatcaaacgtttagacaacttgtctaggtaagataatcctccagcaaagtaagaattcaaaagacattatttagagtgtctgtaaacgtattcagcaaacttctggacaactaactccgtaccatgctcattaattacaagatcccacaatattagaatttaattcttaagatatcgcctccggattatattttctcagtattgaaatatagtaattgggtattaaattagagaaatgctaaagggtaccaatagtgcctaggatcctcctatgtgtcaatatcgttattgctccaactaagtatcaagtaccatgtaattaatataatagtttttaagaagtatcgctagcccatcgcaacgcaacatagtcgagaaggtgctaggcaccattggcgcctaatagcaatgcttattaacttaatgtgtctttattatccttaattgtaagatacgaattggatagctattaatatggtgtcgcatctacatcagcatacaatcgtcacctcatgggtcgggctccaccaaataggtccaaatcaatatgttatttgtatttaccctatcagtcggcaaagtgaaaacgaataagaaccataacactatatatataagaacaccaacccatgcaaattgttgaaatctcattcctcaattgctcatgcaaattctagggttcgaacacctctataaatcccaaggcttttctcgtcttagcataataatattggctcgtcgacaaaaactcattaatgctccaaccacataaaaaatttagcgttatctattcattatttatctattactttatctttcgtttatattttatcggttactaaagatttgggttaaaattttggtgctttgattgagagttgacagaagcagtgataccatgaaaggttgcatactgcaaccatggtactcaccctaaacagaactgtcggccgtgatggagatgctcttatgggcaacgtagatcttgcatccaggcgaagacagtagtcgatagagatccaacagaagcaaccaagcatcctgcgaaaaagactaaacgaaatgaaatgtacgttgatgaaaatctcatcaatgagggacaggaggaaggtcccgaagacgaagatgatgggaaagaaaaagatgatgagcgatattattacgagccagatcccgcagtcattgaaatggccaaagaactcgccgaaaccaagctaaaactggtggcacaagaagaattttctccccaaatgcaagtcaccttggcaagactcactacaagaaagcctagttttaccggcgcaattggtcaattgcgccggcaaaagttgtcagcataaatgaaatgctgaacttcatattggattcagcaataacttttactggcgcaatgaaatgtgctggtaaaagatcaaaaatgaacgccaaatggcgcgaacacatgtccacttctgtaaggcttttgccggcgcaaaattgcgccggtaaaagttagcaaattttggtgggaatcttgaccgcccacgtgaaattttgggaggaaaaaatctcgcgtggaaagtggtggtaggtgggattacttttaccggcgcattgatgcgccggtaaaagtgtttaacgaaacgatgcgtttgtgtttagggttatatgaccacttttaccgacgcaattcaatgcgctggtaaaagtattcatatatgccccttcgaccagcagaccccatttccctttttttttttcagaatttttttttctctcaattcctccatccctctctttcaatctcact

SEQ ID NO: 228371 - DNA, 1678 bp, Cannabis indica
tgtattttactcaagctaatttcaggcatatatgagtaaaattacagtcatgtgaacaacataaaaagccacaaccaaccatggccatctttactagctagtggtgccatgaagaaggaaaaaaaaaacagatttatttcagaatttacctgatttggagtagtttcaaccacgagtttcttcaattctttgtccagagcaagccactgccaagacaaagtacataattttttttattatttatttttttttaagaaaggaagggatagattgtagattttaatagcataagaggtaaaacataccacccatcctgaaccctgcaaagcagcaccttctgtgcttatttttttcaccaatgcatctaaagagccaaagtctgtgtctatagcccagcccagagatccttttgggggttcaccaccaccttcctgcaatgcataaattattaggagaagcaatctttacttcattaatacataatagaagtgaacacaagggcatgaaaaaagaggaaaaaaaatgaacttacactaataggagtcaggttcttccagaaaattgagtgattgatatgacctgcagaaaacaataaaagggtgaactttgaaaatttatttttcagcaatgattatataagaagataaaaaatcttctaaatataaaactaatgaaaattgctcaaatttgatagatagaaaatatatgggtccccaaaagttcttttcccctttccttagcaacaaagggtatccataaagtctgtacccgcacaattttatgaaagccttatataaaacaaaacaattctcccaacttagctacctaagaacatttactatatagatattaggcaatcacccaaaattctagctagcacactattcctaagaaattgaatcaagaagcaaactgtagacaagcataaagttccaaggtcaattgattcccatttcacaccttacccttttgggtatatcgtgttgcctcaacaaccatattatcatacaatctcgattaatttaaagaaaataacaaatcaaaatcaggactacgactaacattacggtattttcagctcgcactggaaaaccaggtaaaacaataatcaaaaaattcaaagcacaataatgcaaagggtagtaagaggagaagtcaacgaacctccgccattgaacttgatggcactctgcaatttggcgacggtagcggagtcacccttggaaatggcctcatgtaactgctcaagagctttgttatagttggtgacataagcctgatggtgcttctggtgatggagcttcatgatttcgccgctaatggcgggctcgagagcgccatagtcgtagggaaggtcggggagggagaaggtttggaggccgcgagagaggacgatttgagaagtgggttgaggatgaaaccctgatctgagtaattttttggtgaagataactcggagagccatggaaatggcgaggcagtagagtaaggaagctgaggagaagctagccaagtctgaaatgagtaaaagcaaagcctggccaagcaattaccaaaatatatatttatacgcaaaacaaaaacattgtacggaaatggaaagggaatcggaatagagcagcttgtaaaaaccatgggcctattggtcattttctcaaatcaatgagcctccttgtct

SEQ ID NO: 228372 - DNA, 1401 bp, Cannabis indica
aaaaccatcccaatacctgtggctagagcatcagtactcagggcagcatcaacaaaaagagcagtggtcgatggaagcaaaatgtgatccacaccagcagggtaacgattattagtcatgctggaaacagaggattgaatttgagcgtcctggtaatcctgcagaaaacttgagacaaaatcttgaacaatatcaattacactgggtttttgaaaaagatgggtatttctgatattccagatttgccaaatgataccaaaaaacaagggaaggtcagctctggggattaaggtaaggctatgaaggtaaaaatctctgatatcaagcctacgatagtcagcaaaaaaccgtttaaacttagagtgatgccaaatggttttaactctgggacagtgaagaagagcatgagaaaccgactctgcacttcccccacaatacgaacagcaagagcttgggatagcatacttgtggaaaaggttgagagcacaaggaagaatatggttaaaagccttccaggtgaagtgcttgattttaggaggaattttcaaagtcctgagagttttccaccaatccttaaaagggttaggatcagaagaggatggagaagtagtgagggcagtggactgagcaaggtgataggcagaattgactgtaagaatgacagagtgatgaaaaccccaaatgagagaatcagtgggaccaagatccaaaggaatattgaggacaacatttgcttgatttattttaacgaaaagagaaaaatattaaaggacaccttaagtatcaagcactacaagaggtgttatttatctattgatacaatttaatattaaatctcacacattttaaatcaataaacaatataaaaattattaactaatcataaggtaccacattattacgatgttagacgttgtaaggtacctaataaaaatgccggtgaaaaaattacgtaagttaacatgtgcagtaacaacaaatgaggagtagtacaaatgttttctatagaaaaaactaacatttcttatttatttattaaacaactagcattaaattgttaatgattgaatggttaaaaattttagaaatttaaatacttaaatattgttaaagttggatttaagatttaatgggtgatgacattgtttagtgactataccgtaaatgttattaggtggctattgaaagagatgttaagatttggttgacattgaccctttaattttaaaataaaaatggtcaagttttaatccagaacgagtacgttttcctacttctcatcgacaatgaaaacgaaaccaaaattgattttctctacgatcaatagtagtgtttgtcttttcttgatttatgcaacggaattttttttttctacgaatttttgacatgtactaaattatg

SEQ ID NO: 228373 - DNA, 1439 bp, Cannabis indica
tgggttagaaattgagtttagatctttttataacttaagtgcgaatactagcttattattaagtccaagtttctagctaatatggattcataccatctatgggttcatattgtctatggattaaacaaacatttattttgagtcgagttaaaaccatctctgccgaaggacgatttgatggttgtctatcgaacaattgaagcattatcttcttgtagacatcagtagccccaagttgatttatctcaatcattttatcttcaccatctagtttcaatagcttgctcaaaacagtcttcttttgttgatcagtactgaactttgatgcacactcatacaatattacaccaattgaaaacgtatcggagttggtagaaatcttgtatgtttcttcatatgcaaaatgggtcagaagtatatgcctcagcttgtttgtaaaaatgcttgtcataagagctggagataatttctgtcacctttcttgctgccatgagaataaaagtatacaatacattttcaatttctttaatttaagggtgatacgaagaaaaagaagtaaacaaataaactttacctacattaaaatcagccaagcggatattgcatagtccaaaaatatattatttggcctaacatccatatgaattatgcccctcacatggatgtgatgaagagcttttaagagtccttcaaaaagcttgaccatgttacctctgtgaatactgcttatgatatctccgagtgtctctttacagagttacaattgtatttagagacaaggaagatgtggggttgagtctcttgctctcaatcatttcatcttcttctcaacccaaaactaagaaaaaaaagaaaagcttaattagtaaaaaaaaaaaacaaaacatttaacttaattataaattaaaacaattgaactatttagttgtgtaccgaataatatctgattatgtttggatggtccaacgaagctaagaatttatcctccctacaaataaataccaatatttaataacaataaaaatgttatagtatgcattaatttaatttaatttaagagtgtgtaacattattaccttatacaatatttaaagtcgaaatcttcaaccccctcaagaatcgatacctttttgatggtgtatggtgctttgtccaaattattgttacatttagtaactacggcaaaacctcctaaaccttcatgaaatatgcacatataaattttattttgtcgagcagattgtagaatgaaaacaaggcagtgcacatgaaaaataattctctaccaattgattagctatttataaacgcattatttgcatacatactaatcttatttcttattcccgactcttgttgggaaattttttaatttttatgtatttttcgaatttagatctgtattaaagtattatctattttattactttatagtttac

SEQ ID NO: 228374 - DNA, 2804 bp, Cannabis indica
aaatgcatttcagaattcaacaataacagcataaataattatttaaatagctctaaataattttcataattaaacatgattaactgctaatttccaaattaaactaagcggtctttacatatttggctccacttctcccttaaactctcctttgctgactgacagtggtagttttgattcaggttcggctgggggaaatgtctctcaaattccttcacctgaatcactccatcactcaccagcttcctcagtttcccaacctaaaattgtgtctactcatcccatgatcacccgtgccaaggatggaatttttaaaccgaaaacttatctaagtcatgcaaaggagatcgctgccattactgaaccagtaagtgttgaagctgccttatctcacaaagggtggaacagccatgaatactgaagttattgctcttaaagccaaaaatacatgggttttggttcctccttcaagtgcctacaacctgattgggaacaagtgggtttttcgaatcaaattgaactcacatggtacagttcaaaagctaaaagctcgacttgttgcaaaggggtttcatcaacgacctggcttagattttggggagacttttagtccagttatcaaagcctcaaccgttcgaattattctaaccattgctgtgacaagaggatgggagatcaaacaactggacataaataatgcttttctgaacagtgatttagaggaagatgtttacatggcacaacccgaaggttttgttgatccaagcaaaccagactatgtttgcaaactgaacaagtcattgtatggcttgaaacaagctccaagagcttggtttgacaagttaaagaatacactgaccgagtggaaattcaagaattcaaagtcagacacatccttgttcttttacagagataaaaatgtaatcattcttgtcctaatctatgtggatgatataattgtcacaggaaatgatgctcaaagaatgaggaacttcattagtgagctcaacaaactttttgcattgaaagatcttggagagcttcactacttcttgggaattgaagttcatagggatgaatctggcctttacttaacgcaaaccaagtacatagaagatttgttgagaaaaactaatatgaccaatttgaagtcgtgcccaactcctgttactactggcaagccaatgtccaaaaatgatggtgaattgatgcataaccccactgcctacagaagttttattgggacgcttcaatatctctgtcatactcggcccgacatagcctatgcagtaaataaattaagtcaattcttacaagctcccactcttactcactggagtggagcaaagagagtgctaaggtatctcaaaggtactatgactcaaggccttcacatatgcagcagcaacaaactgtcattaaccggtttctcagatgccgattgggcatgttgtccagatgatagacgctcaattgatggctattatgtgtatttgggagaaaccttgatatcttggtcctccaagaaacaagctattgtatccagatcaagcactgaatttgaatatcgtgctcttgcacatgttgctgctgaaattttgtggatagaatcactcttggaagagcttaacttcaagttctcaaagccttcagtcacttggtgtgacaacattagtgtaggggccttggctgctaatcctgtatatcatgccagaacgaaacatatcgaaattgacatccattatgtccgtgacagggtgctgcagaaaaagcttgatgttcgttacatcgcttcacatgatcagatagctgatttgttcaccaaagggttgtctcactcaaggtttgcattccttgttgacaaactcggggtaaggacttcccccattcgtttgagaggggttgttgaggaatgacataaatcctatacaacctccctactgtaaggtcccatgttcctgcatcaacaacctgcaattcgatttcctctgctgtgacaagtgtccctgtgtggtcctaattctgttattgtgtaatgattgcaagttgttagaatattccctttttgcaaatctttatttggattgctgcactaacagttgtacgagccgttggctcactcccttgtaaaccttttcttataaatagaaattgctctggctcattattgattgagctgagttttttgataaaatacattgttcaatattttatctaaatcatacaagaaaaagtctccacaatagaagaagcattgaattggctaatagaaaatatgattgcccaaaactctgtcttaaaacgggtagaaaagtaaattacccgcataaagacaataattaaacaacaatcacaagacacacgatcattgaaaagttgacaaacaagattcaacagacccatgacaaacatgaccatcataaaatcaaattctgttataatctcattattacaggccaaagaagctgaaatgaaagcctaaaacccagtatgaatctcaaaaaaagcaatttttttcaaaaagaatcatattctacagggtctcaatcaacgctttttggtggaaatacaaccctttttggagcaaatacactatcagtactatggcagttctcaataaaagacttctccgacatcacttttttcggcctcttcacaagaagactcacttctctgacttagacgaatgcttgacgaaaatcaacaacaacaacaaagaactaaaaagggacagaagacaaaaagcctagataatatcctccacaagcatcttctctatcgaaaaggtgttgggttttgtgccc

SEQ ID NO: 228375 - DNA, 1412 bp, Cannabis indica
aaaaaacactttttagtaatttgatcaaggtgttacaagggatgtaccaagctcctccatatgttctttttttttttttttttttaagtttttttcaagatcaaagtattgttgtaattatctttcaaactacaaaaacaagcaaaagtaataagaataacatattgaataatggaaacactaacctcattttagtatgctaagggtcagtgtgctctttaataaacaaaaataagttatctgaacatttctttttttttttagaaaaaagaaaaaatccaaattggcctaaagtcttaacagagtctgaaatctatcacgaggatccatcatccaacagaattaacaaaaatatgtaagaaagggtaagttacaccagtgaaaggaaatcacttaccaggttggtgatgatactacaatagtgagaagccattggatctgccttcttaataacaagatttagcccatcatcaagttgtacaatccaaaccacatcaaatttatcggcaaaacaaatatatagaccatcattactgattgcaacagcagtgactcttttctttgagcaccttttcaaaaatctaacacaatatactatttagggtttgaactcaaaatatacgaaatcacattcttgccaaaagggatattactccttgtgaaatgtagcccaatgtattgtatatgtattgtagcatgcaaatgtagatacataacaacttcattctgtctaaagtaaaacacacgtgacaaaataataccacataaataaaattgtaaatttcatttccataaagttttgttccaacactacgaaaatttaaaggaataaaatatgatcatcatgttacatcattttttactttaaagatatacattatgtaaactttggcatcgaattccatcatcaagtactgccccttttcataattaacaaaagaccaataatcgaatgaggaataatatcagcaacagagatagacaaacatttttggcattcaaaacatgaattaccattagctatagcaaaaaagttcttggcaccgaaaaaaacaaacacagagatagagaagtagaaaaaaggagagaaaggcatcacaaaaattagtcatcaataattgaattgaaaatttattattggacatacccataacgaataacgaataaagcaaaccttagcaccaccgtgaagaatagtccgaccaaagtaatgtgtccttgttccaaaagagaaagtgaagaaaacagagcaaagctaaaattgcattgtgacaaaactaacaacagcctgcagcagtgataagaaaactcagttataataataataataatatcacagatcggaaaataaattcacaatatcatgctggaaaatatcacagaaaatggttgtttaagaaaacataaattac

SEQ ID NO: 228376 - DNA, 1026 bp, Cannabis indica
tcttgagggcttggacaatataagccgatttacaggagaattttccatttccttcctttgtccaaatccagtggtctctcccctgacccgtagggctaccaccttttaaaatgactccaattgtttctttgtcaaaaaggctatgaagcttctggagatcccaattacccctttcagtcaacagatctgccacttttccagatagagggattgtcccccctttggccgttggacaaaagttcttaccatgagtgatccaagggtcatcccatatattcatatcctttccatcagtgattactttgcatgcaccttgtctcaggatatcattagcttttacaacattcttccaaaactaggaatcagtagatttggccttgcatttaagcatatacgtacctctcaagtatttagctctcaagatttggcagcaaagcgattgggaaccggtgagcagtttctagccccatttagccaaaaagggcaaattcatttctttggtttttcgaaagccaaggcccccacgggatttaggaagacacatcttatcccaagatttcaagtgcatcccatggttgcctttttcaaaaccccaccaaaaattcctgaccatatcatcaatttttgtagcgagctgaatagacagtttggtagtttgcatagcgtatatcggcatagccaggcccacagatttaatgagaatagcatgtcctgccttggacaaaattttttgctttccatccctgtaatttggctgtcaggttttccagaataaagttgtaatccgcgtccttgtgtcttgatcggaacagagggaaaccaaggtatttgatgttgccttccggacttccaataccaagggcatttctgatatcttccctcatcctctctagggtattgttgctgaagaagatagatgttttgggtttattaacacattgtccggaccaatcacaaaatttatcaagacaattccacatggccatggcctcccccatattcactttcccaaccaagataagatca

SEQ ID NO: 228377 - DNA, 3721 bp, Cannabis indica
ttgaatcgaattggacacaagtctaatacgtttataatggcatcccaagccaatcaagtgttatatatgagcgatccattagatgcacgctggtcagttatgttaacgacgcaaccaaaagattgtgataatcaagagcctaatggcgatgatctcatacttagtgaccgaattcatcaaatcactccaccacctattgatgtcactgttggggatgatatcatatcatctcgagatcatggtgaaggattatgagtgaacgaagccatcaatagatgagtcatcaaacacgtatttgtatttagtctttttgatatatttacttttagctatcaatttacatatttttctatattctaatgtatgttttcaaatttgcataagattatccatcatgggaccaggtggggatgatgagtggagtgcttggttagattataatgatgatgatgatccatccgtgctaggaggatctagtgttgatcctgaacaaccatccatggaagaagaatgtagtgttgtgactaaacaaccaacacaagaaaatactcacggaaaacgcaaacagagagacataacaaaaatggatagcatgggaaaaaacttgaaggttgagtacaataactacatataaaattggggaaaaagagtgacgacaaaagttacatgaatcggaacatggctgtgaattaatgttccacttcgagacataccatggcctaaagtgagttaggacattaaaaactaattgtgggatgacataaagctaaaattaattttattattcgagttatttactattgattgtacgaagtacttttaactatgattatcaatttatcaggccacgtttgatataccggagaaagacaagaaattaaccatttttaaaggtgaagagaggtggaaggattggaaaaaataccctaacagattgtatttttaaagtcaaagatgtggctccccaacttctcaaaaattcactgaaactgtatgaaagcataattgatttgcaacgatggagagagtttgtggctacgagattgagtctagactttgaggtggggaggaaaaaggcccatcagagcagggcaaaaaatatttacaaccatcacatcagacgaggtggtgtaaggatggtttaagaaaaaatggacaaagagggaggccaccaaattaccgaatttgatagatctaaaatatagaaaagaattcacatgaacacgaaagacgaggtggagggcctagctacaaaaactgttaaatggattgtaagtttaaagtataatttcatttatattgttatgtttcataatttatttctaactctatttgttatgtttctaggaaaactttcgtaagcaagtggaatatggagttgtgcatgtggagggtaagagggacgtgttgaccatggcgctagggatagatgagcatggtggtcgggttcgagccatgggtatcagcattacccatatcaaatattttagtacaccatgccctaaaaggaaaaacacggatgggtcaaacccggcatcattaaatttggagagaggcattcaggagattcagaaaagcaacaaaaagctacagaagaaaatggatgagctcattcgtctagttagttctcagcatagtagcattacaggcacatcccatgcgtctggttcttctattggaggagcatcgaatgaacaagcccatgctgacattgcctctgatcctatagcaaaacaatcgattcctaccaatgtctctactccactagctgccaatgtctctactctatcaccatcacaattcaaaaagatttctgctccagcagcaacacctccacctactagtaataatttaaaagaggtaatcttaatgttattttatgaactaatctaatgcaaaattataaatacggtcaatttacaacctgagttgttgcttgtttgatttggatatgcagaccttactgtgttggatgcactgtcagttggagattagtgggatggtaccaaaggttgctttggggcacattgtgaaggagaaatgtttgaaagatggaaagttcttgattcataatgatgaatacctatactaagattatcgtcgggtattcatcaaagaagtcagtgtggagaaaacactacttccgtgtcccatagcccaagatgcattcatattagtaggtcaagcgataaaaagttgcgtagcatggccaaaagactatcttacacgtgttggaaaatacttggtacatgttttattttgtttacttaacatattgtgtttattgattaatgacatttttaactttatttttttccatatatatagacacaatcacccatcaagcaaccttagaagcaatccatgaggagaggcagataagcctctgaaaatttactcggtccttaaacatagcctctaaaataccctgagaggtcgagtaagccaacatgccatggctgttatttctaaccatgacaaactagctcaatcattaccttctggaactccgtcaaaaggtagttgaagtcgtccataatcaaattccaggttgcttatgatctatttcgggtcaagatgactccatttggcttgttaaaaacaatactcatgaattgtgcaccatgaattactttagagcccaaccgataggagtttggtgcatttatgatttctaactcttaataataaacttgatcatatttttcaatagcgacggttattaactatgactttttatcaggcacattaaagaaagattattagacatcaatgggataaacatagtatataaattttttaaatttgactgtaattgccaccgaagtaggggttgacagtaaccgttgtcaagcactagtcactcgtatgactaggattaccaatctagataaatgggttattgctcctacaacaatcagtatgtagatttaaaatgaatcattttagcatttataactcttcataatatttattattattatgtattaacagttttacatatatttattcgtgcaggataataattaattggatgcttatactcatccaaccaagtacgccgatggtggtgtacttggattcaggcaatgacgacgtaccagatgatttaaaattcatcattttcccgtaagttttatatctaatatcccaatatgtaagcgtattttaatttataaatttatatatgctaactttacctttttgtgttgatcgttcaccatatacaatcaaatggcaggacgacctgatagacctatctagtagataactcctatatgtcctgaacaacctgacaacaaacaatgtggatactacgtcatgaaattcattaaaatttttatgaccgtagaagatccaatacacgtgttgacacaactagtaaaataattaataagtactataataaatattattttttattaaatagcatatgataattgtctttactaattaatatatacttttaattacatggtatgttcttcattttgtacacaaatgacgagataaatattatgcatgatcggtagattctttacgtgaaagtgaaagcagaatgacaacggaccttgttaataagtgtgtatatatctcaatttattgttactatatagatttgtaaatatatttagatgattattagcgttagtttaattattgttactataaagatttttaaatatatttagatgatattagcgttagtttaattatagtt

SEQ ID NO: 228378 - DNA, 741 bp, Cannabis indica
gatggtaatggagctacctactagttttatttcttgagagtaattacaaaaaaagactaattgtttaagctctagtttctagagagataaactggagagggatgctctccccttgttggtagatttttgaatatgagaaatgaacttaggaagctctccttttataggtgaaggaggcctttaaaatagggaaaaatacaagttcgctattttggtgttaaaaatataacttcgccaatgaatatcatttccttgtgtagtagccactactgccactctattgtggcagtgcctatcaaaattgatgggcactgccatttccgaatggcagttgtccgataagggatttataaagccttgggtcactttttcttacttttatttgatatatagatgttgaaaatgtaacttcgctagtgcaaccattttccttatgcaaggcccgaccactgccatttccttatgagatcgttcacaagatctataccttcaaggatcacttgtgaggatcagccatggcaggctacagggtttccctggtttggattggtcagaagctcctaatttttagaatacctcgtttccggctttggttgtggcttgaagtctttaggaacaaatttaaatggcattgtgcgtctgggtgagatgagtttggaaagatgaacttctgaactgagaagggacattctagtagaaaagagatgatccattttcaaaatggatctcaccaaaaagcca

SEQ ID NO: 228379 - DNA, 1768 bp, Cannabis indica
atgcattgtagtggacagtaggtaatatggtattgaagaaaattcacttttattagcaagattgtcattacacaaactgtctgaaatagcagtagcattacaatcagtttttgaattttgaacagatttattaagaggacaagagcaagaactagaagtaacaagattgcactcaagagagtgaggagacaattgagagtgatcatctcctaactggtacaaatcattcttgagaatccctttgagtagaacagcacccgtttgcttgtccttgacaaaacaacaagatttgtgaaattcaaggaaaacattgttatctctagttaatttagaaacactaactagattcttggtaatggaagggacatgtaaaatagatttaagtttgagaggagtggaatttaaagaagagagagtagtggaacctatatgagaaatgagcaatttcttaccatcccctacagcaaccgattcttgaccatggtaaggagtgactgaatcaatgttatccatagcaaatgcaacatgattagttgcacctgtgtccacataccagccaaggtcatcaccaaaatcagggagagtttgagtgagatgcacttgagaatcaacaccactgccttgttcagtgagatgaatttgaggatgagtggctggtggctttggggttacccaatttcgatcaaatcggtagtgacaaatggctgcagtgtgtccatatttaagacatagctggcacaaaggtctatttgtagatgggggccgatgatgattgcgaggaggcaatcttgattgaatgtcattagtgttggttctgccagtagcaaaagggtgacgatacggaccagttcttgaaccaaaagttaagttggcagccatttttgtggagagatccatcatggaggtatgtcgttctaggcgagtttcatgtgacatgagtagtgcttggacttcttccagtgtcaaattgtcacttcgagaggttatacccgataccacgggatcaaactccggtcccaagccattgagcaaatgtagaatgagatcaagatcagtgagggaatggccagcaatggctaatgaatcacaaattgacttgatcttatcaatataatcagaaatggtaagattacctttttgaatattggagagttggcccttgagctgaagtagtctggctttggattggctggcaaatttttgctcaagggcagtccaaacagcattcgaagagttgtagctggagaccgtaccaagaatggcttcagtcatcgaagatcgaagccaagatagaagtaattggtctttcttgcgccactgatgatacatcggattgagatctccattaacgagattgcgtggaggagtgatactggtgaaaagaatttcatcgaggtcatgtccaatgaccgtgggaacaacttgtgacttccaagcaagatagttggaacgatcaagcttgatggtaagtgaagaagttaaagaattggagaatggattccattgagcaggggcagtagcagtttgagtagcagcaggagtgggtggaagagaccgaggatcatcaactggagatgaattgtcgctgagggaagccatggacgcgagtcaagaaagctctgataccatgaaaactctagacagagtattagcaagaaaacagagaaaaaggagaaatgacaaaagcctcagaagcagtaaaacttgcttaacggctgaggattataattgtgttatttatagtgtttgaatacaaggaggacttagt

SEQ ID NO: 228380 - DNA, 2594 bp, Cannabis indica
ctcttttatatttttaagaatttattttacacaaacttcttttcctatacatgattaagtctatttttaaaactctctttaatgttactatctatgattcatacattttttttcttatttatacacaaattttagttaagccaaatgctataaattacacccagtaacacattcttatgaacttaatttaatttttatgacacattttaacatatattttttctcatttttaaaattatatatgtgtttttttaacatatttatttatttatttcaataacaaaaaaataaaattaaaataacaaagtccattaactaattagtgtaaaaaaatagctcattaatgtatacagacacgacatatataaagcaaccttctaattttttaataatttttttttataaagcatccacttttttaacaaaaaataaacaataatcacactacaaaaaactattttgtaacaattttttagtcacaacataaattttttgtgactaaatgtgacttttagtccaaacaaaaaattacttgtgactaaaacataatattaagtaacaagttgttgttaatttagttttaatcacaataataaatattgtgactaaaaatacatttagtcataacaaattataatttttgtgactaatacttttagccacgaactttttagtcacaacacaataataataatataaaattagccacaattatttttatctttagtcacaaattttattgtgactaaaagtaagattttttataatatcacatggatatgtataccatgtaatctctatttgactttaattttattggtaagaaaatctacactatgccatgacgtacaaactaaagatactacattaaaattatcctctctatatataaatgttttgaaaatataattggttcaaaatagttatcttaacttgatttaaatcaacatattttttatcgagcattgctagctattaaacatgagtaatgcttaggacaccttctagacgcgtcatcttgcaattggttagcgataattcttcaaaattattatattaaatcatatgtacccgatacttaattagaccaataacaatattaacatgtagaagagttctataggcaccactgatatcttagtccatttctctttttttctctcatcgtatgtttgacacagctgtgctgtgggaaaaagcagttttagctgtgctgtgagaaaaaaacagttatacagcaaaattgtagaaaaaagctgagttgagtgtttggtaaattataaatttcaaaagtactaatgagttgttaagatctattataatcacaatattataatctagtttattataatcatgtaaaaacttattttatataatagtagtatttttttttcaaatataaatttatatgtatttgacaaaaataatttatagtatttttttattatattctatatgtattcttgaaagttttatttttttgtattgtttaccgaaaacatttttattataattttttcaaaaagtaattttaagtttttccctaaaattaacagtctatctatatcaattttcacaaaacgtttttgaccaaaaaaaaattatgaatacactctcaaccaattattgggtagtccgaaaaatcatttccaaaacatatgtctaaattgatataggagtttataataattttatttcatttttcttttgttttttttaaattaaaaagtccataaatataataatcaaacttattattttatatagataattatataattagtaatgatcatttacttatagagatatgaattattaaaatcatatataggatatcgatcgaacctcgaataaaattaagaacgagattaaagaagttgccgttagttgacaagatattcaaacccatttcaatggcagagccaaacatggccatgggtacggaaagagcatgcaaaaccttctgagctccaattgatacaaaaataatccaacgtcggcataaattttcttcgtctttataagacgagtcaaccaataacttcttcttcaccactttactcgaatatataatatatattaaatcaaacaaacccacttcctttgaattcagtaacatatagctatctgaaaaactcttgtcacactccatatattaatatattatatattatgtaaagagtattatatatatatcaactataactatttagctgtgtatgtaatgtgtataaaaatatatactacgtagacagttttctatatatttataggcaaacatgtgaagctcctctcgtgtgggagtcctaatttggccaagtcaggattggccgccatagatgcgtgttattttagtataactgtaaaattaccaatcattgaaaatgatatattcattaaactccaaaaaaaaaaaaaaattgaatttatcgatacatattatatattatgaaagtttttaatttatatttctaaaaatttaaattgggacgattcctactttaataaattttagttattttatttataaaatttatattatttttaattttagttaccaacgttttttactttttctaattactatattctta

SEQ ID NO: 228381 - DNA, 2170 bp, Cannabis indica
aataatgattttgatttcataacattttatttcctttcatttctcccattaatttattctgttaacgattacgctttagtaaatgtcccattagtagtttcttctaaagtacctctattagtataattaggtatcgaaattttaataatttatgtgacatttaattaataaaatagaaaagaaattttttttattatattttattgtttaattgtattttaaagtattaaaatatcatttcaatagaataattttttctatcattttggtgaaataaatattattcaaatgcaagataaaaagaatttattaattttttgtgcattttaaatttaatgctattctattcacattcttattcctattcatatgctttcatttctctcaactaaattaaagtaataacttttaggaacactactaaaaaattagactatctcaacagttccgtgtattactgtctagattggtgtctatcacaattgagataaaaaaaaataaaaaagtttagaaccaatctcggtggttcccgtgtgaaccgtcgagatagggtaattagtatcaggaagagtcgaccctagcaaaattgcccctgtctgtttgtccccgttcccaggtgcaccagccaccacgaaccaaccacactgttcgttcgtttccattcccagtcgcacgagacactctgtccagctagccatcgtcctcccgctccttcttctttttcttctccccactctagccccctcaaaccaacactaggagcagacaatgctcctccttaggcccatcccgtcctgtgtcgaccgatctcctcctccggccagcatgttctcattttgaaaacaaaaataatagtagcaagtgagttgttcattgatatttttcaataatcttatcttttttatttgaaacagtgagtaaaatttaaaatgagtttgtatttgaatgttataataataggttcaaaattatttgtgtgatcttcctacaacattaaagaaacttgagaattattgaagagcttcatttgtgtatgatttcatttttattttaaattttgtttaaaatgttagtttaattcaaataatttttatgtcaattaatttttcggtcaatagttatatttagaaagtgaactatgttattttgatgtaacttgaattgaaaattttagttttgtgatatgaaaaagtaggaaaaattatgtataatttttttaagaagaaaggtttcaactaccaacaccaagaacaacaagtactctaaaatcgtgggcgcgaggattcattagaaaatagcatcagcgatcacatagctttgaatacaacttggattaccaggccaccaaaccttactatcagcagcaggagatagagcaagtttgcttagaactattttattttattttttaaagggataattgtgacataagtcatcaaaaagtttaattcaatacagataagttcttaatcttgaaaaatagtaacaaaagtactcaagttcttaatttttgcactttctttatagcatctccaaaggagatgcaaataagtgatgcaaatgtaaaatacagtttagtactttatcaaaattctactcgaatagtgtgccaaattatgatgcaaatatctcacataagagcatctctaatggagagctataaaagtggtgtattgcaattttttggaatattttattaaaacttaactccaattgtgatgtaaaatgtgtgccaaatttggctcaagctaaaaatagtgccaaatttagcacaaaagataacatgggtcaaattttagcccacaataaatactatattttttaattacctcttagtcactaattaatactatttattgactttgaataagatatatttataagatattaaaataatataaataaaattaattattttatatattttgaataattaatgtaatattgacttttataactaatttacaccttgtgcattggaacacaaatacaaaaaagagccaaatatagttttatggtatatcttagtttaaatttaacccaaaatatacaccatctattggtgatggtcttacagaatgagatccaaatttggatcacaatatagcatgatgtaaaatttacatcacaataaatgatttgcttttatatttactattatgtcattttt

SEQ ID NO: 228382 - DNA, 2604 bp, Cannabis indica
aaaaataaataaataataaaaagacacttttattctttttctttctcactttgaaaatataaataaataaataaaggaaggatatttttatcaattcaattctaattacaaagtttattacaaaataaatcaaacatggtaatagtattcccattactattaccattacattctattactattcctattaccattactattacattccggtaaatcaaataccacctaagagttttagagagcctttgagtgttgtaattttgagattcacatatcgatcgataaggtggcttagttgttttttagccttaattaaagagtgcattatgttattaaagaatgattgtttacattaatctctgatcttgttttgctctctatgtttgaatttttgattatctcatactttcataatatctgtaactattgaaggttgtttttttctccggctaagtctgcccgtttttttttggcttaggtgtagcttcagaattgtattttgttattacaattttttttttactctgattagttttgtctttgtgatatggttttaagtattttagtcttgcctctgtgacttagttttgagtgtttctagtcttgtctatgtgacataattttattttgttttatttcattattggttcttctttgttctccgtggctccccatcaaatcactgttagtacttggaaataacaagttctctgaagggattgttcgtagtgcgtgcgttacgtaccttacacaatagttgagtatccaagttaggaggttgaacgaacctttttgcaacactttctattgttgtgtcttctaagtacttaaggttatttgtgatgttgcagccctttttaattttattttagttattttagctcatttttttaattctaatcctgactgtatttccaaccggagatatcctgattggattgtaggttactatttaagctaattgttattaataaaattctatacttgattcaaaaatatatatatttattgagttctaatctattctcggaaatcacttatgtggcacgcctctaacatgatctcgagaaatttgggaatctatctcctctaccaacctttggaaaggcacacgacaaaaaggagatctcatttttgagggggtgaccctccattctgacattctttttttccaacgacgatgcatgtcctctcctattattgtcaatattactataccatacgacaaattaattttaaaaattgggcctcacctaggctaatattgattttatagtactaaattagatacgcaacagattaatttcatattgctaattatcattataccatattcccaatagatcttcatgtgtgtacattaaatcaaaacacaaattaacaagtttagaacatatacctcttgaagactattagggtatcctcaaaacttctcgtatgttgtaggggtgttcataaaaactgataaactgaaaccgaccagaccgtaaccaaattttcagttccacgtcatcaccgaatttggcggtcggtttcagtttcaattttttgacatggcggtcggtttcaggttttgaaataaaaaatggttaaaccaaaaaaccgccaaaaactgcccaaactcgccaaaaaccgtccaaaaccgccaaactgaaaaacagccaaaaactgtacgatcagttttatacgattataatttctaaacggtcggttataaaattataaaaactgaccataaccgaccgattttcactcctagtatgttgtatttcttaatccagttaatgatgatgatgcaattagtctaacaccagtacctttcaaatcgttccaccacacacaaggaatactgcaagaaatatgtacatcaatgaggacaatttttgttggtgaaaaaagcccctttttcgtcagtattatctatcaatgaggacatttctttggtgaaaactcgttgggaatagtttgtcggcaaaagctattatccacgacttttaatgtcgttgcaattaataatatcaatgacgacaaaattgttgttgataataattttaattatggtaaatcaacgacgattttatcgtcattgattatattatcaatgacgacactgtcgtcattgatgactagctaaaaaaattaataagtatattaaaattatttttatttaattacttaatctataaaattatattaaaattgtttaatgaatgttaattaattatattaaaatttctattttttaattatataaaaattatttaattaattaaattataaatccatttgattttttttttataaaaactaatttatattaaacatttattttttattaaataattttttaattaaacaatacacaaaataattaaattaagagtaaaacataataacaaactaaatattttcatattaaattttaaatccataaattattaatacacctataataaaataaataatacacatatttcattttactttacacatattataaaaaaaatatacatttcacaaagaaattttgtgaacacctcctccaagttgctaaaaatcctacttaaactcttctgcccaatctacaaaaatacaaaaataaaa

SEQ ID NO: 228383 - DNA, 2466 bp, Cannabis indica
aatattatttaaaaaaaaataaattaatagtatttcaagtctaataaaattgcactagatatataagtttgagttgtgtgcgactttcactttcaacttagtgggactagaaatatttttctagtctaatattattggactagaaaaataccttttttatgtcccttgatactatgtccaacataaaatagactagtaatacttttttttttttgtgaaagagaacttttattagtaagcagcactaggcacatctgctattaaacaagcagcagcacaataaggtaaacaattagtccatcagacttttgagtcacacgacttctcttagctaaactattagcaactttattacaatttctagtataaaataaaaaatgcagcaactgaaaatgagcctgcatttgaataatattctgcaccagctgcccccaatcggttggagaagaaacaccattctcaattgctgagatgataacttgattgtctgaagccacccaagccttcgaaatagaccagctcatggcaaactgaagccccaattgaatggcagcaacctttgccagtttaacagacaaacaaccaggtataaaaactgtttctgcaactattaaactacctgcattgtttcggattactgcacttaagccacagccctcctgaccgtgaacaagagaagcatatgtgttaatgagaaacatgtccttgggaggaggctgctaggaggttaaggccttggttgcaggagcggctgtaggttgttgttgcagtcccaaatgttgttctatagtctctattgcccaaggaacccaatatttgttgtccgaggcgttgtgttgaaagatataaaggtttcatctttgccaaatcaaccaagacaaccccaaaaatcggatgaactcctcctctgtgagatgttcccactgccaccacataatgttggaagcattatgagtactttggtccttgaatttggagtagcccagctgtttccaatttttttgaacttttggacagcaccacaatgtgtgacatatatcttcctcctgctgcatacacccatcacagttagcatctaaggacattcctcgcttcctcaattccaccttagtcgggatccaatggttaaacactttctaaattaaatttttcattttcgaagttagccttgaccaccaaatgaacttccaccaagcttttaatttggaattgtttgaacatgccgccaaattcggattactaaatcttaatttataaccactagcaaccgagtaattcccgttattcccgttgttagttaaatcccatgtaatccaatccggttgatgaatagaagggatgatgtcgagaacccatggaatgtcatctttttgaaaccaactactcacttcattgattttccactctccatcagcagtcagcaacgaactaagagtgacatcttgtggtattggaatcttggttcttaactgaaaaggaggttgtcgaggaagccatggatcttcattaattcgaatattgcgcccatctccaacacaccatctatacccctttgctaatagctcacggtcccaaagaatccctttccaaaccgaagacccaaaattacccaatttggcctacaagaaggtttcgttgggaaaataaagggctttcaacacacgagtaagaagacaatctggattagttagaatcttccacccttgtttagccaaaagagattgattgaaatcttctaagtcacggaaccccatacctccttgctccttcagtttgcacaacttccgccaattaccccaatgtgtcttatgtttattggaagttgatccccaccaaaaacgggcaatcaaagtttcaatatcatgaaggatacccttagtgatgcgaaaacaactcattacataataaggaagagcttggacaaccgctttgattaaaatttctttccccgcttgagaaaatagacccatcttccacccttggagctttgcttccactttctccctaattttgctaaaaatttattttttgtttttaccaacaaaggtcggcataccaaggtacttggtatgattcttgacaagagttacccccaagtttgtagctatgtgatttgccaaggagtcatcaatcttacatcccacacacatttcagtcttctcaaggtttatgcattgcccagataatgatgaataatcctcacgaattccctttagtgcaatgctatcctccatatttgcgtcaaggaagatgaggctatcatccgcaaataagagatgagaaagtttttgctccatagacccaaaccgtaagccatgtattctacaagcccgttcagcttcaaaaattaagcaagaaagaccttcaaaacacaataagaaaaggaagggagaaaggggatcaccttgtcgtaagcctcttccaggaacaaagtaacctttggtagagccattgataagaatggag

SEQ ID NO: 228384 - DNA, 1293 bp, Cannabis indica
tgcccaataacaatactctttcattaattatagttgtgtagcctagaaaacgaatcttctctttctttgtctccctaagtacaaggactgaaatagttaactataataacacaaaattttgagccttttgaggtcagcaacacaaacttttttaattaattagttaaaaaagcttttgaggctgaaatttgttaggatctagctagttgttataacaaatgaatgatcaaacattagaccttaattagaattccatttatataataaacttttctgagattcattaatttgatcaaataacggttttaattaaataattatatatttatgtttctttcaaagcatctttaaacccattattatatattcttagtctctaacgctttccagacaaactaagctgcacttgtcattgaaaaatactgctcaacattgatatttttctttgtcacagactggcatgtaattaaactgttatttttttttttgaagttaataattttgtatgaatatgaaagagtcgtgggtccaaaatgttattaaaagtcgcaaataaaaaaattgacatggtggggtggactgcatacacaatgcatggggtcaagtttatccttatatgtaatctagtagagtacaatagtattagcaaatgtactaaaaaaaaatgtgtcaaatgtactataatatgtgctaaatagatcaaattatgtaactttgttgatgtttggcacgctttttagtgcatttgacacattaatttttagtgcatttaacatgcagtataaaaacagctatttttaatagtaattttttagttataacataatttttttttaactaaataataatttataatccgtcataattttttacttttaatcataaatttattatgactaaaagtaatttttttttgtaattttactcggtctatatatgaaactatcacaataaatttatacggtattttttccaagctttaagtacaaattagttacgagtattttttttagtgttgagaacaatattacaatcaattaaaaacttaagaattttgagttcgaacgcatccctttcttccttcacttcctcaccactaagtttagtggcttaaattagttacggataggttgtgaggtaaattatgttaacctttcatagttgcttatgtgtagtaaaaagttgcattattatatcaatcatgtggacatgtttaattggatgatatacatgtatatttatttatttttatttttgtgtaaattttgtttacattcaaatgtatatatatag

SEQ ID NO: 228385 - DNA, 2065 bp, Cannabis indica
atttttaataatatcatacagatccattatgaactatataatagaattataagaataaaaaatataaatagtttattgttgtaactaaatacacgatcagtctaaatttatgggtagattttgtacactatctatctttggagattgtatatttctgtgtgaataggagtttgaagagtgtaatctatactttctaggactaccaaaacgtttgcctttggtatacaaaacatggtatttgttttgtttcacatattgaacagtatcatttatcaggaggaccacgtgaacattgtgaatttaataaatgccattattaaatactaaaatatgtatccataatcaaacaattggaatagttggtataatgggtaatttcccatcaaacaaatagaaataagtaacaaatttatgattgggaattttaacattagaactacaaattaatacagctattttatggagattactctatagtttttttgttttatgttaattcaaatcccacggagcacatctttaattatataatatatataaatataaatataaagataaagagaaattgtaaaagatatgttaaatgtgccacccataacaattgagtattatattaattgcttttgctattgataaaattcaatatcaatctcgacatattttattataataaaaaattatacgaaagcacgaactacttataagatcttttctcttctggtgttagacattttactggatgtctaatagtaatgtttaattaaaaaataaaagtcgcattttgcactattttgtaataattgaaagatatagcaaatcaaacctggaaagtattctcttgcctcatgtggttcatatggtctaaccgaaatagctatatacatggtaaaaagtcaagacaactatccaaatggtgacacaatttgctgcatatttacaacaatttcagtgtgtcaattctgctgcaaaaccagcaatttcaacaccagtaactggtttatgcaccagtccactaccaattatcaaatggcaacctcatatttgtagtttaaatttaagttacatgattcacacattaaattaaactgtaaaatcataagtattacacgtaaaaatgatgggctcacgactcgtgttgtacaatctaatgatctacaaatacaagcctcatgacctcatatttttataatatcactttgatgcataagcttttcctaagaatgaattctctattttctcgctcgtatttgacaaactctattaaatattaaatattgtatatttacttttggtgtttgggtatagtgataagggtattcctagttgggtttggtgtattctagggttggatattctccccctatataaactaattctagtacactttatttcattcaatacaataaatacacttttactaatatggtatcagagccacttgtgatccgttgtgagcccaaattgccaccggtccaaaaaaccgtttgtgatccgttgtgagccaaagtgccgccggtccaaacagatacttccgatgtctctctctcttctttgaccagatcccctttttccggatcaagatccacttttcacggatctgtgtctccttcctcgttttcgcgcctgcaacgttcatcttcttcatcaaacacattcaaatggcccgaacacgaagacctcccttggttgcaacctccgagcatgtcgacgactccaccactgctcccacagtgcctcctccgtcagaccttctcgcagctcccgtctccatcgtcgatcacgtcgtcgtcgactccaccactattcccgtggtgcctcctcacgcagctccgatggaacaagcaagaaccggttccagaacacgtcgttccatcgtcgacgattccaccactgttcccgtggtgtcttcccacgttcaagaaccggcttctcctcctcacgatgctccggtttcgtctccatctcagcacgtctgagccgcctctgccattccacctccagtcataccttcaagattcattccttcggtgactaatggtaatgctcctcccactcactctgtcat

SEQ ID NO: 228386 - DNA, 1360 bp, Cannabis indica
ttaaatatgccaaaaatggaattaacatattataagaaatcactaactaattataacacgtataagatgttaggaacattagtaccctataacaatgttcaatcacattgcacttcttcataaaaattactttttttaaaaaaaaaactagtgctaaaacttacattgttagcactacttctactttaatggtatgttacttaaatttggtgtcaaaacttaatgacatatgacagtcgctaaaattggcaccaagcattatagatgctcttaaataggggtgtgcataaaacgatcaaatccaataagaattaaccgatataattacagtcgaccgtcaagcattggatatccaattgtgatcagatcgaattggatgttatttttaaatattcaaatggatctgattggatggtggataaggtgtctaaaaatccaatagatccaatcgaactaattagtattttcttttagtttagatgagtaattagattttatattgttatacgtaaaatctatgtatatatatgaaaattcacattaaaatgttactcttttttattggattggatggatccagtccaattctatacatactagacctaaaaatattagatgggtcgatctgatccaacaaaatattaggtttgaaataatagataaactcaaattaaactaataaatatatatgaaatatatctaatggatagaaccgatccagtctaacatccaatggatgttggatcgatttgatgagtggaattaattggatcgggtcggataggcctaaaaacattagatgtggtccaataaacacgcatctattgaccatcaaaacttaaaaaaaaataaaaaaaaaaaaaaaaagaaaaataaaaaaaaaagttagggaagtaacaatgccattgttattttacattctttcatctctacataacttattgaccccatatttgatgagctacttgtgcgttacttctaattattgatgctctttagagatgatttttttggataaataccattttaaactctatgttttgcaaagattcttcttttgagcgagagttatccaagcattcctacttctttacatccctttctattaaccaagcttattagcttgtatttcagcagtgaaaccaaagatttgcaacggttgaaagaatgtctatcagtgtttttcgagcagtacccttccctctcagctaatcacaagaagtatttatccaaggcgtttgttcaagtcatgcgctctatgtggccatgcattgatggaaatactgcagcttctcccgttgcagtgtgttgagaatcatggggttccaactcaaaacttggcaatgagtggagtagctca

SEQ ID NO: 228387 - DNA, 662 bp, Cannabis indica
cgataatccagacgacaatggttatcttaaggatcataatgatgatgacaatgttatcgataaatggttttacctttgtgttggattgggatttgcagcaggactttagttcctttcttcataatggcaatgaaaaaatcttggagggaaacttatttcagctttgtggagattgtggtagaaagaattccattcttcgagcaaagaatgagagcaagacaacaatggcctaggggacttcctcactgagaaaaatacattcacatgttgcagctattttatttttagcaagtttgtgtgttgtgtaacaataatgcaattatatatctttgtatttctgtttttctttttctttgttttagttcagagttcttatgtattcaagtgaaagtgtaacctatctttcttagctgcaataaaagtcatgatttgtgtgtggtgtgtgtattttggtaatagctatagggtcatgggatatgcataatagtaagatgtgagaatcatcccattacaggctgccctgctgtgctcattttcctaacagaatatataaaagtaattacaccaaacttgaatatttttaactaaaccacaatacaccagccactaattacttttattttaccattatacacatttactatacacttacttttgaaata

SEQ ID NO: 228388 - DNA, 751 bp, Cannabis indica
gtgtaagtaaaagtggtttggattttctcttcccttgtgtaagcctgttgtaatttattttgttgaggaatacatattttgttatatgaagcatagtaattggtgaccagtggcttttcagagtcagtttgtaaagtcaaacatttgcttcgtgcttttctgtttgatgatatattttttttgaatattttcctttcaggtttcctgttgatgagaactcaaccatgaagtcagttgttgaatacttccaggagatgtatggtttcactattcaacatggccatcttccttgccttcaagtgggaaaccagaagaaggcgaactatttacccatggaggtaggcatagatcacaatgtcacatcagatttccaactgcttgctttatttctattcacttatgtttatatatatatttggtagatgctaactttgcttaaatttatcaggcttgcaaaattgttgagggccaaagatattcaaaaagattaaacgaaaagcaaattactgctctattaaaagtaacatgccaaaggcccaaggatcgtgaacaagacatccttaaggtacttgctaattgctctattttgtaggtctacttttattgctgtcttgcatatttttggaatcaaattatacgatgaaatgctctaatcatagagttatttttctactttaattgctacaactgtttatgagagaaaagtatggaaactggtacaaaatgaacaatgactagaaataattcataa

SEQ ID NO: 228389 - DNA, 1003 bp, Cannabis indica
gagtgtattactaatctattttgtaaactaaaaaaaaaaaaaaaaaaagagaattagtaaataaactgtaatattactacacaatgaaggagtttttctcttaaagaaaatttatcatttattttaggatcacgattaactcaatttatgtttgtaatactaaagttgctattaacataaaaaaaaaaaaaaaaaaaaaaaaaaaaaagaaaaaaaaaagaaatgtgtggaaaaagtactggacaataaaacttaaatatctaaaataataattcctactttttatttcatttttcattacacaacaaatcaaataaataaatttcaacaaaatttcatgaagtaaatgttagaatttataataatatttattcaaacagctatatcaaccattacaatatcttgtagtaatgctgaagcattactagtattaaagtgacaacctgacaaagaacgagagcttcagcaataaagtgagcaactctgttcacagatcgtggaacaaaagaacaaataatattaacaaaagaattcaataaaagtttacaatcatcaacaagtaagtcaaaaataaatgacatttgtatggaacttgtaagagcctggattgaagttaagctatctgtctcaataacaacattgtttcattgcttgttgataactctgagatttagagttattttgatatctttaaacttgaattttaaattaaatagtagagtaattagtgtctattttatgtaattgtgttttgtttgttgtgtctttgtagtaaatggaaatatgtgtgttaataacttaataagtgttagagagacttatgttactgtttttttgtgtattaagcaagaaaaaaaagctgaaatgggtgttggggagtgtttaggacaagaagaaaaagagcaggaaaatacttgttattgactgtcattgttatagcaattatcgcgtagcaattggcaagccagtaagagaatcgtgcagaaattccagctggcgttaa

SEQ ID NO: 228390 - DNA, 972 bp, Cannabis indica
tttttttaaaaaaaagttaaatagaaattatgggagtaactctttagggacccaccatattttcagtgacactcatggtaggatactaacaaagtgctagaggtaatacaaaagcatgtcataaataaacacctatcaacaagctaaaatgtagatgcagttcttcaaaagaggatacagttttagagcgagtatgcatgtaccactcaaaaagtagtactctgaaaattttattcagatgctaccttattttaattttttattttttcttttcagtttattagcacagataaaccttgacgcatttcaaattgacttcttcatctcaagtcaaaatgataaaatgttcatgtaaacatttaaggctacctgaattaataatagcatcttcatctaagaagacgagatcgtcgatggtcttcaaggaagacaatggccatctggccttgaggtggttgttgtcgaggatcgagagggagagaacaagaaagtactggcttcaaggatcgactgagagaatttgagagggagagaatgggaaggtcgggttgccatggaggatcgagagagagagaggatgttcgctggctgttcacctggccgtcccctggccgttcacctggctaaattggaactcgggctgccatggaggatcgagcaagaaagatgaagaaagagaagggagcggctgcattttttttttttttttgttcttgctgttgagagaagaggagatcattggttaaaaaaatattcagatagagcaaaaaggatggctgctactaacaatgacctagggtttgtttattatttaagatataaagtgtattttttgagaatgaaaataataaatattacagctgtgccagctgtactcttgttttttttttaaaaaaaaaatacattttatatgaataaaaaattatatttaatataactatttttttttaattttgggttatgatatagtga

SEQ ID NO: 228391 - DNA, 2208 bp, Cannabis indica
tatgattgcggaatcaaggtgctaataaacgtaaggcacatccatatcccttggtgcacttgaggatgaaggatacggaaaaaagtccttacacgaaagcttgaggataaccaaaggttctttggaagttatgaaaggtgaaaagaataatggtttatacattctctaaggagaaactggtccagctggagaagcaagtatggtaaaagggctagaatcggatatgaagttatgacatcagagacttggatatatcagcgaacaaggccttaaagaactgtataaataaggtataattcaaaatttaaattcttgtgccttagcatttgttaagcttgtgttttagggaaacaacataagctaaagttcactccggcaaggcacaccacgtaaaaagatacttaaatatgtgcacgttgatctttgggggctatacagggtgcctactcactctggtacgcaatactttcttttaatagtttatgattatggtcgttgtgtttggacctacttgttaaccactaaggatgagtgccttgaacattttagaaattgaaaaactcaggtcgaaaactaaactgatcataaaattaaaacgttaggactgataatgggttagagtttgttaactcggaatttgacaagatgtgtcaagaatttggaatcacttggcatagaaccgtagtgaagatcctagagtaaaatggagttactgaaaggatatccttgttgaaccaaaccttgttgaacaaagttagatattaatttattgttcagttctgggttagaaaaataattttgaggttaagccttagcaaccacaacctaccttgttaacaggagcccgaatagagttataaaccttaagacaccttatgaaatgtggtacaatagaacccacaagctaacgcatttaagagtatttgggtgtaacatatgtacaccaatttatttacgagctagaacctagatccgtgaagagaattttcttaggtatgccttaagaataatgaagggttatagaatttaaatttccagtaagggtcaaccaaaggttgtgattgatagaaatattgttttcaatgagttagaatatctccacttgaacttcgagaaagatagtgtgtctccatgtgttatagtaaaaatagaaaataaagacaccacaagcgtagaattagaggacggaacgaagttcttggaagaaggttcacaagcggaagatagctagtgtggaacaagaagaatgcatagacagaaattgctgtggaggtgaaagaaaaaggtaacgaagtccaaatagaggtgctgaaagggttcggacagacatatctgaaaagttattagttggctcgtgatagaacccagagagggattcatcctccagcaaggttcgtagtagtagacataatagcatttgcattggcagcaattcaataaactgaattgaagagcccagaagctatgaagagacaattttaggttgaaaacaagtctaaatggctccaggccatggattaagtgatggattctctacgagataacaaggcttgggtagctgtgtcaaagccagagaacaagaagattgtggagtgcaaatggattctcaaggcgaaagagagaatcaatgagaattaactagtgaggttcaaagccaggctagtggctaaggattttacttaggtggaaggtatagactatacttgttaaggaagtatatatagaacacactgaggattttacttaggtggaaggtatagattttaaggttcgctaacaaaattacccataagcaataaaaaaagaaaataatatgaaatatccaaaagaacatcaaatattgaacaaaaaattaccccaatttgatttcggagatcagtgaaatcaaaatgattcaactataaaaaatataaaaataaaaatctttataaattgtggaaaaatgcaacctgtaagagagagggagatgtcggcaacaaccatcaccatctcatgagttatctccatcaacgaccatcttcactagcgctaccatctgccattgtgttcttttttcaggagagagggaagttggattgagaaaaatgagaaaggtagacgaggcttccacgggcgtacactactacaatgtaagcctttagcttcccttttttcaacccaatttataaaaaggaagctaaaggggtgaaaatatctgcattgacattt

SEQ ID NO: 228392 - DNA, 811 bp, Cannabis indica
ataatatataaaataattttcctttaaaattatggaatcttttttataataaatgacagaattttatcatcataatcaattaaaataatatcatataatttaattaaatttgaattaaataatcatcagattattataaaaaattcaagaatttacaaaaacaatattataaatataaatatttcaacatatatttgaatatttttgaactaaaaattataataaaaagttgctactattttaatcccacataacataataaaatacttgtacgtgcatctaagatggagaagtcacgtgtgtagatagataatagatgatagatgtatctagtcacgtgacctgattatcagatcaagaaagaaagaaaaacaaaatccattttttattattaaaaaaaatcagattcagtaagctgactcacacttcacttggccataagctattcgccaattattgccgctgcatgcgctctgaacatataaaattacgaaaacacccctgtccacaccctcaagaaagaagatcagttgttgataataatagctgaaatgctaagagaagcacacgtgtcattattatgcaaataaatattacaatggcacacaatttaattcgctaatcaattacaacgcgctacattaatatagtattaaaaattatatggggccgagaaatgttaagggcatcttatcgcgtcaaatattacaaaatatgagatatcactattgacataaattattatgaattttttacataatttaatttaataaataatataaacctgttaactaatcgcaacgtgctatat

SEQ ID NO: 228393 - DNA, 2445 bp, Cannabis indica
caaatcgaggtggagccattgcagcatactagtggagatcttaaaattcaagatggaaatgatcaagacattgaggaagacaaccaatctgaagagctggataattatcaactggccagagatagaacagggagagaaataaagccccctgccagatttggagaagctgatgtaattgcttatgctcttgctgtagcaaaagaatcaaaggaagatgtacctagaagctaccaagaagcaatcaacagtaagcactaaaagaaatggaatgcagcaatgaatgaagagatcacctcactaaagaagaatataacatggattgttgtaataaaaccagatggacagaaagtaatcagatgtaaatggattttcagagaaaaagatggtctgactgaagatgaaccaaagatatacaaggctagattagttgcaaaaggattcacacaaattgaaggtgtagattacctagaaatcttctcaccagttgtcaagatgaagacaataagaatgatgattgcaattgcagttcaacttgacttggacatacaacaaatggatgtaaaaataacatttttaaatggaaaacttgaagaaactatatacatggagcaacctgaaggtttcaaggtggagtccaaagaaggggaactggtttgtctgctaaaaagatccctacatggcttgaagcaatttcctagacaatggtacaagaaaattgattctatagtcacaaaagttggttacatcagatccaagtatgacacctgcctatacttcacaaatctgaattcacaagctgcaactttcctactaatctatgtggatgactagcttatcatgggcaaagatcaaaaccaaataagcaaactgaagtatgttctaaacagtgagttcgagatgaaagacatgggagtttctaagaaaatcctaggcattgaaattagaagagacaagaaggaaaagaagctgctacttacacaacaatcttacattgagaaggtcattaaaaagttcaatatggaggatggtaactggccactttgctttcacaactgaacaatctccaaaagatgaaaaatcaaggaaaaggatggaagaaattccttatgcgaaagccataggaagtgtcatatatgttatgataagcacaaggcctgacatagcatatgttgtcagcacattgagtaggtttatctccaatcctggtgaagatcattggactggtttaaaatggcttttaaggtatctaaagacaacctcaaactatggtttgaagtttgaaaagactggtagtacattgaagctagaaggatttgttaatgctgattatgcatcaaacaaggacaccagaaattcgattacaagctactgtttccagttgaatttatgctatataaactggaaatctcagctgcaacctgttgttgctttgtcaactacagaagccgagtttatggccataacagaggccttcaaggaagcaacatggatcaatggcattctgcaagaaatcagcatgttgaaaggaaaagtttcagtattttctaatagtcaatctgcaattcacttgagcaaaaacccagtctaccatgagagatccaaacatatcgacattaggatgttttggatcagggaaaaaatagaagttggagaaatcgaattagagaaagttcctacagatgagaaccctgctgatgcaagaactaaggtgctgccaatgagcaagttcaagcatttcatggacttgctcaactttggacctgtgtaatctttaaggttcactcccccaagtatgttgtttcaatagttttcttatgaaataaggtgtagattgtggtgtaataattgaaaaaaaaaaaaaaaagagaaagtgaggattagagatctgtattgagagagagagagagtcaaaggactgaagctcttgaaggttatgaaccatggtattcatggttttctaaccagtcgatcatggaggtttgagagtagatttctttctgttagctactctgattgaagatcaaagaattggtgtttgtaatcaacatttaatagtggagatactccttgggggagagctggaataggactcacattgagattcgaaccaggataaaatccttgtctcatccttttatttttctctgttttctgcattaattcttgtctggtttatgtttaattcctctatgattttgtatctagtttatgagcattattatgcatgtgtgtgtgtgttgagtttgtgttgtaggaatttacaacagctagtaatagagaaacgtctattttaaatttttatttataggctggggcaaaagatcacaacgaccaagtccatgcgagttccttatgttataggaatgaaattactgttgggtttatgcattgaaaaacccataaagacaattataattgtggggaatttacaattttatatacatt

SEQ ID NO: 228394 - DNA, 1346 bp, Cannabis indica
caatcactaaaaatcagggatctagtctgtctcaaccgagaaaggaaacttttaatgatgggggcgttgatgggggagctattcctcaagctgtacagttgaccaatcaaaagattattgacgtaccaggagaatctcctaattatgaggaaaatgtggaatcacctcacattactggggaggatgctctattagttttggacaacaagaggagaagaatgggcttggggaagaatattgggcctgctgaacatagtgagttgggccaggttggtaacactactaaagcacaaagtggactaccaattatggatgatgtagagatgactaatgaggatggtattattgcaaaaaacttgttgagggcgggttctggttcacagacccgcctatcattatgaatgtgttaagttggaattgccgtgggcttgggaaccagcgggctattcaattcctaaaagagattgtgtctcaaaagaagcctaatttcatttttcttagtgaaacaaaaagtgataaaaataaaatggagagagtgggccgtgtgttgggatttgaaggtatctttattgttgaagcccaaaggaattcgggtgggctagcttttctttggaagaatgaggatgatgggtacatcttgggctattctaacaatcatatagattatttggtcaagtccactgagaaaggagactggagacttacgggcgtatatggcgaaccagtccgtactcgaagacacttaacatgggacctgcttcgttctcttgcaagagattgactaccccctggtgcgtgatcggcgatttgaataacattgtaaggcatgaggataaaagaggcggccgacgatacccccagaatctcattgatggattccagcaagctctgaacgactgtcgccttcaagatatggagcttataggacaccctttcacctgggagaagggcagaggcaccacggcctgggttgaagtccgactagacagagctttggttaatgctcagtgggctcaggtattctctttagcttccttatttaatttggaattgtcttcatctgatcactgccccctattactggaaccggttgttgttcataatggtgtccctaatcgcaaattcaaaatggaaaacgcctggtttaaagaaccagtttgcttggagataattcgagattgctggcaggtagcaagggaagctaatttctctagaaaattgttactttctgctgataaactaagtgtgtggggaaaagaagtgacagggaatttcaaggtcaaaatttggagatacaaatctgaattaaaaaacttgaagagcaaaagggactctgattctgctca

SEQ ID NO: 228395 - DNA, 1422 bp, Cannabis indica
cctattatagcaccaaaattgaaaaacaatgaataccattaagaccggatacccttaaataaatcagaatctaaattacctagtttagcaccaaaattaaaacacacttaataccattaaaactgaacatcattaaattaataccgaagaggaaactttcctataaaatttataatctaattaatctctaaatcaccttcaaaatctaccaatatcacagctatgcacatttaaagaatatcttactctacaagaaatcaaacttttaaccaatattttgacagaatacattcctcattaacgctataccataattacatacaaacatataattatctagtaactcatgggacaccaatctaaatgaatcgtaaaaatcattctatacatacattagggatcttttttaaaattgaaatccaaaatatttaaactaatacaaaactatcaaatccactattaccaaaatcataataatcaattccctttataccaaataaactttttctccaaacactaaaactgaattaaaacttattttataaattccactattctttccagctaaagccttaataaatttatacctaatacctaaacccaaataatgctttacaaaacgcttcaacatctaacctactttaatgtcctcataaattcattcttaccaactaaatccattaaaatcccacaaaattcggtaatttaagataaacatcctatacgataaggtcaaaaacactttaaataaagaaattaatacggtcaaaatcctaattgtaatagctacttgaaacagattacatcgaaataccttaaatagcaacaaaaccgcaatacatatcagaaaagccacatatcatggcacaaaaacctcaccaaaggcacaatttaaccacaaaaggcacaaaacttcacactttccatggcactaaactcctcccatctttccgtaaatccaaaactcgatgtatttccttctccagtaaattccataacaaattaaaactagagcaatcagaatcattagcctaattacactaatatacataaaaccaacaagccaattaacaagtaaaataaaattcaggagaaagcctaaaaaggactaataagctagcctaacaacagaaacggctgaataaaggcacccatacgacctaactaaacgtcccctaaagttagaccaaaagaagaaaaactacactaaactagaaatatatacaggaaattattacattttagagaaaatttaaactcttgtcataccgaaaatgaatgacaggaattctacaaactaaatttttaaaatgattaaaaacaaattgaatttcatataaccatcaaaactatagaaaaatattggcaaattacgtaaagggaagagattgataaaactccctcagaccttaagatcagcca

SEQ ID NO: 228396 - DNA, 2374 bp, Cannabis indica
gttggttcttctgcgaaccctgcccctagctcctctcgggttcgaaagttcaaaccccaacgccctgattgtctaaatgctgcggaatttcgaagaatgctcaaacgcacacgcaacctagccaagtcccttgatgaagagacagttgaagaggcgggtgacgctcagcgtgcccgccaggagccatgagaatcatcagctggaatgctcgtggattggggagtaaacgagcattccgttctctctccctgttggtgaagcaataccgcccaacactcttgtatataatggagtctaaactccctgttggtgctttaaataagtttgcttcgagtcttaaatatcctaacggtttagaggtcccacgtgtcgggcttagtggtggtcttttgttgctctggacacatgatgtggatgtaaccttactctcttataatataaatcattttcactgttatcttaaatttcccaattttactgcttttacttttaccgctttttatggtgccccacacaatcagaataaattgcatacttggactttaattgatcgtctcggttctaattctcggctccagccttggctcataatgggcgactttaacgattacctatcgctcactgataaaatagggggtgatatgtctcgagctccttctccgcaatttcaatctttcgtcgacacttatgcccttcacccgctttcccccttaggtaatctgtttacttggactaatcgccaacaacagccctctcacactcaggaacggcttgactggtgcctctctaatgatgcttgggacgtcatttttcccgcttctcgtcttgatcatggcgatttttttggttcagatcataggcccctcattctcactttgcatcatccgaacgatcagcgtaatcatcccccccgcttcatctttgacaagctttggatgtctgaaccggggttcgaggattgcttgcgagatgcttggacgcagaccaatcctactgatcattcaaatcctttaatgggtcttcacgaaaaattatcaaattgtgcttcacggctcaaacaatggaagcattctttgggtcctccgcttgctactcaaatccgagatgttcacgcccaactcaaacttgtcaattcccttccccatcctactaatgaccaattaaatcaaggaaggcaacttgaaaacaagttacatggattgttgcaaaaagaggaagtttattggcaacagcgctcccgtgtcacatggcttcagcatggtgataaaaacactcgttatttccatcgtatggcttctatgagacacaacaccaataaaatcctttccctacaacgctcggatggctcttgggccaatgataccccatccatcctcaccaccattgaacaatacttcactcacttgtttcaaagtcaatcccctgacaatgaggtcattgaatctgttatatctggcatctctgaacgacttaccattgatgaaattgagcttacccaggctacattcacgcctgctgaaattgagactgctactttccagctagctcatgacaaagctcctggtttagatggattcagtggcaatttctttcaaaagaattggcatttattgggccctgacattactaatgctgctctcagcttcctaaatggggatgcagatttatcggccatcaatcagacactcattgtcttgatacccaaacggccaaaccctgaacagatcacggaatatcgtcccatcagcctttgctccactttttacaaaatcatctctagggtccttgtcaatcgccttaaaccaattctgagtcgcataatctctcccactcaaagtgcttttcttccggaccgtttaatttccgataacatcattatcggacaagaggtcatgcactctctctcacaccgcaaaactggtaggttgggatggatagccttaaagcttgatatggccaaagcctttgatcgggttgaatgggtattcattcgtaaagttatggaaagatactcgtttcctcagcgcttcatcaatctgatcatggcttgtatctccactgccactttttccttctccattaaccaacaagttcttggacaagttaagcctacccgaggcattcgccaaggcgacccgctttccccatacttgtttcttctatgctctgaggggctttcatcactcatccatcacaaaactcaacagcgccagcctcgcagccactcccttggcattaaaatagctcggcgagccactatctcacatctcttcttcgcagatgatagccttctcttcagctcagcctccatcgaagctacgacatctatccaaaacattcttcacgattatagccgtgcgtctggacagctagt

SEQ ID NO: 228397 - DNA, 765 bp, Cannabis indica
caccatctgtcatcaatcccctcctcctctccctcattccctactgttaactttgccaactcttcttcttcaatctgaaaactatagacgtcctctttacctccatttgctaccccacttgaactagccatgatcgaaaaaacaacaaaccgagacaaaaatcagcaaaacagtaaccagaccaacacaagaaaactttcacaccatgtcaaaagacaagaccctaagatcactcataatttggattgttggtccactaaagattttaggttcgttttgctgaaaaaaaccaccacttccctcttattcaatataaaaaatttatttattttataaacatataaaatattctgagtaaaaaaattttaaaccaaaacaagattatataaatatttcaaaaatattacaataaattgattttattaattttattaaatagcccaataaaaatgtttacatgatcatcaaaagtagaaccttgcctattaattaattagttgatcaaacatgcctattaatttagttgatcaaattgattattaaagtgtcaattaaaattttgaatcgcatgcatgcaagtagaaccttcccacctaaatagctaaaacattttgtgatgaaaaataaaaaaaactttcatcctaaatatatatatatattttttgaaaatcattctaatactacaaaaaattttacttttagtcacaacaaaatttgtgactaaaagtaaaaaagttttgactaattataaattattttttttat

SEQ ID NO: 228398 - DNA, 754 bp, Cannabis indica
aacctacatagaaattactggagtaacccaaaccgtaaatttagaaaataatatacaaaataattatttataaaaataacattttttttaggactcctttttcttattactacaaaattagaggcccttgttatgatgcggcagggtagaattactgggtgggtgccttaacgtaggcaacgcttaactcacacttaaccgcaccgcaggtctggttaagcgcggaggttccgaaaactgagcttggagttggaggggcccctaactgaagacgctgctcagttttcctctgatttttttctttcttcttattcgcccgtacggactactgaccacaccacctgattttgcatatttgatttgctctactgtttaaaactctaagttttgtactattattaaactccagtcctggagctttcttctgtactttcttgctttcaacatttctctctataattttataatctctatttagaggacttaccctaccttatcatttgcattaaaagacacttactactactgagaaataaatttacagcttcgtagaattacacaagtcaaacacatgtgccgaattttagtaggaacattttacctaatgtttggttcattctaaatttgtaatgtaaacaggaatgataatcagaatagtaatggaatattgtcaaaagaatatgtagtaaagtattcagctatatataagaacatgaactactccactcatcactaattagttttgagatgaaat

SEQ ID NO: 228399 - DNA, 1722 bp, Cannabis indica
gcgagtgaggacaaagcacgctggtaacactcgtgttgatctgtagggctagtcgtcagtccatgaagcagccagagtgacacactcgtgtataagagccatcattccgtgggtgtaaggacccaatagaggcttgaagagggggcgttacagggtagatcctgtccactggagccgtggcaccatggttgatatgttcattactggaaaatctcaaactcacggttgctcagctttacccttccctttacctgcatcacgaaacacccgtaagtcatagagactcagcaagaaaagctaataaatcacatacaatgataaagttcaagcaattacatcttgatataacatacatacttatcattcaacatatatattcaacaatgcatgatcaattaaacattcacaaaacgagacaatgcaggtgccttataaagcacccttaccactcattatctacgagctgcgtatgtcaatattgttgcaaggtaaagtgcaagataagtaagaaacctatttgtggtttcaaacgagtaactactcataacggtgatggccgtttctaatccctcgatcataatcgaggcacacaaataaatattaataactcgatcataatcgaggcactaacgattataatcgtttcttgtctaaccatttaaagatgcataaagcttttcttacctcaatccaatatcaggcatgcgggtcgacctgagtgaatacagagcttgacgattctgggtcctatgtcacgacaacaaaatttgtttaataccttaaatcaaaactccaagaactaaccctaattcccgtaaccagacaaaccctaacttctaatagcttcaaaataggctagacaattctcaaataccctaaaccaggtcctgaaaacaccccaaacaaaaatcagatttgaggagaaaaccctagaatctaccctgcagaccaaccggtcgatcggttctgtaataccagaaccaaccagtcgacagattctggcaggcaagaaattctatgtttccctcttccaaaatcaagccaaaaccaccttaaattcatccaactgctccagattaatataataccacaaattcaatatatttaaagcatcaattcttaataattcatccaaataccaatttcaccatgttgataccaaaattaggttctttagtcaaaatttcccattctaaaccaaatagccacgaattcacatcaattgaaacctaaaaaatcttaaaattgaaaccaaaacaaactctgaacctagtctaaatacacagcgatgaaaaccctaataaaaactagcctaaaacttgaaaaaaaaaatccataaataacatagtaaggagcttacctcaagaattggacagcaactagggtaaattttctagcaaaatttgagctgaattgtgaaggaaaaatctgatccccttctatggttgaaagagaggaggaaaaaagctaaattatttttctcttaatttttgatcattatccttttttttttttaattctttctagcataaacttaaataacaatcagcgaaaactcaaataaaacaaaggcacgcataatgactaatttacccctctctcaaaaactaagctaaacataccctaggagaattttggtaatttctaactaattcgacaaaccaacaacttaaaattctaaactagtccggtatacttccaattcgtttcatctttttttgt

SEQ ID NO: 228400 - DNA, 2112 bp, Cannabis indica
catgtgaattggtcttattttattcttttgccacctcatttggcttggtaatttattcttttttgactgggtaattcctcgtggcttcatgataggtggtgagaggtgagctatgacccttttattctgctcgccaaaaacatgttcttaataaaggctgctatattgagaagagaaaagtaaaaacaagaaaaaaaaatacacacatttttgaactgttcaaaaataagatgacaattttaatgtccataatcattttaaatcatataaatggattaggtgttgatcaatttgataataagaacttattaattattattattacaaagtccatttggtttactacctacctttctaagacttgagtgaaaatatataagcataattcttaataatttaatatatgtattctaatttgaaattgtgtgttttaatattattaatttattatttaattaatcatgtagaataataaatatggtattgaaatagatattttgtagctacaaaacatgattccgtaactttagaataaaaaccagccaagaataaaagtatagaaaaataaaaacaaacaagagttttatacatggtattaacaatccttgaaaattgttactagtacacagatcaatgcccagagataagattcattaataagatatcaaaaatataatttttttgaacttatgcataaatatactccatcttattatatgttgctagcttgatgtattccaccttcacgaatgaatcttgttgaaacttaagtgttcgaactccctttgctttgcttgaagagtgcttgtttatttctgagacaagacttgaaacactttttctcgaaagcttgaagagccttatcccgaaggcttgcacttttgttcttcttcttcgttgagttgattacaaactcaaaataataataaaaacatatacacagaggcagagtcgaacatactctcctctacaaaataaagactttctttcttacaaaatataaaatgaaatacaaagagattaaagagatggaaaatctaactattaatatgagtatttatagagattatactcatatgatacagctaatactaggactcaaacgtccacaactcataggaaaattttcttaacaaatttcttcaattagcccaaaatttcgtattctgtgcctgtagaatcgcgagcagtagatgcaagtttccttctatagaaacacaaaacttccaattcattttttttcaattaatacctgatcaaatcttcaataaaaaatttattggatttgagcgattaactatatgtgacatttcatcattttttagatgccaagataacaatgttttaaatttataatttgcgattttggatgataaattatttttgggaaatttaaagagaaatctatgcaacatccttattactttttattcgatttatggacgatatatgagcaattaaaatgtgatttgtaatgttctttaaaaatatgtgcaaaaacactagtgtcgtaaaatattctaaactaatcacaaaaaattgactactagatcaaattctggtaaaatatgtccacacaccacctgtttaaagatgaccatgttatcatctgtaaccttctcaaatgaacgatccaatattcggtgctccacatactcaacgacatacattctacaatcggcactaccaataaaaagattggaagctattagtaacaattaacttaagtaatttataagggactacaaaatcagacattaacttgctctctgtttgcggtacaacttccgaagtagcttgtctataatgcattggtgggagctggctaagatcacataatttagccaaaagtacataattgtttgtctgaaaataaccagtagcccgcaataaggatgcaaatagctcggtccaagacttcaaatatgacttcatattggtctcattgtggcatcgatatcatagtcatatacaacaatctcccaattctcaatgtctacctcaacaatcatggtgctcaaaaggaaggttcaacgcgaagtagatgtattcgtggttttcccatcaaggcaagtgcctatgctccatccccctcgcataatcaagaaccga

SEQ ID NO: 228401 - DNA, 2079 bp, Cannabis indica
ttcccttagtgcttagagatagggaaaataagcattgactggtgccctataaatagtattgattttttatgatcattatcaaaaataaaagaagtgagattccatattaaattgtacaaatagcttatgacacttcataaagggcactagtcactataaatgccttttagcaattcattataaaagtagataattgtcccacctaaattttatttctagcttcgtccctcattaagaatgagatctttatgggaaaaaaaaaagagagactaattaagatttttgtctcctgaactttttcaagtcgttaaaaattctcctgaagtactgagattgttgaattaaagaatttttatttaatttcattcaatttacttaatttggtgattgtccatgtactaagttgtgcttccaaattttaatatttataaaatcatactatttcaactttaacatatactgaattatgttcactaaattttcatccacgttaaattttttttttaataaaattaaacaaaaattcttaaatctaattaatttcaatagtttaacaagaatttttaataatttaaaaagtttaataaatataatttaatacatattaaatttaaaaataaaaatattaaataataataataatgagatttttaagaaaagaaaaagtgtggaagaatagcacacacatcgaaactaaaataaaatttgagtttgataagtaaaagagggtcattgattacgtataagatatgaagtttgtgtatacccaagacagtaggccgtagctactatgtgagtaacaggcctaataataatatattattacaaaacaaatgtattaaattaattaatttgacttcttctcacatatttatttatttatttatttataggccacgtaagactatgtagtagaatagaactgggtctctcttcttcttcttctctctactaggcacaagttacggtgaactctcgcctcacgtgagtatctcatcctctctcatatgtttatatttagaaatttcatttattattcataaaaaatcctttttataaaaattactttcttaataaatttatatcactttattctaataactttatattatacccaacaaaatccttttcttatatgtaccaaaattatgttttttgaatttttaaggtcgttaaaaatactcctgaactattaagattgttgaatttaaaaatttttatctaattttaataaaaaaaatctaacatagatgaaagtttaagaagcatgatttattacatgtcaaagttcgagaggtatgatttagtagatattaaaatctgtagagcatggtttagtacataaacaatcactgaaatagtaaaattgaatgaaattagacaaaactccttaaatctcacaatctcaatagtgcaggaagaatttttaacaactagaaaaaatcagggcgatagtttagtacataaacaaccacatagatctaccgaaaatagactatacttttacaatcatttaacaaatattttaaaaataaacttacttattaacgagttccgactttcatttaaaatgtggcgtagtgaacgtttaggtttctatagatagactatacttttacaatcatttaacaaatattttaaaaataaacttacttattaacgagttccgactttcatttaaaatgtggcgtagtgaacgtttgggtttctatggaggacgagagacggaggatgggcttccaagatagaggtttgggcttcaatagacgactaaacggggtagagggcaatgactccttttggcatatgagatggatctagagagagaaataatgggaggaggagggcagtagttccttttggttgggttaatgagaaagacgtagagagaaagaaataagttttttagattttcaaaatcttgaaataaaataattagaaagaatttttttttgaatataatgtaaaattattagaataaaatagtataaatttatgggaaaaaacaggaaaattccaaaaagggtaaaatattacaacaatactgtgggccggcccaatcaacatttgtacagccca

SEQ ID NO: 228402 - DNA, 706 bp, Cannabis indica
caaaccccattccaccatcgaaccaaggggaccacatcagccaccccctcctcacattgtaatgaccacgctaaagaatagccacttttagcattatacacaccttccctatcataatgccaacaccatgaatcattaccaggcccccttgccaaggttatacttaaaatgccctccacatacatggaaataaagaacatctctagcttgaagacatccgaagatccatcaggagtaataaattcaataacccgactgcaatcatcatgttgctgcgtaatggtcttaaaagaataaggcttagggacccacaaatccaagaatacccgaacctatttaccatccctaattgaacgcctaacacccttattcaactgttcaagcccccaaacaaggctagaccataaatgagaagacctgtctttatctttagcatcaagaatggatgtccttaggaaatatttatgcttcaaaactctcactggtaatgaatccatgttttgcaatagtctccacacctgtttagacaccatgacttgattaaataaatgaaaatcccgaaagtcaaggccgcccaacacctttggtttacacacctcttcccactttaaccaaggcccttcatattgtcccccttcgtgttgaaatattttattaggatctagatttactaacaagtatgttgaattaacatcctaaatatgaa

SEQ ID NO: 228403 - DNA, 1700 bp, Cannabis indica
gtaatgggttttatttagggcacaaaacccaacatcttccccattcctttttggattaccctaaattaagactcgagcttgtcgaatacctgaaaaaaattgcaagtgtgaagcccgtgcttaccatcatttccttgtgatgtctttcttacttatacttggatttcccttgtagacttctatcatccaacaatacatccctacctctagctcttccagttgcgatggtcatttgcgtctcaagacaactttggtagagttagctgcctcaaacacagagcacgacaactttcagacccaggcaataccggcctagggtaaatgaactttaggcttaattgaactaggcaacaccctaaattgaggaactatcctgacaactccaattttcactagccctttgcaagaagttcaaagatgaagcccaacaaggcgagacaacctcaatgcctctataaaacagtttgagaggcgtatcaagatcgtgaagaagaagagagatacaagtgaggctaacaaggtggaacgtttactgtactttttctggtttactaattctcatgtggacttcagtgtttttggttccatggcactccaaatggttgaggaattcaaaaagaaccgtgaagaacaacgagcagcacacgaggctaagcgccgtcagggcgccaacactagaaatggccagtagtttcttttttttttgtggggtctttaggatttattagtacgaccctcatgctttccctttgggtggctgtaagactctttttccatcctccacatctttaacatttgtaactgttgttagttgagtgactctgagggttattctttggccaaatgacttttcttgttgtgataagcaggtttttatttcagtgagtattgctctttgagcagtctcatcctcttatttatttcttcatccttcacttgaatgggagggagcttattgtacttgactgcgctacaacctcttgatttgtctatattcatccttttacttggatgtaagggagcttattgtacttgactgtgctacaaccttttgatttgtaaatgtttgtttacgtctgagaggtgtccctcttgtttcaacatttggccatgagtatctttcaagatctcttttggctagatgacttttgtcactcttgaggccgagtgactttgtcattctcatggccaagtgactttgtcactctcttggccgagtgactcttgtcattctcaaggtcgagtgactttgtcactctcacggccaagtaactttgtcactctcatgctcgagtggctttgtcaatctcatggccgagtgacattgtcactcttgaggccgagtgactttttttgctcacaagtccgctagtgggttttgcgaggaggaggtgtgtatttcttttatcaaccaaggtagctaatccttgccgagttgatttttttgttctctccttcttgcttccttgccccgaagtgtataacattatttatagcattgtacacttgaattccatatctccttcaatgatagtacttctcgaggtgttggacattccatgcctttgatactaccgtgtcatctatgcgtgccaattggtatgttcctggtgggattactttggaaagctgataggggccttcccaattggctccaacactcctacccctgggacattggtgttcgggaggaccattcg

SEQ ID NO: 228404 - DNA, 1529 bp, Cannabis indica
gagtgctcaaagaaaaagagaagaccatagctttcaaaagtattgaaaaagaagcaacagatgatgaatatgatgataatgaaatggcaactgttgcaatgaactttcaaaaatacatgaagaagattggaaataaaatgttcaatggaaagtcatcaaaaggtaattcttctcctcttaaaccgtttcaatctaattaacaaaagtattcagtgtaaggagtgtgaaggattcggtcatatcttgtcaaaatgttcaaataccttgaagaggaataaaaaatgtatgatagcttgttggagtgataatgactctgagagtagtaaagatgaggaaggtaatgttgctttaacttttgtcatgccaaattctgtgtctaaaggtaaaaagtttgtgtgtttgaataatacttccaaagatgaagaaaatttagatagtgatgaatctgaattgactgatgaatttttatgtgaatcttacaaggagatgtataattcatggttgaaactttgttctaaaaactgatccttggtaagcaaaagtaaagaattgtcatttgaaatcaaacaactttttgagttgaatgaaaattttgaaaaagaaataatttcaaaaaatgatgaaattagtaagttgtcaaaggatttaaatgcaattgagaaaaaagtaagaatgcttaatcctagttcttctatttttgaggagatacagaattcaggtcaaaggaatcttgtgggacttggagcgtcaaagtcacaaaataaaaaaaaaaacgtgtttgtttccggtggaattctgccttctggtatgtctgttccaacttctcagaaagttgttgcatcaattggttctgttgtcttaacaaattagttactgctagcaggtaaaaaaatggtaagcatgaaaagtttattccaacctgacatttttgtggcagaaaatgtcatattcgacctaagtgtttactctaaagaacttcgccaaaaatgaattttttaagagatacaaatattttgaaaaatcaaagagagtaaaaacagaaaatgttcagaaaacatgggttaaaaagaataaatgctttgctggttttagttctgaatatgatagaggaggtgcttcacgtttttggtattttgacagtggatgctcgagacacatgacaggtgataggtctatccttacagacataagaactatgcattgtggatatgtaacctttggaaatggagttgaaggttatgttctcagaataggtactcttaactttaaagggttacctaagatcaaaagggtacttcttgtggaaggacttaaagctaatttgcttagcataagtaaaatatgtgatcaaggttacactgttaactttgatagagacaattattttgttttgaacaaaaatggtgagaatgttcttgaaggttttagatctaatgacaatttctataccatgttgcttaaattatgtgtcaatctgttgtgaataacaatactaatgtgtggcatgctaaacttggtcatattaattt

SEQ ID NO: 228405 - DNA, 1277 bp, Cannabis indica
tccccattgatacttctgattcttctgattctcatccgtcttttaatttcactgatgggtaattactctttcttctctatttcatttccaacttttgtgttctgttttgactattgttatttaatttgagctttagttgcaagaccaatgtatgggggatttaggaagaagctagctgataatcatgttttctttttggtttgtttcaagttgatctattattatcatggtgtaaaacgtgttatattggtacattgaattttagcttcacaatccaaatcgattttgctattcttgttatagattgcatgactgagtgtggatatcacagtttggattttgaatggggaaatgatggatataggtgtattttgttttttacccaaagtgattgatttcaaacagtttatgacaatgtgaaaagtcattttttagaatccaaaaacttatggtggacgtgttgtcaagtgtattgaattatacccaagaggggtagccatacccgcttggtcaggcatgtggtttgtctcccacaatgccttcttcttctttgcttgctatgaaagctgtgttcaaagatataagttttcccttttatgtgggataatatccttgctcctctctctgttgtcacttataaacattatgtgtgagaaacaattttctatctgacttaaacttctgttacactttaatgtatttaggctaaagttgcatggaacatatgtactacttcgatatgttgctcggatttccaccattcctaatttctatgggcaaaatgcatatgaatctggccaggtgattttccttatagataacccaattgcatttttgtttagtgttccgtttttaattactttgttggttacttggtccccttcctctctttttcagattgatgaatggctggactatactcctgttctttcatcaggttctgcatttgagaccgcatgcaaatatgtggatgtttatttagagagccgtacatttctggtgggtcattgtttgtcaattgcagatatagcaatttggtcaggtcttgcaggtatatattttctgattaaaaagtagaacaatcaactgtttatcaagttgtgcttgaaagatatgcttagtattatgtattcttcaggaactgggcctagatgggaaagtttgaggaagtcaaagaagtatcagaatcttgtacgatggttcaattcaatcttggcagaacacagtgatgctttaacagaagtacttgctacatatgttggcaaaaaaggaaagcc

SEQ ID NO: 228406 - DNA, 3361 bp, Cannabis indica
agagagagagagaaagaaagaaatagggtttgtggggagaaagaaatggggaaacgttaatataaaaaaaattaaaagaaaatccctttattgtttattgtttttcttttattgttcgataaattcaattaaaatttgccacctttaattactttattttatcatattttttttatttattaaaagtataattatttttttttttaatttagggttatgatatagtgacgcgtcactgtaatttttaataaaaaaaaaaaaattgggttttaccttttattgacccacattacaagagactaacagtgaacatttagagtctacttgtgttggtcactaaaaatactcctaaagtggagtgtatgcatgtatttttaaaaacattattattaggcacttgtgtctaatcttggattaaaatccttaatataaactcatatatattagtatattgttatttgaaatttaactgatcaaataaagtgatcatgttagtaataatttttattaagtattaaagtgttataagctaaatgtgtagataccttaagtgatatttctaattttattgatgtgctaaattagaaattttaaaatttagttacctactaggttttataaattagaaatatattggtagtggtcccttaaaaacaagagattttattcttatcttcccccatcgagagagaaaactagagaaccctaagtctttttaggaagatcattactaataattacctcaaagatcatatctatcaatgaataaatatacactttcactatttgagttattatctttgaatcaacaaaggtattctttaaatctatgtttatacacttacaataatatgtaatatgttcatctatgaaattaatcttgatattgcatattttatgagtgataaaaaattccaacaagtagaactagatctatatttaattgattatgtgaggatttaaggtttttgtctaaaaatttaagaattttttaaaaatctttatatttggattttgatctttaattaattaaatttgattttttttcatatgatatatatttaaaatttgaattcaaattattttttattttacaactttaatttaaacatatataatttaaatttaaatttaattatatatttaattatgatattattttattaaatatatatatatgtgtaatttaaggacactataattaaatctcattagcatttatttatatattttattttaacttgataaaacccaatattaaacatttaatgtttaaaaataaaaaaaaaaaactaaagaagctaaaaatcaaagttaaaatggtattaatatttacttattctataaagaataaagactcaatgtcagggttaaaataggtattaactttaaccgaaaatataaaagaaaaattatcccatatacttatttttttttcaaattttacggtttgggtttctcaggtagtttctatgtgggtttctatacgaatttcggttgcgatttaggttgctccgttagttgcaatatgagatttctatgtagaattccgtaaaaatgacaaaaaaaataaaaaaaaaaaaaaaaactattttgaagtgtacaaataaaaaaaaaaatctcaaaaataaatatttgagtatataatttgagaaatgttaaagggcactagtggtgcttagcactcttttatgtgtcaatatcactattggttcaactaagtatcgggtcccatataatttaatataataacttttagggagtatcgctagctaatcgtaagacaacatatctagaggtgttaggcaccactagtgtgcaatagcaatgcttatataatttcaatattttgataaaatttagttcgggataattttttaaatctttatatatagaacatggctatctaacggtttttgttggtttaatgaaatattttaagaaaataaaaatattctattaaatttaacggtgttagtaggtttaattttataaatatatataatattaatattatttgttttaagttaattcaacttatactaattttaaattattttaaatatatataaatattaatatattatttttaatattattatttttaatattgagtagtatatttaattttaatgttcttaaattttatatttatttttcttatattattaaaactttaaatgttttctaaaaataaataaaattaaaaattaattagtttcctttaattcataaaattttaaaaatacatataacaaaaataaaataaaaaatataattaaatatacataacaataatctagtatatttatatatctcgatcgaaattcaacatttaatttatttatctgtctaatttttataaaaaaataaagtggtgaaaggacaatttaaaattattttaaggtatcttatatatttttttaattactttttaaaagttattaaatttaaaatttgataattgggtatgtttactaatttttatatatatatataatttaggggagccttctagcatgcagttcctcctctctactaagaacttggtccctctcatggggaaattagtccaccctttgatgtttagtggtggtttcaggtgtttctttcctattagttattcctttcctcttgtttctctttccttttcgagcatttattactctgggggttattattacatcccttcccatctcattaaactccctcagagcattaattgctcaaaccctcaattctcgtcatctctccccctctttcatcatcttctcttgtcttctccccatttattacagatttttcaaatattttctctgcaaaacacccttgaagatagtaagatggaggcggacggctggacttccgaagctcctcagcttctcttcatcattgcaactccaatggatgggactagggaagtgactagggcggcgatgaggaaaatccttcggggattatggtttttcctatatatatccaaacccaggtattgttttatcatctctttgtgcctatttctttttttagcctttgtctttgaagtgtctttgtctgtcaatatggatgagttcttaaactccttgtctaatgctttagccctccctcctgatgagtccactgtttttacttatgaggttggttcctctagttcctcctctgctcctatcagccttatccttaagcttcataccattaggccatataatcgaccctctctgatgaaaatcctttctggtatgtggtcatcgctttgtcgattccctgttgttgtctctgaacatgctgatggcatgtttcttgtcacttttggctgtgagggtgataagggtagagttttggatggtcagccctggcattt

SEQ ID NO: 228407 - DNA, 2776 bp, Cannabis indica
agagatctagggaggaagacttagtagatagtattgcattatcaaagtggagtaactgctgtggatcaaacagagataattgctatggatcaatcaggtacacatacctaattattatatcttattattgtgttctatgttatatacaaatagatcttgggtttattattaatttttctaacatatgaatcatgcaaatagtagtttaagttagtacaaaaaaaagtaattaagagacttaaggtgcccctaagcatttctcattcaatatttgcttttgttacaatccccaaaagtccatagcactactggtatattaatttgacgaagatcgctaaaaaagtattattagtgtttggataaataacggtataattacctaaagttttaaagtttgtaagtgacataattctaatatttatttttagcggcataagtacctaatatttgtaaaactgtaatttttctctaatttcgtccgtacaaaacctattgttttcttaaacaggctacgtataaatgcatcaatcacattataatatctaaatatatatggctctcctaagtagtcgtagttatatatatatatccttccgtatgtatcttctcgtacgtacgtattcgtaaagtcaacagtcaaggagcaataattttgataaaaaacactatatataattatattgtaaaatgatcctaaattataaattgaaaaatgacttggccaacatatatacgtatatatataactttgttaattaatatggctaaaggctcgttaagtgattaattatcggtgctttaattattgtcattaattaaatttgaatacttctcctcacaatatcttaattaataaattagtattgttttcgtgagaaggatataatacatcttaagattagttagcaatattttttaaaaattattttttttaagttatatgagactcgatatttaattacacttatagcagtgtaacatcgagtaagatgttaaacactaagagtaaataacggcataagtacccaaaattttaagtttgtaagcgacataaacccaatgtttatttttagcggcatgagtacccaatttttaaatgtaattactcttcagttttgtcagttcagactccgttttaaatttattaaagaaatatgtggaagtaactaatactacatgtttctgtctagatccaatgatcaagaatctagcccttatatgtggtctgtttaagaaaataacagggtttgtacggacgaaattagaaaaaattacagatttacaaacattgagtacttatgccgctaaaaataaacattgaaattatgtcatttataaacttaagactttgggtacccttgattatatggtgacattagtgatacaaaatttactaaaaaaatatgacaaactaatacactaaaaaatgtgtaaataataggcagaaacgggatatgatgagtggtctctactcttttgtgagaggggtgtccgccccaaagcctgttacgacagtgggcactctcatttgaaccatctgatccctaaagagaaaaggaaaaaaaatgtgtaaataatggacaaagttatggttgaagatggttattttgatcatgttcataattttaactacttcacacacatcaaaagcctatagcttatctattaattttacatcacattttaatgtaccagtagagcatgccttaggacgttttgtgtgacagtcagtatatagtctcgtgatctgtaaggacaaagatcaggtaaattgtgcaattctacatcgcttgaggaaggtcaagtgtgatgattctaagatcgtgtaagtatctgactacacagttaaagagagcttaaatagatttattggtactgcctatatcaacaaggtacatcttatttttggtagcccattacgaaagaactccacggttaagcgtgcttgacctgagataattttaagatatgggtgaactgagaagttttctcaagaagtgtgcgagtgaggatgaagtacgctggaaatactggtgttggtttgtagggtcagtcgtcattctaggaagcagtcagagtgacgtactcgtgtacaagagccatcatcttgagtataagggcccaatagaggcttgaagcggggacgttacaaatagtatcaaagccttgacccagttgaaagtgtggtcgacgaggatgtcagaccttgtaaggggggtgattgtgacaatcaatagtcctgtaatccgtaaggggaaaaatcgggtaaactgtgatgtgggattgcacaacttacccgatatttccctattatttatcaaaaatacaaggtatactaactatgtttttcatgaaaatagaaggtacatattccttattatttatttaagtattaaaaaacacaaaatatgaggcaaaataatatatacttcctattcataaacataatcttatgttgagatgtaagatatcattatagtattatcttatttcgggcggctgccgatccatgaatttggtcatatctttggttctaataattatattatttcatacttggatctcctagttgctaatcattcctcatacaaaaaacctataaatagtatactaatgtaaccaaaccccttatcatttaagaattcaaacttcaaaaaaaaaaaaaaaaaaggcaccatcttctctatggtccattcttactattctaatattattaacttgttttcatagaaaactactacaagtttatgcagctgattatggtacatacatgcat

SEQ ID NO: 228408 - DNA, 2050 bp, Cannabis indica
ctcttgttaatccgttgaaacggggatgaaatttcgcaaacgcgatggtgagtttttctgggaaaattttaaatacgaaaaagttcctatgttttgttttatttatggcttaatgggacattcagagaattattatccaacaatatatgacacacctcctgagaacattattaagccttacgtattgttcatgaaggctccccccaagagaagtaattttctcactgcctcaccatggctacggcaagcaaatccttcagcacacagtcaatcggaggagcatcacagagaatatcctggcattaatgagcaacatgatacacggccacattcagaggatattaatgtgggggaaaatcatcaaggcaatatacatgggatcaccacaaattatggacgtgatggtgagttgacttcggtccttaatgagccaacgatggtagttatggagaataatgctttatttaattctgatatggatttatccattttagaatcaataaagagacgtgtgagtactttggctaaaggtggaccctctattgttccaaatgttactatgacaaatatcaacgatgaagtcactttggtggaattggatgggctttcaaaaaacgtggaaaaggtgggctctggtgttcaggcccacgatacatcatgagtgtcttaagttggaactaccgcgggcttgggaacccatgggccactaagttcttagaagatatatgtcttcaaaagaagcccaattatctgtttttgtgtgaaattgttagagatagcctagattaaccactttctgttatttgttagttagtcttaagaggttaggtagttagtttgttattctgtttctctctctgtatctcttgtctattgtaactaactactggtatataagatcaacttgctcccctttgagggcagagcttcattttcacatttctctctctctcactccatctcttcatctctgatatggtatcagatgcttaggttttcatggcgtccaaagacacagacacctctgccagaagtgatacaccaaaagctcccatccctgctgaagcacaagtaccaccatatttccccaataacaatcttcttcccctcaatctacgcctcgatcgatccaactacacatactggcgcactctagtgttagctgctgttcgagcatacaatcttgatggttttcttctaggaacaaatcctcctccacctcagctcactgcaggtaatgttcctaactcagcctatcatcaatggcttcaattagatcaattcttgatgcattggatgatgaattccattactgaaccaatgcttggatatgtcattaattgtcgcacctcgtcggagatctggacggtatttgatcaactctttgcaataacatccagggcgcgacttctgcaaattcgtggccttctccaatcaacaaagaaaggttcctccactgtcgatgactatatcctaaagatgaaagggtacacagatcatcttgctgcagcaggacaagcaattaatgatgaagatcttgctctttacattcttggaggcctcggttcagaatatgaatcaattgtggtcaatctcacttctcgatccgaacctctcactctgcaagaactccaattcatgcttcacagccatgaagtgcgtctgcagcaactatctgcaacaactttacagaatgtacaagctaatcttgccaatctctcactgaataatggcaatcgtggaggccgaggatacagaggagcttatcgtggaggccgtgatcaatcaacaaatcgaggaggccgtggcaatagaccaacctgtcaattgtgtggtcgtcctggtcatacagtccaaaaatgttatcatcgctttgatataacattcacaggaactcagaccaacacaggctcaaattcgaactctccttcagaaaattaccaagccaacatttctgaatctgctattacagaagagtctcctggcacatggtacttagatactggtgcaataaatcatttgacagctgatgcacaacaactcacaacaa

SEQ ID NO: 228409 - DNA, 1280 bp, Cannabis indica
tgaattctagctatcggaggtgtattctctaggacacatcgacgaaatatgaatagcgttacccaaggcatgatttagagcttgctgcaatggtccttgctctaaaaatatggcgacattatttgggggaaaatgtgagatttgcataaatgacaataaccttaagtatttcttcactcgaaaagatttaatatgaggcagaggaaatgagtgaaattatccaagaattatgattgcgagattccgtatcatctcaggaaagccaatgtagtggcgaatgctttgtgcagaaaagatcccaaacaagttctcaacactttagtgacaactcctcaactagcctcagaaatggttaaagccgaaattaaagttgtggtaggaaagttacacaacttgacactttaatcagatttgttgtaaaggatcagaaagacataattaaaggatcttgatctaattaaaatttaggatgtgatattggcctgttggcctaaggactttttggatcttgaatatcaaaatgttactttataaagctcgagtttgtgttccagatgatggtgatcttaagaagcaaatccttgatgaagctcacactacaccttactcattacacccggagccacaaagatatattaggatttgaaaccctactatcagtgttgtggtatgaagaaagctttggtggattacgtggctaaatgtgtaatatgtcaataaatcaaagcgaaacaccaaaggccggtagcgttattgcaaccattagcccaacctgggtggaagtgggagagtattgcaatggaattcatgattaggttgcttaaaaccacgagaataaattactcagtatgtgtcatagttgaccattccacaaagtcagatcattttatgctcgtaaaggctacttttacagcggatcagtatgcagagctgtatgtgaaggagatagttcatctctatagagcttccaaatccattgtttcagacagggacccaaagtttacattaaaattctgggcaaatcttcatagagctatgggcataaagctgaagtttagtataacatttcaccctcagactgatgggcaatcagagagaacaatgagggttaatggagtaagtacttgcctttgattgaattcccctacaataacaactaccagaatgcaaaagggatgactccttatgagatgttgtatggtaggaaatgttgttccccaattcattgggacaaatttggagaaaggaagtacatgtggggaatattttaccaggatcta

SEQ ID NO: 228410 - DNA, 2294 bp, Cannabis indica
atacaaaccaataaatcaataaaacttttaagtacagaaaaaaaaaaatgcaacaaagtttttatatgtagtatcagcaattcatgcaaattgctactagtccacatagtcatgcctaaagatagataaaatttattagtaagacttcaaaaatacaaagtttttgacttatgtataaataaactctttctaatttcatgctgcaagcttgatgtattccaccctaactaatgaattttgttgagctttcgagaattcaaactcccttcgatctgcttgaaatgtgctcgttttctcccaatccaagacttgaaccaccttctcccaaatgaagaaccttctcgcgaaagtttgcactttgttctcctccttgtagaattgtttgaaaactcaagacaattacacaaagacactaaatacataagtatagttgaacaaactaacatctgcacaacaaaaactctttgtcactagatattaaatatatgagatacaaaaatcataacgtattcaatatgagtatttataatcatcatacgcatatttgacacttaagcccacaagcaaactttcctaatgaaattcttcaaattgacttaattttcatattatataactacagaatcatgagctatatattacaagaatccttcctttagtttaaatgagtacaatttcaaatttctctttttcaaactttatcaaatatttaaagttacgatcagaataatacaaagaattggctaaaaaaaaggaaaccacaattgatttaacttttttataacattaacgattcaatatattgtcaaattttctaaaaatagaaaagtttgacataaattcactgtaaaagattactgttattttaaatttggtccacctgatgtggcttttccacatggcaaaaagaaaaaaatatgtagaagacaactcagcactaacctgctaggattagtgccgagcagctttttatccttggaaataatatgatgcacgatacatacaggccaacaaagacccatatacctgccaacatagtcctggttggacctataggtggccagccaggagtgccagcttccattcactgggcagctttcaacaaggctggctggccggccaatggtgtaagaacacacgagcagttgtgtttttctcaaaagtctttcaactcgccttcaacatgcctaggacttcggacacctcaaactgcccacaaagataagaactcttcatcaacaaataacaaccctagtctttagggatttgctttgtaaatcaaatatatgttgtaacctccctatttttcaggaatatctctatgcacaacttgtaaaccataataatatataaagggtcattacccttcatgaaagggaccacgttctgaatcctaagcacgacacatgtaatcttgctcattagctttatagttataagtcctctctcttttcatacttttcacctacaaacttcgttgtaatactgaagagagtccaactaaaaattaaaaggtcttcgcctgtaatctattggctatcatctcaagagtgaatacaactaaaaggagagtaggtcattacctaaacaaaaggggtcgaacctctataaatatatgtgtctctttacacttattatcgttccacacgtggcagtcataagctacgatcctagtcagactccgtgtcggttggttaaatttgttggattatattttaccaggatctagatttactaccatgtatattatttaacaccctatatgaatttctaaaacaatgtaatttaaacacatataaagtttcagagaccttacagtggttgcagcagaattatatgactcattccgctcagatctctaacccttgtatcctttctatagcagagtatcaccaagatctgagcccaattctccttctcttgattttggactcttcacagtcttacacactatgattgaggaccaacttgttatgtgtgggtatgtactcaatcactaatggctgaattttggtttgtgaagaagaggctatggtgtttcgaattgaagaagaaaaaaggaagatgtctcatcaaacctagagagaaaactaggtttttagctttggaggcattagttggataatgagaccataacctttcttttatactatcttcaatagggttagggttaaattattaggaataaaaataatgataaaattagagtaaaagtgccacatatggccggccacttaatgggccccatacaaattcggtttttgcaattttttcaactattttatctatttttc

SEQ ID NO: 228411 - DNA, 1078 bp, Cannabis indica
ttaaaacttacataaaatagaagaagttatataaaaccttaactacttttaaacatttataacatgttggggatgctagtgcgcgcatctcatccacttttttgctagacagttatattaaacttttgcttttaaaggtaaaacatctgagcgacacgtaccttttacttttaaaggttaaacctttgaatgacatgtgtccacaacgtacaatagtccccaattgtccagctacagcacacacatacaggcacaattattttcaagggacctaatagtcagctctcttttgcatgtaattttctccattagtgggttttgagcagaaactctaggcgggtcatgggcatgtccatacctgctcttagcctataaatacccttctatttttatacaaaggggggatcacaatctaaatagtcgaggctctgccaatattgttctaagttttcttcttgttcaagagaaactaagaacatacaaagttagagtttcgtacaaaatattgtaaacacatcaaacacgcttttagaggctaatagactgactcgtgaactaagattaattaacacctaaactatgtaaaaaatctcaatctcattaatatctgaaaaagcaatattgatcaaccatgagttagagggcatgaaagtaaaatatgttttgttttgctcaatcttcggggttgagttagcagaatgatgaagttcataaaactattttgatgtataaagtaatcttttgagcataaaattagttacacaattaggtttaattttaaatgcctggacactggggacaaaatttgattgtcagaaaatcataaccatcattgggtaactcggattactctaaaggtagatgtctgcgacactctcgggcagtcgaaatcggtgataggccctttaagtacccattcgggtatcggttgggcaggcttccatatttgaaccactctcggtccaagaaaatgtgtctttcgtgtttgagaaattaggataaggctaggtaagcttaagccaatctatcggtcttgacttgttcccggttccatgaggcttccccgcgacaggattgt

SEQ ID NO: 228412 - DNA, 1699 bp, Cannabis indica
aaaagttgccgagggaattttcttctcaaagtaagtaaaattattatccaaccctaaataagcttgttttgtgcttggtttgtgtaataaggcatgattaaacatcaaaattatgaaattattagtaatgtattaaaattaattaataaattataattatatctacattatgaaaataagttttttattaaaaataagaatttgtgatacaatttttaattatagaaattgttagacctattttttagactattcaataaacaagtcgaattgtattgcacgtggcataaaataataaatcttgtaacaaatgtattgtgaaactagttgaataaacaaaggactactcaacctgtgaagtgacctcatctatataaggagcacaatgttcatgaagtgagatatatttcaacattgaagggattatttcgataaacattcaacatctcgtaatacaaagattttatagctagtcgtaagcaaggatctagtggctggtcgtaatacaaagatcttgtacctggtcgtaatacaaatatattgcattttctcatattacacattgattatatagtcaggaatgcatctcctcgtattaaacagtcatgaatgtatctcctcgtattacatagtctggaatgcatctcctcatattacgtacaggaatgcatttcctcgcattatatagtaaggaatgtatctcctcatatcacacagtcagcaatgcatctcctcttattacacagttaggaatgcatcctcgtattagacaacaacaatgcatctcatcatattacatagtcaacaatgtatttttctcataatacatggtcctctcgtaatacatgatagtccacaatgcatctcttcttattatacaatagcaatgcatctcctcgcaatacatgctcatcaatacatctcctcgtattacacactaagtgatgcatcacctcatattacacacacaataatacatctgctcacaaataacatggtctaaccaagtcaaaggtcatttctttgtatcttaaataaaaatagttatttatacttatctaaatgttcagttatatgtgaaatgtgggcattaaccaccctttaattgtaatttttcactaagataaggttgagtaaccaccatcatattcttataaatagactcaaaggagaagagaaaagactgatatatagaaattttactaaattgtaaatacagcaaaaaactcataaataatgttaactcgtggagtatgtaaatttatgataactctatggtaaacttaattttagtggctttaaactagatgtatcatgaaaagagtaatgaaagtgtatttgtttgttaagttgattagtttgtatcttaatttttctatttagtatgttagctttttgagtcttgtaaattgttagttttagctaattcttatttaattaaatcttgtttgttagtatcttatataaaaatagttatttgtacatatctaaatgttcagttatatgtgaaatgtgggcattaaccacccattaattgtaatttttcactaagataaggttgagtaaccaccatcatattcttataaataagggtttactgaaaagagaagagaaagactgatttatagaaattttgccaaatcgtaaacacaacaaaaacctcataaataatattaacttgtggagtatgtaaatttat

SEQ ID NO: 228413 - DNA, 823 bp, Cannabis indica
cagagcgaacattgctcatgctctaagcatcctaaaccagttcatatccaatccgagcattaaacattgaaaggtcctcaaatggttattaaggtacttgaagggcacatggaattatggtctggcctatgagaaatcaaatggggaactaaaattgaaagggttcgtggatgccaattttacatcaaacaaagataccaattaatcaaccatgacctacatgttcatgataaactggaactatatttcctagaaagctcagttacaatccatggtcggccctttccacaacagaagtagagtttatggctaccacaaaagttttcaaagaagcattttggcttcgagggattttgtatgaaataaataaaaggaggagtaatagtgtactcggatagccaatcatcaatccatctttataagaactcgttttatcatgaaaagagcaagcatataaatataagtatttattggattagagaaaagatagaagaatgactagttgatttggagaaggtcaaagtagaagataatatctctgatgttaggactaaggtcctaacagttaacaagttccagcactgcctgaacttaatcaatctcaaaaattagtatactgagatacctcgaacaccaatcatgatggttgcattctttcttcatcaccatgacttttaatttaaaggaattatgtggaatttgtggtatagttcatctgaatgaaaaggtctcaagtcaagtcttgtggaaagttatttgttgaaattattttaccaagatctagatttactactatgtatgattttaacatcctaaatatgaa

SEQ ID NO: 228414 - DNA, 2675 bp, Cannabis indica
tcgttccaacggttgggaggccgatgaactccattctactttgacctatgcccatcagctagagaagatagtggttgtaaatgggatcaaatctttcggctctagagtttatcatcgtcttcccaaagacgaagagacactgaaccacaattacagcggttttggagcctagacccaaacccatcttatgtctgaagccatgctacctctgcatgactatttcattgatttccttgtattttcggaacttgtgccatacctactaattcctcaagcctacaacctgttattaggcatttttattttttatgcttttagggcttgggctgctcccaggcccactaaaattttatatttttacgaacttctttctgtcctcgagaagggtgaaaaatttaaagaaaatttttacaagttacatgctcatccagccaatgaaaccctgttatccttcaattttcaaaagaacgtgaagcaataccgtcataggtttttcttttcttctaggtttaaagcctctcaacactcggacctgttgacggactgggtcaggatatccccaatgcatcgcactgctcccactcaacttttcgtgaaccatgcccatgtgtttgctggctataagaaagaatacttgaatgtgggagatttggtgacaatctccaattgtcagagggccaaactaattttggagcgtcaatcggttgaagattttaacttgtccaaggtaatttgccccaatgcccgtaatcctaggagcgaaaaggcactcaaggctgacattatttcaaccgtcgaggataaatacaacaagtatagatacaagaaggaatagaaactctattacgctcgcctccaagatgcttccgcgaggctcatccaggagaagggaagaaaagaaaagacgccaactaggcctgaattttcttttcctgttttgaactccgggacccctaatgcaagtacctctagagcccataagtcccctttgaaccttcatttcattccttccatccaagattattcttacttaaggccagtgggtttttacatgaggctgtataaattttggatgccccatactcggtggggcaataatgcaaaaggtttttacttttccaacttgtgtaatttcttgggtcggtctcaaatggactctagtcctcctgttcctatccttttggatcattccacttacatgaccttgaggttgttccttccttcagatagctttctatgggatgacaacaccagctctttaatttatgaatttcctagggcacaattagagcgtcaaggtagaattagccttccttgatttgctatacttgcatttgtgattctttagtgctttttttttttaactctttttgattattttgaatagcaaaacccatggacaacctactggccatgttagccaccactcatagccctgagtcggagatgcctaatcctccctaggtgacggtgagtcctgggggcatgactgaagaggtacttgggaaccaggaggtggtactgatctaggaagaggaggaagagataacccccacttgaccgtaaacggaaaggtgtggtttcctttccagagccttcaaaaaagcctagacggccaataacccctgatcctaggtctgacttcaatatcccagctgaagctaaagacttcctcgccactcaagccattctcctgacctcggcctatcctgatgaagagcgggtccagctccacattgccaaacacaactatgcggtggacgagttgtccaaaggcgacgcaaaggcagaggctctgaaaaaatggctaagggaggtccatgatgggcctttttgaggtgagtatactagggtggtgtgggacctaaatcttgatcccatgatcgactggttcaagaactacctgggcccaaccctggcatttttttcctctgagatggtaagtcattttgctgctgacctagcccaacttccaacaaaaaggtatgcagcctacgcctccactaaacctgtctaccaaattgagaacatgagcgtggttcttacttccatgagtatatactttccaggtttgttctcctttttcattattatttttgaagacctgacccaattttattgattgctgtcaaattgctatggaggctggtcatatctctaagacattaattgaccaagggtttattgttttggagctaggtggcatggatggcgttctgaggaagctcggagagtctgagaaccagatggagactcttcacaatgacactctggtggagaaggctctcagggagcgagaccaggaggctttgaaggccaaagatgacactattgcctcaaactagaaggaccttctaaatgctcaagaggagattcagggactcacggtgaaactcaagactcttgaagagctacataagactgacttggagactgctgtaagtatgtcggctgagcttaaagagttgcgcgagttctgggaacaaacccagagggaggctgcaaaaggtgcaggggaagctttattaactccggtgacatataagcattgtgtgatgcacttcgaggatggagtttttatgtgttggaaattgaacaaatttgaacctcgcctccacttcatgcctgatcctgaggatacagtggttcgcttctgggaaagaacaagaagctgg

SEQ ID NO: 228415 - DNA, 710 bp, Cannabis indica
gatatatcaaataaaataaagacggaagcccatattttttttttttaaagcccattttgtttttctaatgctcttatttattccaaaacctaatataattataaatatatattttaacttattcaaaccctaaacctaattttttcactataactctagccgcactaagtctcagccaaatctctctgttgatctcatctcatgtcttatacaactcagtctcactccaatctcttagtctcagtctcagccccccaatcgtaagttaattcaatctcctccctctattttgctcttctcactctcttcttaacttgctctatgctcctctctcattttttttttatctcaggtgaggcattactgtttcgggctccttcattgtaggtggtgaacatggctcgttgaaaaaaatctattggtcagtctaacaaagcccgtttaaagcacgatttgggcccgggcccagtactattttttcgtgcccatgggccgggttgggcttgacctatggaaatatgggccagcacggcacgacttatatttttcgggctttttgaaaacgcgctgggctgggccgtgccagcacgaatttacagctctaggcgggctaggcccgtgcctagggaccacacctttcgggggcccaaaataaaaaaaaaattattaggcttttatttaagtaagattaagtatattgtaaacaataa

SEQ ID NO: 228416 - DNA, 1424 bp, Cannabis indica
cccaatgtaaggtttctaatactctatatgtgtttatttcgtaatcgttttaaaagttcatatttagggtgtctattaacatacttgtgagtagattcaagatcctggtaaaataatttccaacagtccatccacatgttagcagattatatcctaagtcattaaagtgtgtatttcttggttattctcatcttcagaaagggtataggttttattgtcccgatcttaaaaatatcttgtgtctattgatgttacttttgtgcaaaatataccttatttttcaactttacctactcctactcattagggggtggatggtgatttgttggtatattatgtcacatccttgacgcctgatacatgctatgatgagtctcttgttccttcacttgccttgttcatagctcccggaatgccaccacttccgtcacctccaccacctcctaagcctcctatagtgtactctaggttttcaccttttccaccccctgtttcataattgcacctacaccttcgtcattagatctagaactcaacgatgatcttcctattgcactacgtaaaggtaagcacgaatatacatatcctatttcttcttttatttcttataataatctgtcctcttcttcttgctcttttattacttctcttgatttcgtcactattcataaaacagttcgcgaaaccgtgtctcattctggttggtttgctgcagtgataggagagaagaatgttttggttgcaaatggtacttgggatttggttaatttacctccagggaaacgggctatcgagtgcaaatgggtgtttgcggttaaaatcaatctagatggaacaattgctcgcttaaaggcccatcttgttgccaagggttatgctcagacctatggagtggactattgtgatactttttctcctgttgctaattcatatttgttcgactgttcatttccatggtagctactcatcatttgcctttgcatcaaattgatattaaaaatgcttttcttcatggaatcttaaggaagaagtgtatatggagaaacctcctaggtttgttgctcagggggagttagggcgagtttgtcatcttcgcaaatctttatatggattgaaacaaattccttgtgcttggtttggtaaatttaattaggctgtggagaaatttggtttgttgaaaagtaagttaaatcattatgttttctataaaagatcaactactggtatcattttattagttgtgtatgtggatggcatcattattattggaaatgatattagaggcatctcatcttttaagtctttcattcatacccagtttcacacaaatgatttagggttgttcaagtattttttaggagttggaagttactcagagtaaacaagatattttctatcttaaggaagtatgtacttgatttgtt

SEQ ID NO: 228417 - DNA, 1356 bp, Cannabis indica
tacattttattggtatttgtgaggcttaacttaaagttgtactgttatgatagatgggagagctgaagaagctggtagaggagggaaaaatcaagtatattgggctatcagaggctagtgttgacactataagaagagctcatagaattcatcccatcactgccttacaaatggaatactctttatggtctcgtgaaattgaagacgaaataatcccactttgccggtttgattagaactttcactagtataattcttaactttagatcatcatcatcatcataactcaccatgattttggttgttctttccatgcacagtgaacttggcattggaatagtggcatacagcccacttggtcatgggttctttggagggaaagcagttgtagagagcttgcctaatgagagtctcttggtacttgaccataaacaaaaacattattatcataataacaattcaagttttcatattcaggcatagaatcatgttgattttccttgtacaggttggtcatccaaggttcaaagacgaaaatttagagaagaacaaagttatatatgctcgactcgctaatttggctgaaaaacatggttgcatacctcctcaattagctctagcatggcttcttcatcagggcaaagacatagtccctattcctggtacataccatacaattgttcttttattatgtgacaaagaggacaaagcatgtttgttaattttcaggaacaatgttttttagtaacagtagtttgtgatgttttacagggacaactaaagtcgaaaatcttgataaaaatattgaatctttatcagtgaagctttcagatgatgatttgaaagaaatatgtgattgtgtaccggcagatgaagtggctggagaaagagaggtttctgctctgtctaaatatgcctggaagtttgcaaatactcctatgaaaatctgatgttcttttatcttaaaaatctacagtgtgtttagtcctgtttataagcttgtgaattgcttcattaagaataataatacatcatgaaaaatattggaaaattatacatattgtactgctaaattcattagtggctttataggtggtattatgagtgcctaagcaaattgaaaagtaatttagtattgtacaatgattctaattcattaaaatattaaagaatttgatggagaatgaattagatcaaagccaaattgttaatctcaattaaattaagaagaaatccaatattttttaaagctctaaacctctgaataggggtgttcatcaaaccgctcaaaccacccgcaccgcaccacaccgcaaaaaaaatgcggtttgaaattctttgcggtgcagtcgcggt

SEQ ID NO: 228418 - DNA, 1057 bp, Cannabis indica
ttttcatttctttttattattttcttatctatctctcaaacaaaacctcaagtcatgaatacattgggtagaattagaaaaacaagttttttttaccaatgcacagtgcaaacaagttaaccatgcataatagctctggaactttctagcgggtttcatcccgaagttctctggttcagtcctgctcattgtcttgcaaatctctggatctaatcctgttgattcgcctctttgtggtgtcgtttaatcttttcttttctctttcatatttttctgtttctttgcttaattgtgttaatcgtttgctcttcctcactcctttctctttctttatttattacactgccagttgacttttcttctctctgcattacatttattgctctttctctcaatcgatttcccatttattgctccagatccttttggatcgtttgaaatcttatcttcaggggatttccttgtcttttatgcattatcccttttgtcttgtgtttatatcataaatgggtgccgtcgtttcgagctcttcaagtagggaggcgatcattacctgcactggctatggttacggcgtagggcttaggaagggacgttttcagcatctcttctcaaccttcctcagtaagttaactgtctccaggtatatttctctcttcctctatttaaggatctgggttcttagaagatcactactttgccaacttttacctttcaaactgtctgccactgttctgagtcttttcttctttctatttgatcctatggattctctggctcttaacatgactgaaatcttgaaccttactgatcgtgaagctatcgttcatgatattgaggatgattttaggggggataaccctcctcctcaatctttctgccttgtatttcgtgttcttacccctcgtaccatcaaactggaatggtttgaggaggctatgaggaatgcctggattacccgtgcatctctaactttttcctcttatggatcaagtatgttcatggtggaatttgagtgtgaaggagatatgcgaagggttcttgagggccaaccatg

SEQ ID NO: 228419 - DNA, 1944 bp, Cannabis indica
gtatctgccttagtccttgatgagtcttggctccggcatcctgacttttccattgcggcaaagtaataagttggacattatctcattattttatcattactgatagttccttctatcattatgctttgtaaaccgtatcaaacttcccatgtttcaggtatgtaatgagtcctcccattagagcatcaggacataacaaggcccttcaagctgcactttcaatgggagttctacaggttctccttcatcattacaaaatagtgtgaatttaatcaattgagcattaaaacagactagatttccatcatatcttcaggttcttggctttgccatttctgatatttaaaattatatataactttgtgctgcaaagagtagcacaatagcacatgggttctgattaagcattgctctcaatttttgtagctgttgtgactagcagtttgtgaccttgattgagcgtagttataacttataccgttgtgaccttattattcattgttagatgaagattgttctactctctgttgatccgtattatagtttttttctacaaattatgtatctcatataagttagaaatcgtattaggaccattagaagaaaaaagaatggtataatatgagaaaagctaatacacccttatttaggaacaggagtgactgtaactatagagttcatatcttgtgtggtgttatggatgggatctttaggtcccattggcttcctcttcgtagactagatgcatcttctaatgcacaatatataagcatgttgaaggagagcatttggagtagcgttaacttcttaaacaaagagattttgttaactcaaccccgcataagacagcaatggatgaacccaagagaatagaacaatgagaattgctaagttggatttacttaaccatcattactcacctgcatagtttgactacagaatttctcatgatatttcttggagtatttggtctacctagtactcacatttttgctcattgttcttacaagaaaatatcctatcagcaaacaactttagtatgattttaattggttcttaggactctatcctgtcagaaagtaaatagattgaatgaaattgctagaattctttattaatcttgctgaaatggaatacaaatttgcaagtattcaagaagcttgatctcttcaagatgacctagacaaaccaatttttctgatagccactaatgttctaggtcctcttgtttatacaatcagccccaaagtttgtaattacataggagtcataggacataatgtttaggcctttccaaattccttattttatgtgatacaagtcctattattatatttccttctagaataggtaaactctgttagtcgcctacaactacaagggatagcaaattattaaacatctcacgtgcctatttgctgtgaatttataatattcattttatactcatttattactttgtattttctcaaataataggtttgtatcctttatttttaataatgctctcaattatatgtaattgcataattaaatttgaatttagaactcgtataattgaagacagtttgatcgtattgataaaatttgattgatcaaatctgaatataaggtactaatatgtacgatttgaaaacaggatatgagatgagtattattggaaatacagggtatcaaacttgtatttaagtaaaacacacgtaccaaatgagtacacacccttattattaactagtcttacctttaccttttcactaaagatctatgagaggagggtgcctttcttaactttctatcttcccttcctttcataactttcgttcgtatttgtcttggtttcttctctaaacaactagaagattttgtgtgtggtaattcactttttataataagttgaaatgatatttatcatggcaataaatttatgagacactaaaatactta

SEQ ID NO: 228420 - DNA, 1379 bp, Cannabis indica
tagtttaaccaaaaatctgctcagtatttctcaattcactaagcataacaatgtcaccattgagtttgatgatgtttgctgtcttatcaaggacaagacaacgaagcaagcacttcttcgaggtaccctcactgatggcctttaccaacttcaagcccccacacacaagtctcaccattccaactcagaaaagtcacaaaatgctacagcaactcccactgttttcaacttcactacatctagcaaccttgataagtccaagacagcatccatttggcactgtcgattaggacacccatcaagtagaattctagctaaagttctttccaaggtgtctccacacaccaaatgtaatcatgtacccttttgtgatgcttgccaagttggcaaattacaccagttttcattcaaacaaactgaaaataaattaaaatgccttttgaactcattttttctgatgtatggggcccctcattctatccatctaatgatggctacaaatattacctcagctttgtggatgatttcacaagatatgtttggctttttcccatgaaaaataaatctgaagcaacctctatttttcaacatttcaatgcctatgtcaaaagagtttttcaaaaacaaatcaaaagtgtgcaaatcgacttaggcaaagaatatgaacccctttacaaattgttcaccacactaggcattgttagaagaaactcttgccctcacacacatcaacaacaaggtagtgtggagagaaaacatagacacgttgttgacattggtctcaccctccttgcacaagccaatatgcccctccaattttggtgcgaagcctacacctcagctacctacttgataaataggctacctgtcacaaacttgagttaccaaacaccatatgaacggctatctaaccaattaccagattacaatctcttaaaggtgtttgggtgctcttgttttcccttgcttaaaccatatgaaaaccagacaatactgaaaataacgaacttaactaatcttgatattagttggtatattgagtagttagttaaagtgtccagctgtacaattctgttattgtacaattctgttattcttttcagttgtaaggtccttgaccatatctcttgtatataaataccaaaggtctttctcaactcagttgagttgagctttccatatttccattgttcactctctctcaccttcatctttcttgctcattgcttctggtttagttcttggctttctgtgttctttcaggtaatttgatttatagttttggaaaatgttataaagtgccaaatactacagatatatagtatatggtataatattttaatgtcagtttccacatatttttatttaattaattttat

SEQ ID NO: 228421 - DNA, 899 bp, Cannabis indica
aatattaatcatgtttggccctagaaagtatggttagaatgaactacctttaagagaccatagggtcgaacgtgacatttgaaagaatcccacaaggtcaaatatcaagaaatttgtgggtgtacacgtcaaaaaatttgtgaattttgaaacaagttaaaagaccctaacactgaaaattagcacacattggccgaaaagtctcaaatagaggttaaagaggagacaacgaaagtatctttttggataggtagcactttggctcataacagaccacaaacgacttttttggactggtgacactttgagctcacaacagatcacaagtgactctgataataagatgaatggagttccatctcaaaaccaattaacaatggaatgagtagtttattcatcttatatatgacaatttatttccacacattaacaatgtggaattaactctaataatttcccatcggagatgagacggaaaatcccttaatgggggtagggatgggacaggaatcccctaataaaaaataaagtttataataaaaatttaaatataaaaatattaaactacataaaaattaaaatattacacattaattattattcaataaactaattattatacaaaatttaacttaaaatttataaaaaataatactaatatactaaaaaaagataaatataaattataaatataaaatattattaaaaatataaaataaaatagtaaacaaagtccatgtcacggcggggagtgtcacctatccacaccccgtttactcaattaggaacaaaaataaattctcatctccatctcattttcattttagacggaaattttactcgtccctataaaaaactaaggtccctgcgggtcatccggaaaaatagtgcatctctaa

SEQ ID NO: 228422 - DNA, 2012 bp, Cannabis indica
caaaactaattggcaatgagaggagtagctcattcatcttatatatgaaaatttatttccacacattagcaatgtgggactcactctaatagggcttatccattgttccttacttggttgcccgttgaggtcctcctataaaagaaagggtaaattacgacataaatacctaatgtttcagattttatacacttaaatactttatctttatttttagaggtaaaaatacccaatgttacaattctcttacatcagttactaccacttccgttaactcataaatatggagacgtggagggcccagatgtattacatttatttattttaatttaaaatttaatcttcttaatataaaaaactaattgctacttgtttcaaaaaaaataaataaataaataagagagatgcaaaactaaattaccataactgagtgaaccaatgcagtttatgtgaaaattattatgagaactgaatttttttaagtagcatttaatttatgatatgaaaactattaagttttaaaataaaaataaataaatgtaatgcatctgtactctccgcgtgtctatatttataagttgacagaagtggtagtaacaagtgtagagaattgtaacattgagtatttttgactctaaaaataaagatatatatttaagtgtataaaatctaaaacattaggtatttatgttacaatttaccctaaaagaaaaccatgacctatccaatagaatacactctacgtgttacttctaaaaaatgccacttttcgaactctaaaagtcaaccaaagtgaggggggaccttatgcaaagtgtcctaaccactacacacattcattagttgacacacaatattactccatatactaaccatatccctccactaacataatttctttatataatataggaaaattttatatctatacttttttaaatagacgttttagtttattttttatcatcatcgtgaacattttaatttttaaagattatttataaatttttaaaaaatttcaaatatagtattaaaatagaatttaaacagttaattacttataagaaaaaatagtcactcatgtaataaaatatttgatttgacattgtaaactattcagagttttttaaaatttacaaataatttaaaataactacaacatacacaaacataaaaataatttgaacttaaaaattctccctaaaacaaatagaaaatataccaaaatagttttaaaaaatgtactataaaattaccatataaattgcaatatatacatgcaaatgaaactcataataatagtatttccccaatagtagtgtatagccacaaatttgttttccatacacaacacaacactctcatgttcatattcttagaaaatttaggttaataaaaggccattctttcatgcacttataaacattattgttcttcttcttcttcttcttgttcttattactattattattattgatcactatttatatatttgtttttgctgaatatggatgtttctggataaggataaactttttcttaatgtaataaattaaataaatattgaaagaatgcattttatagttcaattttcttaaaaggtgaatattttttaacccaaggcttgtgcttcgtatttggattgacacaattatatgtataaatcaaatttactaaccactggtcaagaacactaggacaaaggtatggaaggagttgcagtctccaaggtttttcttttaataattctttttatatgtactatattgggtgttaagaataaatttttgcttttatttttattgttcaagtgtctttatttgattgagaatattattattggataccagtgttctcaacatgttttataagtggtgttttacgtttagttagttatacttcatacaagttattttcttaaattatataaaatctaatacttaattacactaataacaacatgacactgaggagaataataggtactaacggtgacttagcaattctaaatt

SEQ ID NO: 228423 - DNA, 1653 bp, Cannabis indica
attacattttaaatggtatttttatttataataaattaaagattatttttaaataaagtattcttagatagagtttctactgtactttaattttttttttcttttttctttttttatagccattgaccagtggcaaggataagcttattttcaagttcaatgcttttttatttattatacatttcatatttattataccccttattatataattatattgcatttgttatgcatttttaaataagtgttttttttttttttcatttttttatataactgtaatataagtaattatatagccattgtgtacatttatgtaattatgaatgattttgtatttcttgccctataaaaaaaaaattagataaatttatgtgagtgatattgtaatttttcattaatattgaaaatcataaaattatagttattatattcttatcaatatttcccttcttgattattatgcacaatcaaacattattatcttacatgattataattcatagataggcaataacattataattataaactaggaaacattctaacaaacacaaaccctaattaagattattttggtcaaaaatcaaactttaagattatgtgtgacaatattaattaaaattttcatatattcattaaatattttatactaattgtttttccattttaattttgtaggtgttctagtggtgagatgaaaaattacaagttagaagttattttattttatttttattttttctcatattaatgttttattatctaatttttctgtgatatttcttcatgctcttagaatagataatgaactttttaagatgaaaaaagatcattcacttattacgcaacttagttatatttattattttaacatttaatcggtttaccctgacaaaaaaaatagtactattttttagttatatgaattaaaaattaaagaagtttttaaagtatttatttttgggagtgtcaaagtagggtctacattttttggctttgttgtttgtaacctaatattttctcaatctcctttggttttttgctctcttttatagttaattgtttgactctattcaattatcatgaaggagcacatacaaagtgcatatgagatactagacaaagaagaaaattggggcaataaaggaaaagttgatgctttgatgggcaacaataatcaatccattcttgatgaaaaaaaaaaaaaaaagaacatttagattctatacatcttttgtatccaatgttgactgaatttggacacatgtttcttgttgtgtctaaggacttaatatatttatatataatatatatatatatactaggttattattgtatgtatatttagttatattttaaatttttatttttcttatgtatagttttaaaattttataaattaaaaaaaaaattacgtattaatttttatttttgttaaaaaaaaatagtatttaaagttttgaaaatttgaggaaaataatataaaatttaagaatattaaaattgaacatacttcaaatattaaaaataataaaaaaaaaataatactgttacaaataatatattaatatttatatatttaaattaatctaaaattagtataacttcaattaacctaaaacaaataatatttatgtatattaataaaac

SEQ ID NO: 228424 - DNA, 3780 bp, Cannabis indica
tacaaaaaaggacttaaaactactaaagcatgtaattatttttatcgactaaacgtttacatgatgcttcttattgtggtagaaattcattctatactcttttatgttgttcttcttttatttttacctttcttttttaaatctatctattttttacctttttttaaacattgtaccaattttgtcatgtcacttcaagatactctccatgtgattctcttatgtaagagtatttgggtacaatacatataaaaagaggtatgtttcaaataaatataaaattagaagtaaatttgattaattaatgaataaaaaggcatttttcaacttaccactttattgtgatgtttcggattgcattttacatgtaatatttcaatctaattatttacgatcgaatccaaataactagactccactaacactaaccttagctaagttttaataaaataaaactaattaaaattttaaacctaattttcatgtatatatatacaacataaattaaaaatgtaagtcataatacttaaatttgtatatatataatttctaaaaattgcatcgtatccaacttaatgttttctttataataacattttcttattatggtactgtaacaatcatgttacaaagaatgtcataatagtcttttaatttaaaaatttggtataactgtcttaatttatatataagataaattagagaagaaacatgcctaaacaattttgcatttaaatggggaaccaaccaataatatgacattacatgatacaagcagtgaagaaagttccactaatttgaggtataaatacattcctctccaaacatactactgctaatataggcatttttttatccataaacctgtaaatgtttgtgtgtataccaaaaccaaataagaatactactaataattgtaaacatttatgtttctccctgcaaattttcatgaaatttatttttctccctttttgatgttttaatttaaacagaccacagtaacggattaaattttagaaccagctagtcgtcgcttagaagcattcgaaacagagacctgtccaagattatctgccttttcctcggttgccaaccgttcttttagtggcatatagtgcctcaaccaaaccccagtgtaaacctgaaacggagcatagagattaacattcagcagtagaaaatatcagaaacatgtaagcaagaattgcttgtaatgattcgaatgagaattgtcatttaatgatccaagcagtgaaaggtgtaaaggagtacctcttgtggtctcattatctttgtatcaggatcatccagggactccttccagtgagccaggtacccagccattcgagggattgcaaacaagactgggaagaattcggttggaaatcccattgccctgattcatggaaactcagtaatttgttcacccagttgtatgcttcttctagaagagaagttcataaaattttactcgagtgattaatgtgttatttgtagttacctatatattaaaccagagtagaaatccacatttggatatagccttctcttgacaaaatactcatctgacagtgcagccttctccagagaaacagccacctgcaaatggcatgatatagatgcatgagaactactcactaagagtgattgactatctaaggtgaatataagagtggggtattgtggaactacctcgatgaggggatcacgaccaacaattgaaaatacttcctctgccagctttttaataacctttgctctgggatcatagtttttgtacacacgatgcccaaaacctgacatctttcgcttcctgaaaatgaagaattgtcagaatagggatgaaaagaattcgaacatattttcatttcataagatttaaattaaataataataataaagtttatcaatcaggaaaacaaacaactgaataagtgcaacatacctgttcttcacaccctcgatgaactccggtatgttctcaacagatccaatctcatttaacatcttaagcacagcctatcaaaaatcagacaaacaaacaaaaaattattgtacctttagaggcaaaatgaatctaatataccatggtaatgtgagaaagcacaagccttattctgttatgcacaatagactactaatttatcgaggctatgcgtacctcatttgcgccaccatgaagagggccatacagtgctccaacagcaccagaaagagcagtgtaaacatcaacaccactgtgaatacaaggcaaatgaagatatttataaataagaaaattataatcattatatttatttcattggtgcgaagttgcttaccttgatgcaagatgccgggcagccgctgtggagcaattcatttcatgctctgcatgcagtataaagagaatgtctagaactctagctagtcgtggattgggtttataagacctattgcctctgcaaaattttgtaaaagaaaatcaaggtaaatcagaccccagatttcatctttcccaaaatggataaatttcacaatgatgaactgatatatacatttatattatccctcataaattttctggaacagatttacttaagaccatatatatcaaacaagtatgccattttagaaagaaacacctgtgtccaataaaaaaaatcctacaaagacaaagaaaatcgtttctataaacatacaatgaatctagcatgtataagaaattctccgagtaagagagagtgctagaaggtagaactggaggtcttcctgccagcctcaaataagcagctgctgcaattgttggtgcctgaaaataaagatgcaacttgtattttattgatgattccaaaaatatatttgctgagcatagagaaactagctgcaaatgctagaaactgataaaaccacgttgacaaggctcagagctaaaagaaagaaaagaattaaaaagataacctttccaataatacgtgctatttgtttgtctctgacttgtttcgactgataaagatcttggccctacatccacatagcataaatgattatgatgacagaaaaaatcaattttctatacaaaaaagctgagagaattattcaatgtaccatgtattggaaatgttacaagacacttgtattgcacaagatctaatagaaaattatattatccaacttactttaagagcagggttggcatcagggtgaaaaaccgaaagagcactcattgcactgacaaccacacccataggatgtgcatcatgaggcattgcatgtatgatatcctacatataaataaataaagaacagagaataaaatcagaccataaagtatagtcttgctgaaacaaaattaatgaatgaaaccgtgcagccaacataaacttttggatatgaaactgtttccatgcttccatgccatgataataataagcatcaaatactgtagtagaaagatttttagtacaaagaagaagaagaaaaagaatcacaccaatactccttgtggtagggctgaatgctgagaaatagcaaattcccaatttgctaactgactttgagaaggcaaattcccatacactgaaaagagaaaacatattaattaacaattatgaccgacttatagccttatgcctaacatatgttgtatctaaatgtatcgatagctaataatgcaagaaaaatataatttttcagtaataccattaaagtgtgactaaaagaacagaagagatctaattaactcataaggaaatagcttattcatataccagatctatcctacagagtcacagtccatgc

SEQ ID NO: 228425 - DNA, 3586 bp, Cannabis indica
tactgtttttactgaaccattgcaattattacattctgacctatggggccatgctcctatcaattcttcaagtggctataggtattatattagcttcattgatgccttttctagacatacatggatatatatgcttagaacaaaaaatgaggcattacctacctttatcacctttaaaaatcaagttgaattaattggggtataaaatcaagcaaatccaatcggattggggtggggaatatcaagccttcaaaaacctattaaaagaacacggtatacttcatagagtttcttgcccacacacacatgaacaaaatggggtggctcaaaaaaaaaaaacataggcacatagttgaaagtggtttgactttacttgctcatgcttctttacctctcaaatattgggatgaagcttattatagaacagctgttttcttgattaatagaatgccaacccctcaactccaatacaagactcctttagaagtcttgttcaataccaaatccgattatcccatgctaagggtgtttggttgtctatgctatcccaacttgagactttataatcgtgttaaacttcagtatagatccataccttgtgtttttcttggatatagtttatcccataaaggttataaatgcctatccaaagatggtcggttgtacatctctcgagatgtcttatttgatgaaactatctttcccttctctcaagctgcctttatgcagcaatctacatcacccacacacactccaactcctaatacattactcaatctccacaacaatacacctaccactcatcctgaccaactagtaccatcacaaattccacaaccagctcccacatcttcctccttaccccaaaataacccatcacccatatcacaacctgctataccaaatgctccctcacctcccgaatcccctaccaactctacaccagtacaccaaccattaccatcatccactaccactactgaacaacccattataaatataccagctgctacaaccaccaatattcaccctatgcgtacacggtccaagtcaggcatctccaaaccaaaggttttaatggcatctctttatcctctttcattaaaatcagcattaaaagagagcaagtggtttgctgctatggggattgcattttatgctttggttaagaataatacatgggttcttgtcatcttgcctgctggaaaaacacctattggttgtaaatgggtgtatcgaatcaaagaaaatgaagatgggtctttgtctcggttcaaagcatcacttgtagcaaaagggtatcatcaacaagctgctttcgactttaatgaaactttcagtccggttataaaaccagtcactattcgggttgtcctcactatagctatctcaaaaggttggactatacgacaattggatgttgataatgcatttttaaatggtgatttacaagaggagatttacatgattcaacctccgggttttgaggatccccaatatcctgatagagtttgcaagttaaacaaagaaatctatggtttaaagcaagcccctcgggcatggtttgacaaactctccactgttttagttgggtttggctttgtctctgctaaaactgatcattctttatttatcaaattcacggctgccacagttctttatgtactagtgtatgtcgacggcatactaatcacaggcagtgatgataataccatgtccactcttgttttagctttaaacaaagctttttctttaaaagatcttggtactctatcatactttctgggaattaaagcaattcaccatgacactggcatacttttatcacagcagaaatatatacaagatctcctttgcaaagcccaattacaaggagttaagactcaaaattcacctatgaatggtggcctaaggctttctcactatggcagtgatccagttgaggatccaaccctatacaggtccattgtaggggctctacaatatgcttgcattaccagaccagacattgccttcagtgtaaataaggtctgccagttcatgcataatccacttcaatctcattgggtggctgtcaaacggatattgcggtacctagcagggacattagactatggtctacaactgaatcgggtttcatctcttcacattcaagcttattgtgatgcagattgggctgccgatctcgatgatcgaagatccacaactggctattgtgtgttcgttggtgaaaatttggtatcctggcaatcgaagaaataaaataccatttctcgatcctctactgaagccgaattcagaagcatggctgctgttgtctccgaaataacatggattcagtctctcatgtctgaactacatatgaacagcagcctcgccccatcagtttggtgtgacaatctcagctccataatgttagccgccaaccctgtgttacacgcccgtacgaagcacattgagatcgacctatattttgtgcgtgacaaagttcttaacaaggaaatttcagtctcacatgtaccaactgaacaccaaattgcagactgtctcactaaaccgatctccaacaatcgttttcctaagttgagagacaaactaagtgtcttgtgctcaagtacacttagtttgagggggcctgtcaaggataaagaagctgagctgtacaataacagttagaaaagttagaatattgttaggaaatctgttatttggttgtaactgttttctgtcttgcacctgctgctatataaacattgtaccgcccttttattcaatgaatgaattgcttctttcctttcttcttcttctttctttactttcttctttctctgttttatttattgtcttttaataatcttcacaaaatacaccctaaacatacacaactatagtggcaattaaaaattatgtgtttcacattttcaacatctaagccacaaatcggacaagcagtatcttgtcagatgttaaatttctgaaatctttctttagtctgtaatctatcaagcaattctaaccaaaaaataactttttgtttagaaatattaaaatctaccttttcacattctctctttcaggattaatagtcttatatccatgcctaaatggagtagcttcaactcacccaagcttttgattcttttaaaatttcacactgttttagaactgagaatgtaagtgcttgatgatatctgattgatgttttctctaaaaaaaaaaaaaaaaaaaaatagtgcagaaaagttcttagcaaaaacaaaatgttataattaggattatttttgtacaagctttaattaaaatagagatattaaactctttagtttatttactatatatttctcagtaatttcaaaaccattctagctgtatagaaaaatcccacttatagtttattttcctataaagatttttgaataaattgtggctaaaatacactcaatatatttttgtgaaaattacaccaaatatggaattctatacaaaagtttgataaatatggcttttttaactttaccactcttgtatggcatttgtccaaatttaaagttttttatggtatttcttttgccacttttttgtaaat

SEQ ID NO: 228426 - DNA, 2106 bp, Cannabis indica
ttttttaaaagaaataaaaatttggaccaatcaatgattgtcacttggtaatttactaaacttaatagttaggtacctataaaagttttataattataatttaattattattaccgtaaaaaaattaaatttagatatttattcataaataagagttaaatttaaatatttatatcgtaaattacttaaaaaataataataattatttcaccacctaatcattttttttttttgaacaatgaattagaattcattgaaaaaaaagcgtttagtacatcgacaaggaaagaaggaaaatcctccatccaaactagctgattattcactctaagtgcgtgcacagctaattaatgagcagccatattggccgaccgatagacatgaatcagggacgtctcaaaaaaattggatagtagactagaaatatcatctaaaagagaaccaaggtcattacaaagagaagatcttttaggaaaagcagaaatcaccacctaatcatttgtttatatataatataagtgattttgctaccaaaactattagattaaagtaacatttgtaacttaatcatatattctcttaaaatcatgaatatgtggaaatcattctcaaagattttatatatatgtggccgaattttcaattatgtattcaagtggctacgtaccaccacacaaattggttaacctatatccatctataaggacaagttttgtcaactttttaataatggggaattttccctcttgaataatatacgtaaatggtatccttcctttcttaaaagatggacaaaagaggaaacatatataaaggatttttcttttaattttttttttgggtggggggttgcttttcccaatttgattaagagggattatagtatatatagtgtagtactagtagtagtagtctaatatggtccacataccagggtttttgtagttactatctaatcttggtgctcttttagctcatatcatattgagagttgagacttgagagactatatatatacacgtaaagcttagtcatacatgaggcacgtgaagaggagagggttctaatctgatttggccaaaattcacatgggtctgttggcccctttggaccacccaccctccctctttccattgcaacaataatattcttaattcttcttcttcttattgtttgtagccatataattcttgctccattacccagaaggtaaaaaaaatctttgcttgtcaattcatattccctaaccccaacaaacaagtgcttcataaaatataataatatgccagagagtacacttgatctacataatgttatagattttttttatatctttggttttagagctcaataattttcaatgtgtataataataagctaaaagttttattgtctaagcattcttatataaagaaaattaaaacaaaaaaaaataaattctttcatttttgtaactctctacaatataaaaacatctgttttgacaagaaaagaaaacccttttaagaaacatacaaacatcagtaaaatttttgaattgtatcaactatattcatcagaccctacgagaagtaggtgcaaaaaattctttttgaaaataatactcagttatctgaatataatttacatccactggttaataaattttagaggaaatagattaagcatagattattccaatttaagataatatttaaggcctttgcggcaattttggtaatatgtttcgataaaagtaattttttcattcttattatttcctaattcttaatttcttattactgcaacgactttagaggagaatagcagtagcaattggtgtatttgcagtgacatacctgactttttttttggtcattccaggtggtcatcagattatttattagggttaaatttcctatttgtagccgatattaacataaactgtcatatatatatatagccgatatcaacttgagattactggcaatcaagattgatttgggcctttccacacctttaattatatatggtgaaaatactgtactattattcaaggttagcataaactatctgagtgatatccatcttaatattttgacgagtaaaatcaagaagaatattatc

SEQ ID NO: 228427 - DNA, 726 bp, Cannabis indica
aatttaattttcaatcaaactattaatcccgtagataaagctgaagcatgcaattattccaatctccatattacatgtaatcaaagcgaatcgctcaataataataataaactatattttataattaaataggtagtgctaaaatgatattgagtattattattattagctactagtaatacttaatagttaatattttctataaatgatattttaaaatttgttagcaatattttttaaaaattattttcttaaattgtatagtaatatgacaacgaaaaatatgttagacataaataatatcttttaacaattttgtctttttcaatattgtaacactcaacctaattttttttcgtgtgagtcgtggtatttcgtgatgtgatatttatattacttactaataagtaataggttaattaaaatttttatcacctgaactttgacatctaccaatcatgtcctttgaatttttttctctattaaaaaatctcttgaattattgaatttaaggacatttgtataatttcattaaattttactaattctaaattatatatgtactaaatcatgttatttagccattaagtgagggagggatgggaaaaagagagagatcatgggttcgaacccaagacctttaagctattaagcaattaatagattgtaaaataccattacgctacactaaaaaaatatcatattctttaaattttaatatctact

SEQ ID NO: 228428 - DNA, 1931 bp, Cannabis indica
acgagtcagttgtattagccttcataattagcatgtatttgagtataacaagtgtttacgatgactatctctatattcctcttgtttctctcaaagaagaaagctctctaggaattttaagagaagttttgtaagtaaaaattatttaccctttgtacataaaaaatagagatatttataggcatagcagtgggtgagggcataccctttacccaattagggtctcttactcagcacgcaagaaaggccgaaaacaccacaagaccatctaactgctggtttcacaggtagtttttccatgttgtgtttaatcgatatagaatatcacgtaaagatctggacacatgtcgctcaaatgtttctcctttaaaagtaattgcctagacaagtcgttggacaataagcactacagaggcatgtatgcacacaaccacagtctaacacagggaaacaagatttgacttagtatcagtcaaggtgtagttctgaatcatccaagggtttcctagaaaagccaatttttgatcatcccagaatgcacatgcctcctatttgcctccaaattgcggaagcatcaaatgagaacttcgagaatcattttatcctttgcaagggaaactgttttttggataccatagtatcttctgtggtcctatcttagaaaggggtacgtgatatcagtgtatgatctgacgtgacacccttctacaactttcatgtaaaactcatccgggaacaagaatataatagaaaaataaatagaaactcacatagcaaccaacagagcaacctaaattgcaatccaaatccacattgaaactaccacattaaaaataaggttgaaaatagtatatggggtgatttacttagttttatggtactaaatgaggtacgcagcaaaagattttcgtattatctaattatcattgtactatatctaaatggctctccagatgtgtgtacattaaattaaaacaataaaaataataagtctagagtatctcttgaagcttatcagggcatcctcgaagcttcttccaaatgatgaagaaattgcaatttaactcatatcagtttcttccaaatcgacacacacaaggaatggtgtgtggtattaggataaagtacataacttttttcttgttgagttctcaacacatgagcaagaataattgagagaaatcaattttcttttctcctatacaattttgaaaatcatagtataaaattgatgtcaaagtgttagtctaacttctcaattcaagcttctattaatagtagttaaatctatttaataaaattattatttaattgtttaattaaataaaaatctataacagaattcgattactgatatttatgagggaatttctcaactacatgagagaatatctcaacagccttgaaatatctataactatttttaaattagatatttatctaattgaatcaattaaataactaattaactcaaaaagacaaactccatagggtcacgacatcatcttaggcgcctacctttgtttaggacaaggttggtatcttttgtcctgccaacttttgcctggacaaattttgtcttaaccatttttgtgcttttcctatttaattaatttaaaaaattatttatttatttattaacacaaataaataattactatttttccaattcaaaatagatttttctgaacatctttatactactcttaattccctactcttgacattatttcaaggtggcgatttggggaccatggacctataattttaatatcttataaattagattgttttttgagtctcatcaaccaaataatcccttgtttattaattccatgattactccactataaatgtagaattaaactcttaataattatagaattatacactactacaaaatccctttttaagtccatcaaagttggact

SEQ ID NO: 228429 - DNA, 935 bp, Cannabis indica
tcttcctctgcttaaatctttcaagattagagatatagaacacaaatgttatgtctatctgtgttgcttaatgacattgtttactataatactaacatgaatatgttactttctgctgtttgttttcattattattattattcggctgatgtgttgtttttagagattgaagttagagcttttgagctcaaagcttgattcttccatggtgattttgtgtattttgtttagttttatattatgagttgttggataagtttagtttgggtataaaacaggagaaagattactgaaggaatttgaacttttgcccctggcccagtgattgatacagaagctcatggcaagcggatggtgcctaaggtggggaaagatctggcaccttttgctgtgaagcttttggaccaagtggcaagtagtgtgtgtgagctaacttcagagaagtgggcagtttgccgcagcacgacactttcactttggctcaagttgtcaagtattaggttatttttagtctaagtttcgggttttttttatagtttttttcttctttgttattatttttggaatataattacgcttgtttattttggttttaggtttcgatacttggaatctacaaattaatcaaaatttggaaaacaatgatctataaaatagagaaatttttttcaagaaaataaaaataaaacttcaagcttaaattagactatattctgctcagaatttggaaaaagtcaaaacataaaagtattagatctctttttcatctttcaaacacatcttgaatcaactcattttgaaagtgggtagaatgattttattttacttttctaaagtggtcatttgattttattttacttttctacagtggtcattgttgagaatcatggggttccatctcaaaaccaattggcaatgagtggagtagtccatgt

SEQ ID NO: 228430 - DNA, 952 bp, Cannabis indica
aaaaaaaaataaaaaccttaattaaatatacatatatttttattttgagatttttttttcaggggcatctgcccctctcgctttatgtgggtaaatttactaatattcttgattaaatttttgacatcttcaaatcaattcatagttgattttgtcatattttaacaatttttaaattaactcttaaataataatcaagttcaaattatctagcaatcatactcaaacataaaattgcaaccttacacatctttaccattttgatagggttgttcaactaactatttttcaaaataaaatagtttatatcattagtgagaagcatcaaatttttgacaagatattgagtatgtcacgaaaattatcttcaacactatttattttccaaacacccattttatttctcatagggggggctttagaagttggattgattttttttttttacttctttttgaagatgaaaagagcaaccatccactcttcaccattgttatatccaaatagttcagcaattgcaatgaaaaatgttctccaataaacagtccacttaacagcattctcctttccataagttgattccattattggctttatcgaccttacattcttatccattcttttgagccactcttcactgcaccaaaattttttgcgtgttactagatacacaatgagtatttgctattatattaattattaaattaaaatatgtagaaataatataagatgttcaacagtaatgatgcctagttgccttcaacatttctcatatagttaagaaaagagaatgaagatgagcttgtgtgttaactaacacaactcttgatattcattatatatagacagaaaagtaagattacaatataactgaaaaaatagttagagtagctgacaccaactataagtgtgacaaactcacctacagctaacaaacttatattcttcttca

SEQ ID NO: 228431 - DNA, 1653 bp, Cannabis indica
ttccaaacacacccttaatgtttggattttgtagtataaatggtgggtaatgtgtttttggctttgatttagtgtaatttggtggaaaatgaataaatttgaaactttaggttggttgtgttcttgaatattgaagaacaccatgacatgaaaaaaaaaattcatttttcttctatttttccaattttgattctcataaaattaaaaaaagtgtgtttgtgaagatggtatatataccttgggaaaaatatttaactatgctttgtgtgtggagtgtggatttctggccaccatgtacccccacactttgagatcaccccaagtatgcatgtagggtgtcggggtacgcctaccttgagttggttggaacatctcgcttccttaagatggcctatacatccaccctaagcttgaatgtcacaccacccttagatgggttctcataagtggtttcgggataccccgagatttgggggttaaggcacacctcgagattatttttatttttttaagtttgaggttgggtcgggggcggtaccccgagaccaccacttgggggtcggggtacaccacctgaggctcacaaaatcccctaaacccaaattaatagcctctttttcaagttggcacaacgagtataccttgaagagggtcttagtggttacttgagaccaagctttggtctcaccccgacatgaggccttgacttgggggtcgggatacacctcgagatgagaccccctttattattttatttattttaggacacaccccgaggctaccataccttgagatggggcttgtctcgttcgttcgttgtcaccccgagttggggtggaggtacaccccgagatggaagttttgcccccaaatttgggggtctcgaggtacaccccgagttcgaagcatgcctcctctctcttgtttttgaccgaggttgggggttacaccacccccgtgaccaccatgtgggggtcggggtgtatctccctgagaccaccccatgggggggtcggggtttactaccccgagaccccttcatgggtgattggagtgtgattttctgtgacaatcgtagtgcagcttcatgacttggagatgattgttttttgcttacctctcgtggtcttatgtatgtgcttccatgtgcttgtttttgcttttcacacttagtaaaaatttttagtgtgtaattgtcattgttgcttcctccatttagctacatgaatggttgttccttcgttgtaaaatttttcggttgtgcactatgaatgttatgcatgtttcatttcctcgcctctttttttttatatctgcaaactagtaggtgagtccatcatggatagcctactagcattactgggtgtactcatctcccctctctttcttttttacagatgcattatggcgattattagagagttgaacaccgagtatacaacgatcttcttcaacttttgtttgaagattgtcacgtgtcgcctctgcacaactcatctggggatgagtggtctagtaacgggtttgagacgcctatctacctttattgagaggtgatagatggtgaagcgtacaataggcatatctgggagctaggaacgatcttacttgccctgcgagtggacgtatgcactcctttctagtgagatcacc

SEQ ID NO: 228432 - DNA, 1071 bp, Cannabis indica
tgatagagaagtttttctatttcttattgatagcttcaaggaagttaagactgtactttcaggcccacgccatcaaactatcaaagtactcacgaaccaccccctctggtgggtcttgcaaaagccagaatcctcatagagattgctgaagtgggaaatggagctcaatcaatttgatatacaatatcagccaagaatatccattaagggacaagccttaaaagattttattgtggaatgcaccaggataaacaatgatccggaagaaccaactttagactaagaagtctggaagatttatgttgacggagccttgaatgagaaaggtagggataatgcccatttcctcacaagggctctagctacaaaatgccctctgatttgagtttgctgcctctaacaacaaggcagagaatgaagcagtgattatcaacttacacttagccaaggaagtcggagccaaaaaatatcgaagtttacaacaacttccagctggtggtaaacaaaatatatggagaatatcaaacaaaaggagaaaaaatagttgcttatgtaatgccctaacctctaaggatgtcacgtgtgtgcttttataaattaaaagggttacatcgatataaatattttttcggggatcccctgttacaaaagttttacaaaaggttttgttcaaattttatatcaaaataatatatagtcaaagtgccaaaaacatattctaacaactcgcactgcaagttggataagttgatatgtacatttactagagaagactgctgactcatggctaacctaatttacccttgcctttacctgcaccataaagcacccatgagtcataaagacttagcaagaaaagtaaaagataatcataaataagcagtacaaataatcacatatataacaatccaattctacacaggtatttgtttaataatacaagttatatttgttacttcataaaataacccttttcattgttgtctaatgaggcaaccctgataagcttaaccaggcattcagtgtcactatcattacctaataaggtaaccaataagtaagaaacctaac

SEQ ID NO: 228433 - DNA, 2100 bp, Cannabis indica
aagtaaagcaaactaatagcttagatcataacttgataaaggtaagttacataattctttcgagaagcaaaagactaatgaactaaaccaacacttagctaagagccacactagaatatacttgaagtttaatatacacaaagaaaagaacaattactatgacaagagaataagaattagaagaaaaccaatatgttagaaagcacatgcaaatgacagactaccaattaaatcaaaatctttctgaaaaggtgctggacggacacctagaagcatgtaaacaagtaacctaataaatccattccaaaggccaaaaaaaatcaagtttttatcttagaagaagaagaagacagaagcttagagctggcctagaacaaatatcaaacatagacacaaagtaattggcggaagaccaaaaaggacggaacggaaagatgaaaaaaaaaaaaaacccaaaacttaagaccaaactactacaaaaattagaattttagtagacaacacaatcacaagtctaagagattctgttcatcaagcgtttattattacatcgagagaagacaaaaagaattaaacaaacctgtgcaccacagatttttcaaatttgcggaggaggagcaacatgcaacctgaaagagtaccgatctgtgattgtgaagaatgtaagtggctggctggaaagagaaggcgaaagcattcgagtagtagagaaaagcgctgtagattcagattgactgaaaacgaacgattatgatacgttttctattttcatggtaatttgagttcttttgtacttgtttattggtagttgaaaaaagagtatttttttttttgcttcatatgtgtcctcctcctcccatctcagtaattgattcaccttttaaacaaagctggtattgttgatgtttcaatggagtcttggtaaagtgaaggcgtctgtgttgataaattttcccatatacttaccaatgaaatatacaatcaatatgttcttgtaattaaggtcatgctaaagatagtcaaagatagatgtgaagagttcaaatgtgttaaaataatgggcttttgaaaacaagtgaaagagcatagcgattagcgatccagctggccgattcaatggtggctaaaacaagcaaaaatgtcccctaccaattgaatacttgggtctatttgatgatgaaaatcacacgtgattaacaacgcggcactctataattggtgggggcactttctcgaaccatgatagctcatcgtctaatcgaaagacatgctttgccaagccatgagcggcagaaattcatatcgcaagccacatagaacaaaactgtccatagaaatttagacaataaaattctaacatcctcaaacaccatcccaagctcattaaaacactcatccttggttgatagctgaaaaaacaaacaacaccaagcaacaacagttattagaagagacaatctttgaattaatcttatcggcaaagtctttgtagtcgtaagctctccacaaaactgacctacaaaacaaaaataaataaaattctattactacataatttaatgaaaaattaatagctaaaatgaaagaaaaatgtaaaataatccatattataatataaaacaatctatatatataaagaatacttatttgttaaaactgaaaaatcgttgatgtataagccaataacacaaaatgaattacttctcttattcattgagtgtaccacaacactatcctaaataattagggtcaagccataaaaaatagcacgaaagctgaaaaagacacaaaattaaaaatacccataaaaaccattgttgaccgaggttttcggcaactatcaaaatataattataataaagagctgtaagaaagtgagatggaggttttttacgtggttggggcgttaatgagccttagtccacgagtctctgttattaatggatatatttaatatagattccacacttgagagaatgtctttctcataaatacagagaatgttcttggtgagtatttactcttcttgctcttttgcaacccaagattctcgaccccattaaatgagctttgagggggtatttatagtgttttggtggg

SEQ ID NO: 228434 - DNA, 1285 bp, Cannabis indica
tggaatatacttattccatgtattcaagggcaaagtttggttcctgcaatcatgtttgctgaagctggtggtactataactcagcaaaacaatgaattcttttctttgaattagtatttttattattattaatagtttaaaggtaaagggtattacaatgctgctcttattggggtataaaaatgtgacatttcatcaccgccgtatatggtgtcaaatcctacttcatgtgtgttgatgcagcactacaacattactggttttcagtttcactgacacaattgaaaggtgagatttaccaaatcttactttaccaagtgatgagtattttgagctgtaatacatgggagtagtgaaaattggaatggctctatatccttatttagatgagtattccttaaatatcactgcaacatgcagactttcttttgtataatattatgtactctctaatcattatgtatgtaaatattattgtttgtttatgttatctttggtctccttagtggtttttttcttcatataaattttctcaaatttaactttgtcgactattttatctttgatggatgtgggcaagtcgaaaatgttaagttttatgagtttcaattaatttgtggctattttaactatataactagagcaaaagctaaaataattgggaaatgttaaatataatactagtttatttgggacaattaagtttgctttgttgaaacatatgattgatagtgttactgttaatcaaggaagtgtaaataaggatgatatcgtgtggaatttgggacgttaaactcaaatttcatattaactaatacaacatatactataatatttcatttcaataaacaagtaaataatttgcttcttaaatcttaacgtgctttttgaattattagtaatgttaaatatttaattttttttttttgctttgttaaatattagtactaatttattttttattagtaatgttttgtttaaacgttagtgaaatattagatttttgttaagaaattttaccatctaaaatatgatcattattatattcgtgaatttttataattgtcaaaatcgtaataataattataatttgtacgaaaaaattaataattatttaacggttatagcttaaagcatttctaatgataaacttttaaaaaatgcttggtgaggtggacatattatgtaacaaaatatttagatactataccattggagagaaaatgatattattctagaaatttgcatagatactatgttgtggcattgatgctattcatttttt

SEQ ID NO: 228435 - DNA, 949 bp, Cannabis indica
aaaaatattattaaatttaaaacaaagaaatagagttagtttttagagagatatcttaaatatataggtggaattttagttgaggtggcaaaatttcattggctgggacagggagtcggacaagaactgggacaggtaatttggctcctaaaaaaagtacgaagaatactaaatttttaatttcaatgaacacgtgacaaatcagacttattaatgactatcagccaaagatcttctattaaaaatttagtaataacaacttattatccaatctagaataaaatgaaataatcaaacgaccaactataccgataacaatcataacaaataatctcactataaactatagtgccaataaaattttaagaatctcatatatctaaacatggacaataatagtcatgttactaacacaaatatattttaagctaattgagattccctcaatgttcaaaaaaagaaacaaggctaaagtcttgaatgaataacgccttactaccataacaatagcaaggtggtatagcaacactattattgaaaataaaaatacataaatatatatatagcaaataaaaataacacactaagaggattaacaccattgaacatccaatccagagccaatgagcaacttaaatttctgagatataaatttgaagaaagaagacgagaaagaaaagaacactcagtcaggaggatagcaacaaccccaatgaaatagaaaatagtgtgggaatcaacaagaccccacttgagtcgcgccgtaagatcgagaaaaggccggcgagccctggtcaagtaaaaaaatcaagcggcggctgagaatttttagaaagaaaccctagtatgaccagttatataataggatgccacgtgttactctctctaatgccacatcactcggacagtttttgcctttttggaataacattcgcccccccccccccct

SEQ ID NO: 228436 - DNA, 1249 bp, Cannabis indica
tattttatttttatataattaacggattttaattgtaacaactatattaaatggtcattttcaattataaatatatatagatgaatttaattctaagaaatagttaatatagaaaataattaaagagaggcattgtatttaagaatcatacaatttatgtataaagaatattttgactggacaacaaatcatattaccaaatatatgattaattttgttacaagtcaactttataataataaacaattgcttcagttacaaatattaaaaaacttcttctatgcatgttattacaaatcatcaattaattaatggtcaattttaaaattgttagcatgtataagataatcacaattcacaacccattagtaactaaaatatatattacattacataattcaatataaatatatataattatttgtcaagttagcaaaagtacacagaaagtcatatatcagtttagttagcaacattatctaaatattgtttataattttgatcaatattattattaaaaagtgaaccacaccttcatataatttctatgcctatataagaatgagccatgttcatgtttattcataccaagtactatcaaacattacaaagtaatctttgctcataaatacaaagatagttcttatataaattaatagacaaatattatgatgatgaaaatcaacactcttatcttggtgtttgttgttctaattggcctcttgggagcctctaaaggaagtaaactcacaccgaatttttacaaacatagttgtgaagaagccgaaactattgtaaagaaggccactgaaaaacatgtggctagtaatccggctgtgcctgcacgcttgctcagaatgcattttcacgattgttttgttagagtaagccattttcataacacatacttttcttttaagtgcattgatatgaaaaaaaaaatgttaaagtgtatgcatgtgttattcttttagggatgtgatggatcggtacttttgaactcaacaaagaaagatgccgaaaaggatgcagttccaaatcaaacgttgttggggttcgatgtaattgatgatatcaaagcacaagttgagaaaaaatgtccaggagtcgtttcatgcgctgatattctcgctttggcagcaagggactctgtatcctactcggtatgctcaaatttacatataacaaaatttaatgtcatctatgttcagtttaatagtaatacgtgtatatattcagtttaagaaat

SEQ ID NO: 228437 - DNA, 3837 bp, Cannabis indica
ctttttatctttttgcctatttgaagctcagtctctgttttgaaagtttgagaaaggctctaagagcttcagacttgtttttaagcacataaatccaagtaaacctagtgtaggcatcaacaaagctcatatagtacttgtatccattatgagagagagagtgtgaaggtccccataaatcagagacaatgagttggagtggttcagtgtatacagtaacagatgtctttggaaagggaattttgtgaattttaccaaaacagcaagtttcacacacaaaattatctcttttattgatatcagaaatgttacaagtattcataacagtcctaacaactctctcattgggatggcctaacctattgtgccacaactcaaagttagacaacaaaggcttattgcagtgagtacaagtgctatgatctggggtgatactggtaggatctgaggtgatatttctagtagctgaggcaacaagacaggcttgatcctggtcagggttgtgcagtgttggacaaggttgtgttggctttgacaaaacttggaattggcctggatcaaaagtatataggccattgtggagggtcccagtcaggattgtggctttggtcctcaggtccttaacataacaaacaaaaggatggaattcaaagaaagcatcgttatcaagagcaaacttagagacagttaataaattcttggtaatctcaggtatatccagcaagttagtgagaattagaggtttatctgagtgttgagacttaaagtaagcactaccagtatgatgtatagccaaacctgatccgttaccaacatacagtttctcttgcccattataatccatgctttgcatcaggttgttcacatcagatgtgcagtgattggttgcacccgagtctgggtaccagttactgtcagttccctgggaggcttgagcagcatgagcttgcattagttttgaactttctggtgttggaagaataccagtgaaactcttgtcaaacctataaaagcactcaagagccaagtgtccagtcttgtggcaaatttgacattgaggcttgttgctatttgttggaaatcttcctccaaaaagagtaggaaagctggctctaccaacattagcattgttcgatccacctcgagagtgaaaattaggattagttcctctggtatagtagtagctaggaaaattatttgcaggatattgagaggaattagagggaaactgacctctagagacatttgagcctctgaaattgcgattatagtgtgtaagataagcttcataggacaattgattttccagatctgttcccatgttggcagcagcaagatttgcacttagatctacttcttgatcagttttctcaattcttgactcagaggcaagaagcaaggcttcaatctctgcaactgaatatccctcaactctagtattcgaggagattatgaaagtatcatactcacttggcaatcccttgaagattgcagctatgtgatctcgagctgaaagaacctccccaactgaagcaagaagatcaacatgatgtttaacttcgaggagataatcattgagagattgagagcctttctttaagttttgaagcttagttctaaactctaggattttcgatgaaacctacaaggtgaagtgtttctccagagaactccatatttgtcttgcagtattgcaccctaccattcgagtcaataaactctcagtcatggaggagagaagccaagaaacaagcaattgatcttgaacctcccattccacaaactcaggattctggacatgagcagcttgatcaccatcatttaggtactgaggcagtggggctgaatcttgtatgaatttcaaaagtctgtttcctcgaatggcagccaacacttgctgcttccacaatagaaaattgtgatcgttcaatctgattgatagagtaagattgaaatgaacaggttagtgttcatcatttttgctctgtttcgatctgtagcagagaaacctggaggagcagcaggatgagtggaacttgagttggttgatccgatgttagccatgttcgccaccaatggtggccaaggctctgataccatgttgatgttgtttccccttctagccattgatacagagaagtaaaaaaagagaacaaagagaagaaagagatgaagatgaaagagagaggaaatataataagagaaagagttgttgtatagattgaatctgttgaaccaagtttatatacacaaggtaagtagtaaatcataacagaatcaataacaaactctaacaaccaagaagcagttacaagtaacggtattaactgccttgacactgtgaaatcatgtagaaattcctcgattgttagttaataatattttgatcattttgcaggcatcggacttaattttctaagcatttattatattcaatgaatgtttgttgtttagttgggtaaacaattaaacatggtatgcttttgaaaattgtacatgatgttttatccttagcattttaagcatgtaaaataggagctagctgagagagtatgttgaaaatttcttcatgtttaattaatacaccacttttgagtagccacaaccttttaggatcatcacctagctagtccttattactttgtcccatgcgattgtatatatgatcatatgattttgataggagctggggaaatcaaactcacaacatatataacatgttcaaattgaattaataatgcattttgaaacatacattgatagtagtgttaagacaaaacttgaagttattcatatattcatatataaaattgttttgtttataattaggatatatatatatatatagaagatagtaaaacgttctaactgcaaacgttgtccaaatgctgcaggtggacactaatcttggaatgaaggagtagtacctgcctggcaaaatgcatccaaattattcattattatttggatatgtaattttattaaaaaacggtagtaacagcactcttttgataatgcagtgcattgagccctgttatacgtggctaaagcctaaacccccaatttttctttttgaatacgtggtattctaaaaagaacaccacccatccaactgtacaccataaacttgtcttaatttgtctttacatcttttcacaagagcctaccttttcttttttaacatatatttacttgtatgtgagctgaaaactttatttaattaaaatctccttttataatattttaattcatttttatatttaaagttattagaatagtttttttgaaagcaaactataattatagtattatttttgtaaatttttaaaaattttgaataatttacagtactgaaaatagaatttcagatattaattttagtttagcacgagtgttcaagaaacttcaaacgtcttttcgatactgtaaattattcaaaaaatttcaaaaatttataagaataatgtcgtaagtacaacaaacaccactatgaaaaaaatatttcgacatgtatttttgggtactcctcataacttgcggtggtgataatcattggcggacccaatgaaagaccagtgtgggcttaagcccatgctgaaaaaaaatatttcttttacatcttaattaaaaaaaatcttttaattattttagttgcccacaacaaatgcgcaacagaataggagatcaatagttgaatgatactttgacagtatattttaaaaagaatatattcaatgttattgacaacgagcttattattcgtcgtttttaaaatataaaaactcgtcgatgacaactctaaagatatgagctcaaaaattgatatatttgctaaaa

SEQ ID NO: 228438 - DNA, 2015 bp, Cannabis indica
gaggtaagcatatatgtaataagggatgtgaaaattgttttgtcagcaatatgaatatgctctgtaagctttcaatttggatagaccaacattagcataaatatatagagagaaatattaaaaagtaccaatagtgtataaacatctttctatgttttaatgttgctattggtctaataactttgaagaggtatgatgaaagtactcttctcaataacaatgctcatatatacataaacatttttgcaatatatataatatattattgatgatgtgagccaaaactaaccaataaaaaatatcaatagttaaatctgtcaaaaaataatattaataatagaaggaaagtattacacgcctattctatattattgtgttttttttaaaagaaaaaataacgcccatttagtgcgttgataatgacccgacgctttgtaataaaaaatagtaaacggcttattttcccttagaatttttaaggtccccaaactttatgtgtagctaaaatcccacttaagctataaaatcattgcaaagtatctctttaagaaaacagtttgctaattaatataagtagcgcaataggtgttaatgtggcgtaatgacagttcctgtggctgtggcataattaaggtgcgtataagatttcttctacaaagacatagtgtgttaccttgtacactttccttcctggaagtacttgagaaaatgggtcgtccctgagtctatttccaccaaatatacttgttcttctgttaatggtattgtacgggtatcgactctaggatatcaacatctcttgttaaggccaccttggcaagcatgtccacattggtgttcctctccttggggattttgttccaccgtatagcattgtaactgctccaagtagccatttatttgtgccaagtaagcggccgccatatctttagtctctttgcttagtactcccctttcacttgaaagaccactaggtgagagtcattgaaaatgtgtagtctgagtgatttttagttcttttactaaccgtaggccagcaagcaatgcctcatactttttcttattgttggaggcttttaaatttttttgtgtagtacttagagtttagattctcaaaagtgtctgtaaagtcatatatgattataagtaatagttgaacaattttatatatatttaaatattaaattattaatatattatatttaataatttatatataaatatctaaaaatttattcatgcacgaggatatgacgtaatataattaagattattggtcatgaaaaaaatattcaacaacatattaaaagttataaaatctttaatcaatagttcctagtatcgttcattgatgccaattattcggtgcaaggaatctcgattcagatcactgaagtaggacaccttgatgaaggcgttttatataatcgaggttatatatgacaaggaccgatatgtaattaagttatatttatcaaactagttgtttaatataaagacctaattcatatcacaacgatgattaattagtagatcggcctaaatcttaagtaatcataaactcgtgctcatgttactattttttttatccactcgttaaagtttctttgaaaagacgattcttataaattctgttttgggaagctaatattgtgtattgatttacaatatataatcttgactttcataacagatcgaatgttgattgcctttaaatgttaattctaaaattgaaaaattgtgcatgagtttagattgaatctaaattttactatcactaatgaattaatagtactaaaggataaggggataattagaaggattaaacggtaatttgaccaaaactaattatgaatcgatacatgaagggttaatcattggtattgattatatcaacgggcactgtagttaaactcaaaaaatataagtttataattactaagagttcaattccatatttttatgaaattaataaataagattctttggttgataaaattcaataaataatttaa

SEQ ID NO: 228439 - DNA, 1551 bp, Cannabis indica
aaaattataaaaataaaattaaataagtattaaaattgatataaaataatgtgagaatttttttaaaaaaatatttagaataatttttaaaaattatttaagtttagattttttttaataataaagtataaactcaaaaattatttaagtttatattttataagatgcaaaatagaactcactatattaattatactctcctacattatccatataaactcaaatttcctttaaaaattcaaatatactcgttctagcatgttctgcaaatacatattacaataatattataatttaaataccctaaaaaaatgaatatatgtattatatagtagacatgacttgttaggtagttaagagaatataatatgatactgaagccattatccatattcgattttaatttattttttcttcccattatctaatatatttctctcttttaatttgtttgtctccatgatcttaattcgatctgtggaataattgagaaaatgaagtattctctgtcttatagagagattttttaaggatatataagaacagttattaattagtatatgtaatatcgaatccaactatatatatccattaacatacatatatataatatttatattctcttacgttatatggagataccaattatagtgtccatcaagatagaaagaatttgagtgtattgattgtttaatatttaatgaataataatggtaacgcatctaattagattaatacactatctacatataatatatataatgatgtgtgattaagcaatcttaataacataattaattaaaagtgatgtgcactctacatataattttttataataaaaagagcattgttaattgaacattagtagtgtttaatactttctaaatgtatcgtcttgcgatgagctagtaatatttcttaaaaattattgcattaggttatataagacccgatacttacactataaaaaattgttacttttagtgataaatgtttagtcacaacataattttttgtgactaaatgtgactttgaatcacaacaaaatattacttgtgatgactaaaacatagtttttagataagatattgtcattaatttagttttagtcacaataagtattgtaactaaaaatacatttaatcataataaattgtaatttttgtgactaataatttaagctactgacttattagtcacaatataaaataataatttataattagttatctttttcatttttagtcataaattttattgttacaattaatttttttttatattattactaatggattttaacatatttttgtgtttatagataatacccatgtgatctccaaggtctccttggtaataatcattgtatatatggattctaagctgctttcaacgtgtacattttaagagattccatctgattattattaattgatatttttgatataaattaataactattaatataaatacaaatatatattaaggtgcaacttaaataatgtgtcttagtagaaaaggaaaaagtttaattaatgccaaaaatcatca

SEQ ID NO: 228440 - DNA, 704 bp, Cannabis indica
ggcataaaacctaacagaaagcatataaactgttggatctcaattctaatagagttttttgttccaaggatgttcaattctatgaaaacatttttccatttcatactaataattttttacctgatgcatatattgatttctttcatgataatcatcttatttttcctacctctcatgttcagcatgttgatcatcataattctcatacattcaccattgctcatcatgcacttgccactcaacatattgatcatcatacatctgatattcaacatgctgatcccaatgcatctggtatccaacacaatgataatcatacacctgatatttataattctaacttgtatgctcctgtgccttcttctcataccagacctatttgaacttccaaaaagccctcatactaaaaagattaccattattttcttgctgctactaatgtctctggtttgtctcaggattcctcttttgttacctcatactctatttcacaggttcttgactatagcaggttggcacctcattttcgagcaactgttttagctatttctagttatcatgaacctgaattttttcatcaagcacaagacataccagtgtgggacaatgctatggacaatgaaattgatgcccttgagaaaaatcacacatgaatagtagtcacagtggatgcaagtgggttaagataaaatacaatgctgatg

SEQ ID NO: 228441 - DNA, 829 bp, Cannabis indica
aaaataatttccaacagcagctaacaccagtgatctccagattgtatagttggtgcgatccaatctcagattgagaggaagcatattattgttggggaagaaagcttgaatgtttggttatcgaactcttttaggttcaggtgggatgggtgtgcctgacatgggtctgataccatgaaagactctgttaagaacaaagaatgaaaagagcaaaaatagaacaagggaatgataggaaaaatggatgctcaatactcaaatgattggcattagacttatcatttatatagaaaaagtttcaatacagaggaagatgtaaaagtcataacagaatacaatcaatagcccacttgacagttggagcaatataacaaccacaactcaactgtaactaaaaaataacaaacttaactgcccctaatactttaatactttgatatctataccccttcaactttcattcatgttagaattttttttactaaaatttgacaaaagttcttaaattcaacaatctcaatagttcaagggacatttttaacgaccttaagagttcaagaggcatgatttgatacatgtcaaagttctagaggaaaatcataattagccttaaatttaaacaacacacaatcattagaatctacaatcaaaatatttagaaatatctcctcaattctcataagttatttttttttttcaatttctctttaattatcttgcaattttaaggtataattggcagcacattactcattatccttttattctttaggcctatttgacacaacttttaaaaaacttaaagctatttttacaaaaaaaaaaaaaa

SEQ ID NO: 228442 - DNA, 1779 bp, Cannabis indica
tatataatgactaggtagaacttgttcattggcttggagcggtcgattattgttgtagcgaaccctattagaggggtgactcctaggcctctcttggttccttgggtgctctttaggcccatagaccaccctctcccattggttcctcggggtagggacttcttgagaataggtttgaggtatctgttggttgtgggcgtcagtacccaacccttgagtgttttggttaaagtagcttcaaattaagtcggcagcctctgatgtgcaacaatcttggtcgtcttggtgcctcctcatttcacgagtatgatcatccagccaagattggaattctctttgttggttagcaacactttcggtcaaggctgctgagcttgagtttgctcttggtgaataatctggaactggccttgcattcggcctatcgcatctcgtaattgatccatctcggggttgattccctcgatatccacatggggttcactccgcggcctaaagataccagggcctcagccagtttgagcatggcctgtgccttcagtaggtggaacaaaatttctagtactaccccttctggtagcgctgtcagtagcactgcctcgcgcggcagtcgcgttggtggtatgcccagcagttgtctgcccaatggcagcagtttggccagttactccatggccagcagtcttagcggtggtggctatcccgctgttccccggacgcgggggtctttctccattgttcaattgagattgcttgctgatggaacttgctcgacactatccatctcttcgtcaggtcgctcttgatatctttgggttaacaccattttttctagtgaaaaacttcaagattttgggtaaagctctcaatgaaagcaccaaaatgttgactcgatttttagccaaccaacgtggagtcgtaataaatgatatttaaaccaaaatcacagtaatctaatctcatgctatagattttcctattctgacggcaactaacatgtacgctaaacatgtataaacaaatgcataacattatactaaccttaccttgtttttgaatttaggtgtgccggccaacctgagtggaacaactgctcggcaaattacaggcccctaaatcacactgatcataacatggataagtcacacgctaaattacaatcggggacttttaggttttaaaccaaaaacctacctactataagttaacgtggcagtaccttaaactaatagggagttaaccagccaaggctctgaaactaacacgaatcaaaaacatgaaatttttgaagaacccgcagcaaaatccggttaaccaatttacaccagaaaatccccaaaattccaaaacctaaccaaatcgattcgaatccttaccaaacctttcagacctgcatattataccccaatagacatattccaagcaataaagcaactatacaagctcaaaatcaaaaatcaccatttaagagccaagcttgagttctaaaactcaaagcttgctcaaacaacactacaacccttaaatcatcttcaatttaacataattaacctcaaattaactttagaacacaaaatcatacagccctaaaagctacagaaccctaccatacaaaattatgcaaaacttaaacttaaagcttaagaaattactaaaagaaaaaggctagagtatcttacttagagttgaatcataaaaagcttgctatactctactgaatggcggctgaaaaatccccaaatattgttgatcctccaagggtgtgtgtgtgtgtgtgtg

SEQ ID NO: 228443 - DNA, 2291 bp, Cannabis indica
aatatttcgacatataatttcaatatcaaaatgagcaccctctcggggaccatgtcatggaaaggatgacctgtggagaaacccaaagagggttgctgtcatggacatcctctctaaaaatggtttactgttaggatcctttatcgagtatgggattgactacttttataaccacttgggcattattttctcgcaggcttagtcttttgagaatgatttgccgaagtttactttgttctcgtttttttgtttattttcttagtccccaaataataattttgtagggaaggataatcaatgtagcatcagtcttcggtctagtcggcaatgccgggcaagccaattatagtgctgcaaaagcaggagtaattggcttcacaaaagctattgctaaggagtattccagcagaaacatcactgtgagttattccaaagttttttttttcaaataattagatatttcaatatgactaatattgaattgttgttgtcaggttaatgctattgctccaggctttattgcatctgacatgactgccaagctaggagatgatattgagaagaaaaacttggagggcatccccttaggtgagtgaggctgagacaatcctgttctttcttcatatcgacttggctctgactcctctgaattgttgagaaaaatatgtgaagattagtgtgatttctattgttcttcaggaagatatggtcaaccagaagaagttgctgggctagtggaatttttggcacttggtcctgctgcaagttacataactggacaggtttcactttcacctactatgaattgggttttaagagttaattgattttaacttctcatactttctttttttttttctttgaacaattttaacttctcatacttgaatgaactttctgtaacatgttttgtaggttctcaccattgatggagggatggtaatgtaggccaccctccctgcataattgaggagcctctaaactaccaccaataacaaagcaatgagaatggtgtaatatccatttttttaaaaaaaaaaaataagaatttaattctatttttacttccatttattttttttttcattttagtattttgaatattgtgaattaaggattttaatgacaaataaattttattttatagtgacgaatattttttttatggagatgaattactctagcatgtgtataatgcttaggaagtaagtagtaattgtgacaaaggaattatttattttgtgagtgttgttgttatggtgagcataataataataatacttgtaaaattactttatagtatagtttgacatatttttatggtatagttaatatatatctattatttaaaagattataaataataatttgtgattgattatataatatatagaagtattattttaaattatgatttaaaatattatgtgatttaaagtttgaattaggtgataactgataatgaaaataaatatctatttattagttattattatgattattattatttatagaaaaataggtgtgtacttgagaaaccgatatttaggggagtgactcgttcaacctaatcggttattgttatattatttcttttttgtttaaaaccacgattacacaccagtttagggattagaaaaacatccagaggcgattaagggtgggcctcttctcgtttagtttttttttttcttaactatacaagagagatttgagtttttggagagctgggctgtttggagagttttcattgggtttcctaggttgtaattaggggtttaaacgcattgaaacaacccttgaacacccagaacgaaattcaccattttcatgaacattcatccacgttcttgaacaatcttggattcaaacgtgttagagtcatttctgggttaaaataagattgtgtttaagcttaaaggattcctagaagacgttttgacgtgaagaatcgaagctttaaggcctcatacaaaaattgtcatttttggctccattattgacggtacaccggagttggagaagatgaccccgatctgacatattgggactgttatgttgggtagttcttaatcgttttgaggtcctaagcactgtggaaagcttccccaatcgaaaggacgcgtcaagagcaatcgggggataaagttacactttgccggcgacaaaaccgacgtgaacgccgtcgaccacaatctgggtagttttgaggtgttttccccatctgtttttgctgatttcgattctacatatattattttagggtgtttgtgttgggttttgtaccctaa

SEQ ID NO: 228444 - DNA, 2138 bp, Cannabis indica
acatagtatactgcagtatgaaacttataaaaaaatacagtaaaaaagtaaaaaataccgcctggcagtatttttgtaaaaaaatgacaaaagttagtatactatgtaaatttccctaatattatttggtaggagaaggtattaaaaacgataggtggagtttatttgtccactgaattttgacatataccacctttgaatttaacaatcttaatagtttagcggcatttttaacgaccttaaaagttcaggaggcatgatttagtacatgtgaaagttcagagggcaaaaatcctaattagtctctttttaatatatgtcattattttattttatgtccattaaatattattttttttatttattttatttatatataattatttattaaaaacaatatcattcccttataaaaaaaaattatcattcacttctctcttcttcttctcctctttctttttctctaaaagttcttaaaagttgcttataaaaaaccaaaactaagaactttgatgttttttttaaagaaaaataaaggttgagactcaaaaattctttaatggcgaagttaaaaaaaatgcaaaaatttttttttgtacttatctcttctctcagatcatatccaccaaaatttttttttggtggatataaatatttttgacaaataattataaaaataaataaataaaaaaataaaattaaatttggacataaaatgaagcaatgacactattaaaaaaatgactctatagaaaatcattttcaatacctttattgaagcattatcctattttgtattatgttttgtaaaaattattgattggactaatttatattaaattacaatttagatttaatattttttaaaatattataaaatagacggtgaacttaattttcgtcaaattaaaacttaataattatttgttttaaggtgttaagacgaaattagttacatcttttgcttctattagtgttagaaattgaattcaagttagttatattaataatattaattgaaaaaaatttaactcaaagtctattttatactatttcgaaaaatataaaagttaaattgtcatttaacaaaatagagagatcaattaataacttttgtaaagcttaagttccaaaattatatttatcttatataaaattttaataataaagtcagatagatatatggccaaacacctgcagtaaaattgtggaaaaaaattgagctgagtgtttggtaaattataaattttaaaatactttgagttgttaagatttattataatgataataattatgttataatcaaatttattataatcacaaatatataaaacttattttatacaatattttatttttatatattttaaattttttttcaaatataaatttatatgcatttgataaaaataatttatagtattttttatattatattttatcaaaaaaaaaaaaatagaaaactcaagtatataagaaaaattatagttatttgttgatattaaaataaaatataattttttttttttttaaaaaaaaaagagatttaataattatttattttattataattaatttattttaaatatttttattttttttaaaaaaaaaaaaaaaagtaaatatggttttagtacaaataaatttattatagtatagggcacggtttaaaactgtcacctacaccttgttataggcgacggttatagaaactgacggaaatactttaaacgaatgttttaaaacgtcgagaaaaatcattttttgtagtagtgaaataaagtactatttgaagaactatatacatttatagcttatgaaaagtagaagaaaatcaaaccgcctacactgcacaaattgtccacatcgcatcataccgtataaaaaatacagtttgaaattctttgtagtgcatgatttgtatttctaccaaaagcgcgtggtacggtgtaattgtgtttttgaatttaataattacggttcaaaccacacatcactatatattacaaagttactaacttttacaatgtgaattttattattattttttatataaagacaaatatatgtgtatattataattttttttagagaatttaatataatgacttgatgattagtatatatgttataatgtt

SEQ ID NO: 228445 - DNA, 1897 bp, Cannabis indica
taaactcttatgtgtttatttcattgttttagaattcatattaggatgttaatgaaatatacttgttagtaaatctagatcccggtaaaatatatccaacagtgtcatccaagatgattaaccactagtaagtaatcactctacaagaactaagaatgtccagacaaatgtgttacaccatccgataagtatctattatgcactcaactcagatacatctactagtgaatgtgaatcaaatgcttcacccatatatctgcaagcttgcaagtcacggcaatagttctataatcataggagagattcctaataacaaagaagagaggaaacatgtctagtttctcatcttttttgtatttatttaaggaacataaacaagtttctgattttaattcttatttattttagagaaaccaatttaatgtaattcttccctatgaataatagaaccatttcactattcagtgacacaaatgttaagaattagttaattgtcattagttgtgaattgctgtgttttcagttctttgtattaagatgtaatcaacctttattttctgttattccttgttcccttggtgccaacattagggccacctgtcatactctcatttgtcattgtaatctctctatagagtataaatacaatatgatttactcagcctcctttgagccgagaattactttttcatttttgtgtaaacctttacttggtatcagagcaataaaaaaggcctggatcaatgtcctcccattctcagactccacaagttacgaatactggtgcagcaggtgctgcaaccccaaccattcctgctgtccaacccaattacactcaaccttttagtactttgaatcaacccttccctctcaagctcgatagaaagaactatgtattgtggaaaaccatggtttccactatcatacgaggtcatcgcctcaatgggtttgttaatggtacaagaccctatccagcagagttcattcctactgcgcaacagtagaaggagagccaggctttggagttactatcaatccagagtatgaacattggcttgttcgtgaccaactcttgatgggttggttgtatagttccatgacagattgaatcgctacagaggtgatgggctgtgattcatcagctgcactatggaaagctttggagaacttgtacggtgcagactcaaaattaaagatggatgatactcaaactctaattcagacaacacgcaaaggttctatgtccatggaagaatacttgaagtagaagaaggcctggtctaattcacttgccttggcatgggatccctacctagagaaccaactcatatctaatgtgacttctggtcttgacattgaatatctacgtatagtcttgcagattgaagctcaatcctccactacttggcaagaactacagggatcttactcgcctttgacagcaagatggagcggcttcagaacttgagcctcaacaccaacaacaaatctgctaactcttcagtcactcccaatgataatctagctaatcactccaacactggtaatcgtggttgaggcaactatcatccaaattagaatcactatcactcgaatcagaaccaagcaggagcggtcgaggaaattactctcatggtggtggaaatcaaagtggaagaggtctggtggccgttcaaatggacccatacccacttgccaggtttgtgggcgctatggtcactccggagctatctattacaacagatacgatgaggtgtacatgggatctgaccccaaggttggtggctcaacaaattagaaaaataatcagcaagcagcagcatatacgacttctcctgagattgttgatagtaaagcttggttcatggacagcggtgcaagcaacgatgtgacagct

SEQ ID NO: 228446 - DNA, 1655 bp, Cannabis indica
taatctggattacattgaaacagagttttatttagggcataaaacccaacacccattccttgtagactttctttatggtcatagaacctttgcatagtttcatggtacctattgcgatcttactcacaacaccaaggtcatctagcatactaatagaaattaatttcttgctaagttatgcacaaatcttacccttgtaagagctcttacaaaaccatcatacatcttaaagctcacattacctgagccttcatcatggcatgtttggttgttgcctaagatgaccttccctcctttggattccctaaaatccattcatctttgaatttagttgcagtgttgtaaacttctccactctcatagccatcacttagattagcttcatgcttctttccctttttctttgagaaataattctctccctaagttaagtcactaatgctaccatctattcttcctttgttatttctattccaaaaataactgtctcttctggaatgccctagtttaccacagtgatagcagccattaggatctttctgtcttcttaatggactcttcccctttccatgccttccacccttggaagaatctttgttgttactccttcccctattgttccaaggtttcttttgtttaggccttcctctactcaagttcagctcaccattagagctccccaacttgtcattcttcatctctaagttcatagactttagtgcagagatggcttcatctagggtaatagaagttcttccatacttgattgatatctttacttccttgtaggattctggtaatgagttgagaatgatgattgcttggttttcgtcactcaatgcttctccttctcccgagttagccaactctatgtgcatcttcagaaattcatctaagttgtcctcaagactattaaatctgttcatcttgtagccaaagatcctttctttgagtaagatcttgtttgtcagtgacttctgttggaattgctcctccaacttcctccatatccttgctggagtttcctctttatcaacctatctaatgattgcatcacttttgttgaatatgataataccaatagttgtgtcaagatactcttcttgttgtatcttagttgttccttttggtcattcaatgggttcttcaaggaccctcaacaacttctgttgtgccaatagagatcttattttcctcctccatattctgtagtcatctgatccatcaaacttatcaatatcaggtttaagactacccatattgtatttgctaaaaattaaatcagataaaggtttagaaatttctataggatcattcaacggaatgtcctccaaaactctaatatctaattcctcctcttgattgctatcttcatgttcttgaatatcaaattcctccggttcttgattattgatatcttccagacttgcttcttgaatgtattaatttgaatctttatttgtaaaaattaattctgttggaattttaaaaaatctacagcttttatcccaacaaaacttcaaaggcacaaattaatacaatagttcaaaggtgctatttttcattttttattattttattgtcgtccataaaataaatggtattattaaaaactcacaaatgcaaatttgctatctcttttctgttctacccaa

SEQ ID NO: 228447 - DNA, 797 bp, Cannabis indica
tgttatatgtgggtaactatgtgtggatgatatccccaatttcttgccttacaaggtcgaacaacaattatttaattatttctaatatatatttaaagcacaattttttaaaaaaaaataaaaaagcacaaaagttttatttatttatttatttttttttttttgcagaaagcacaaaaattaatttgatttgtgccaattgtataacactaagggaaaaaccatggacgtcctcttcctagttagtctctacattaataattatgaatttaattttgtaaaaaaaaaagtcttacaatattattcttgtaaattttaaacaaatttcaatctactatgcgtgttcaaaaaattttaaacttatttttagtactgtaaaattaaaataaattaaaatttacaaaataatattgtaatataataataaacatcgccataaaaaaaattccaatatataaacataactaaaaaattatgataaaagattgatagtaacactattcaaaattataatgtatatatataatattactaaaaaatgatataaacagttcgacatttttgtataatataatagaatacttttttcaggtgaaaataatcaatttgagagactgtgtatgaaagtggagaaaaggcatgcggctatatgtattatcagaatatatttatttgttaaaggtgattgttttcatatgtcaaatccatgcacgtgaatacattccagccaaaaataaaagtcaacagcaaagaaaaatgtgtacagaaacaaaataaataaataaataaaacataag

SEQ ID NO: 228448 - DNA, 1103 bp, Cannabis indica
gttttcttctcttaaaaatattatttaattattaaaaacttaaaaaaaaaaataatgtgatttataatacctcactaaatttagacaaaactatttatacctatcattttagtgtcttattgaactaaatataatgtgaaactacactatatttaatatttttaaattcaattaaaaatgcttgtaaatatataattttttttagtttaattttttattttatacgcgtataaaataaattatttaatttttttattctattaaatatttttaattttataaaatatattaaattaaaaattctctcagataacataagtggtcaggtgcttataatttttccattttatttgttttcaaaagaaatactaacattttggtcaccaaagaaaaaagtagaccttattattgacaggtggcaaaatattattagtgtataggaggagtttggcaagtacgaagcgtaaacagaggcaaagcaaatcccgaggcagtgtcacgtgaggctgtggcccgcaattgcgtgctcttctctctactggcgtgggctccacattgtggtgagacttaagagttagagattaatcagtcaatctttcgttcagcttcagcccatgtcaacagacgcgtggacccacaaagctaacgtaacgtgtttcgtgggccctacagtaacatggtgcggggcccaagcccaatctaagcctttctatctcttcctttaatttatttatacgtagaatgtcttcgtatttacactgctttcagtttcactcgcactgaaattgaagctttgcaaccactcacctcacgttcttaacttcttctctacttagtattagtacatacaatataatatacatacatacatacatacatatacttctcttctttgtacaaaaatatccctcttccattacggcattaacgacttaaacagaaggttaattttatccagtccagtaaataatataaaaagaattgtttcacaaatacataaaaataataaaactatggtttaacagaattttaaaaattttcacgatttttttaattttatttactgaaaatatggccattttatgttacattcttgttaattt

SEQ ID NO: 228449 - DNA, 1073 bp, Cannabis indica
tgaatgcaataattttaaataatcaaggatattatttataacttaaatttttccaaaagaatttggaaacaacaagaagataaaaaatcacacacaattaaagtgcattaaatctatatatcatgtgtggaattgaataataatgatcacgtacctgtagaatggacacacttataatcaaggtaaaattatctttgactattgaatagaatgtgaattgtatacatattttaatatattgtaaatttattgtgttctcttggccttggtgaaggaaacctacgcatcggtccctatccttgtctgttgttcctggaagttgggtatgctcatgatgcgtacgtacttgtgttccactctccttgtgctctatgcgtgttggactcgtcttccttccatttaatttgggcctgagctttggctagtacatcttctatagtcctgcaaggatattttgttaattctttataaaggtcagaatttaccattaggccttttcagaattgcatgaggttacagatactttctctgcgttgaacctagcaacataatctcgcagtgatccacccatcctttatttgatcctataaagattgtcagacaatttctccaacttcttgctactattaaatttctccacaaatatgctagttaattgagcaaatcaagaaacaaaattgttaggtaggtttatgtaccattggagggctggccctacaagactagaaccaaaccccttacaaatacaagcatctcgcaattaatgagggatagcgactgtaaacattgtttacttataactcgatatatgatcgttagggtttgttgttctgtcgtacatcttcattgatgggaagacgaacttcttcggcatctccacgagagttaaagcatcgacgaatggggagtctacgaagctacttgctaagctcttttttataggtgcagggactcctgggattctattaatcatagcctccatgccttcaagcttccttgctaccatatgttcgattatctcctcaggtgtcattatgacgacttgactgttggaaattatttcaccaggatct

SEQ ID NO: 228450 - DNA, 1717 bp, Cannabis indica
cgcacccctgccaccaccaagtctctagcttacaaaaatactacgccagacgaaactcggattcaaaccaatctctgctagtaagaaaaattaataaacaaaagtgataataaaatacatttttattttttaaagacacaaattttacttgtatttttgtgattaaaaattaaaaataaaagtgttactaaatgcttcaaattaaataagtaaacaaatataagagtattaattaccttatcttgattcatattttattagtacatacactattaatataggtataatcgttattaggggcaatatttcttttatatatgtaaagtatatttgattacaaatttaataattcatatatataatttaataattaatttttttaagataatacttagctagagtcataaaaaacgtgtgtatatacaaatatttttttattatgtatgtcactctcatatttaataccaatacttaactaattccttttatattatttttattaatttctttttttaataatttcatgatataaataaagaaaattactagttcaatatatgatacattcttactctaaaaaaagatttaaaaaaaaaacaaaataataataattgcaaaaaaaaaaaaagttaacctaataaggagaagtattgtaaatattttttttgagagattttggtgtcagaattttcataaaaaaataaaaataaaaatacttagtgacacactttgtttgtttggtgacttccattgatgaagttaaaaggttttctctttcattaaatgattaaggatttgagtttggaaagaatacaattttataataaattctccttgtcagatactagttttagtgagaagatagattatctcaccgcaagttgtataaggtatatatatatcaattaatataattgtgcattgtaatttatctttatttttttatcatttattattaaaaattttatttagagtttttctgtaattggattttgcgatacgactctttttttttttttcaattgttagattcgcaaaattaatgttgtggtatgaatcataatctattgtacataaatttgtgcataatttttttaaacattgctttataagaattggatatgaaaagtccaaaaagaaatttattgatacataaaagaaattaattaaatctattgatacataaaaggaattaattaactatgagagtgacacataatgaaaaaaaaaaatatatatgtacagacatttttttgttactctaactagtattatatataatattttataataaatttcttaaacaaatttgtaatcattgacaattaatccagtcttcaatcttaaaacattttgggtgatgatgtggattaggtgatcaaaatattctatgtctaggtaacaataaactatgagaccgccctcaatattgatcgactggatgaatatgagcctttaaagtcaacaaaaacattgtgaaatagagtaattttttatcttagaacatcccaattaatgacaatcaaaccgttgatttatctggttagtatttttatgttacttataaaataaaaatttgttctctattaagaaaaaaagtgaaattttgtatttattacaattgagatcaagccatgcatgcaacaggcaagtacatacacccatgtatgtactatttattgaaagaaagaaaaaactaggtacatttgaaatgaat

SEQ ID NO: 228451 - DNA, 2338 bp, Cannabis indica
ggggacaatgtgaaattttaagtatgtaggaggggcttaagtttattttttgttgtttagttttatttgtttgttttagtggttaattaagtcaatgtcagttttgctgcaattttatttatggaatgggctgaaattgtaaactatgcgcttgattctttaactcctgagattaatttggatgcttgtgaaaattttgtattgatgtaaattgtcaatagttggattgtatcataattgttttactttggtttgtggtaagattgattgaataggatagaacttgcatgaattatttcttgaggcaaaatccttgacaatgcttgtttaaaaaatgatgtagggaattttctttagattgtttgggccttttcaagcttacctttatcttttttatctttagtttacctgcttgagttttagtctgttcaattgtttttagccacactttgtgagactaattttgaatccacttgcaattctctttccttgtcccttgaattataccataagcttaaaaataagtttatgggagataaattgtgtgtgtgcgaaattattgttataagtgggtgattaagacaatgcgtgaattgtaaaagtatttttcaacatcactaatgttatttatgttctaaaaaaaatagaaaaaaaagaaaaaaaaatgttgaataattaaagtgatgttggaaacattttcagtaggctctcaaccatgcattgtaaatttgatgaatttcgagatagtatgtttatatacaagtgattgattagtttataatgtgcttatggtataatagagcttaaatgactttcaactaccctttacctaagccattttgattacaaccttgaaagtccttctgattctgaactaggtttgttaacattggaggagagaggtaagtcatgcaagcttattgatcactggactgtggaaagattggatagagtagattgaatatgatgttttcaaagtaagcatccaaattaattattagaatttttgggattgaaattctggtttaattaattaattgaagttttacaggttgtaggagcggtttgatcgtttgaaggcttagttaattgtttgttagttagtgtttttttttggttgtagttttcagtcttactcgagggcgagtaaggatttagtttgggggaattggttaggctaaaagttttggctcaccttttatagttttttttttcatctttgttattatttttggaatagaattactcttattttctttggtttcatatttcgatacttggaatgtataaattggtcaaatttcaaaaaacggtgatctataaaatagagaaaattttgcaagaaataaagctgaaacttcaaacctaaatttgactatgttttcgtcagattttgggaaaaataaaaacataaatgttttagatctctttttcagctttccaacacatcttgaattaactcatttagagttagtatgtgaaagttatgcatattttaatgaaagaggttgaagtaagaacattttagttgcgactaacatttgtggtcgcgtcgagcatgacttatggctgcaacaaaggactacaaaaaacccatgttttcacttttgtatagtcgctgcggtgccgactccgtaagggtcaaggagaacttcgtcttttatcgtttttgggttgaaaaactctatttaatgaaagggggtcgcaaaacatatagagatggacagaatggaacctagaaacacaagaagaaggctgttggagcgagcgtgggtgattcgtgacaactttccatctagttttcttcttttctcttgatttcttatgtttttatttgtgtttagtttaattatggatttgattatgagctaaactcccaatttaggaatttgatggatattgtctgagattatttgatgagttaatattagtttattgttctttcttccttattattgtgatttattcatctttgtacttaacatatgtttaatattggccacattatgcatgatctatgatctcaatacaaaatatgaaaagtgagtattgaaaatactctaaatgaataaacgtaagttttgatgtgaaacgagtatcatatagcttgtgtgacccttaaattattgcttaatgtgaattatttgttgtactatatcaaagatacaatagttgacatgcaatttaggacttttatgatctggagagagtttaggttaatttataatctgtcatcacataggtggatgaaaaatagttaattagtgttaacaattggataaccaaagtaattgaaatcatatccctaattttttatccattgttaaactttttattt

SEQ ID NO: 228452 - DNA, 1580 bp, Cannabis indica
aaatgaaaaaaaaaataataaatgttgacgatgagaactcgacaactaatctagtagcccgaaaatacaaagtaacccaaaaatcaaatgacgataaagataaagatgaagatgaaaagatatctgaaaattattttctctctatattgcattcaaggccagagttacaccaagtgatttttccaaccccctctcacatctaaggtgagattatttataggctctaatggcctgctgtataaagtggtcgcatggggacaaaacgttgctttcacgctgcatgtcgcaggtgttggaggtgatctggcacctcatactcttgtctgatgtcaggtgagtggtccccgattgcaggttacaagagagtggctgcagcgtgtggtccccgattacaggttgcaagagagtgattgcagcgtactcttagtcggatcctcagacctcacaggttcgttgtcgcagctactcgtaccttcttgctttcagagttctcaaaaggcgtggttatacgctttctccttgcacgccttgtcaatgtgcattcacctctcgccttatatttataatccccataacacacttacacaacgcacacaacggctcgcatgcgagacccctcatgggctcggatgcgagcccttagcactcaacacacgcacaacacgcctcacccccttacacacacatagctcgcatgtgagccccccatggactcgcatgcgagcctacacacacgcacgcactacatgtctcaaccccccatacacacacggctcacatgcaagccccctaacggattgaatgttagttccttttatgtgttaattctagtactagaacattacgcacaaattcatatgggatttgaattatacttccactagtgaattaataatactcaaggataaagaagtaattagaaagataaaacagtaatatgaccaaaactaattatgaaccaacacatggagggctaatcactagaattaattatatcaatagatactgcagtaaaactcagtaaatataattttataattactaagagttcaattctatatttttagtggagtaatcatggaattaataaacaaagattatttagttgatgagactcaataaataatctagtttattagagcttagaattataagttcatggtccctgaattgccaccttgaaacactgtcaaggatatggataaagagtagtataatgtcatttggaaaaagctattttgaattgccaaaattgtaattatttatttttgtaataaataaacaatttttcaaattaatttaatagggaagaggcaatatttgttgagataaaggttgttagaacaaaagacatcaagcttgtctcaaacaagacaagttaggcgcctagcatatggcatgtccctatggagtttgtctttttgggttacttaattatttaattaattcaattaggtaaatatctaatttaaaaagtagttatagatatttcaaagttgttgagatattctctaaagtagttgagagattctctcataaataccagtaactaaattcgaaaatatatttttttaaataat

SEQ ID NO: 228453 - DNA, 940 bp, Cannabis indica
aaaaatgtaaaaaaaaaatattactttgaacgtaaaaatgtaattattttacaaaaaatagtatcttatgtaattattccgatattttattgcaataaaaaagaattcaagaacttacaattcaattgtaatattataatataaggaccaacaaaaaattaattaaataaatacaacacttatattatgcgcacacaggacagaaaattagcggggagtgctactcccgtccttatccctgtaaaagaattttattctcacctctacttatttcccattcaggacaggggagagaatcccctagtataaaaatcaaatttatattaaaaatttaaatgtataaaaaatattaaactacataaaaattaaaatattgcacattatttattatttaatatactagttattattcaaaaataaataaaaatttgtaagaagatactaatatactgaaaaatataaaatattactaaaagataaataaaatagtaaatgggtcatcgtcaggacgggagtgtcatccccgtccccgcccccgccctgttaacattcagggacaaaaaatgatcctcattctcttcatgttccctatttaagcggggaatccccgccacattaagggcggggctcattcccatgagaaaaatgtgcatccctatcctgactatgcatggtatagtgtctattatgtaattaggaccataatagggtggttgatttaattaacgaaatttaggcacatggtagcaccttaatgattatgtgtttactgagattttcggaaatcgattataatgagagttacgaaattaagtaaaataatagaaagtagaatgggagagcttccataatgagagagcttccaaaatgggtgagcttccataatgggagagcttccataatgggagagcttccgaaatgagagagcttccataatggg

SEQ ID NO: 228454 - DNA, 888 bp, Cannabis indica
tattttaattaattacaatatatatttgtataagatagattaatactatatgttagagggtaaataatagtaagtttgtgtaatgtttaagataaattatagagggtaaaaattctaattataactacactttatttgtgtataaaaatgtcaattaagacactttattctcaaattctaacagtattttattagtttatttttatgaaatactgggaggagtagttcattcctcttatatatattttataatcttttcatatattaacaatgtgggactctctaacaaatactctttgtaagttaaactttttgctcgatgctttacatcacgtaaattttaatttttttttactaaaattgaaggaaaatccttaaattcaaatctcaatagtttaaaatagatttttaatgaaccttaaggttatgtttggttctattttaatgaacttaaggttatgtttggttctattttaatgaacttaaggttatgatgtttggtgggaggacgggagagtaggatggatggagaaattagaaagtaagaggaatagagaggattattaatcttcttaggtattagatgtgaggtaggaagaataaaaaaaaattaattagtaaaattatataattgtccttttaaaaatataattttattatttttaggtagttatcgtattttatattttgaagatttgaagggaaaatctcactctatctcttctttctctcttgccaaacgagtaatttaatctttccttctatcactctccctccaccactctccatccacccatctcccccttctaccaaacatattgtaagggagcataatttaaaagttcgagagcctattattagggaactaatctttttaaaaaaaaaaaa

SEQ ID NO: 228455 - DNA, 1268 bp, Cannabis indica
attaatgaagctggtttagatagtcattatttggggctgcctaatactatggggcgaaataagaaggctttgctgggttttttgaaagaaaagattagaaagcgaattcaaagttgggatgggcgcttgttgtctagagcgggtaaggaaattctgattaaaactgttgttcaagccttacctacgtacgctatgagtgtctttcttattcctttggatatttgtaaggatattgaaagaatgatgagtatgttctggtggaattcaaaatcttcaaaaaagaggggtatctcttggatggcttgggatcgtatggctagaagcaaatttgggggaggaatggggttcagacgattgcatgaatttaatattgccatgttgggcaaacaagggtggaaatttttacaagaggatcacagtctagtgtttcgggttttcaaagcaagatattttcccaatgatacttttatgactgctacactaggaaacaatcctagctttgtgtggagaagtattttggaagcacaaaatctcttaaaaactggttgttgttggagcattggctctggttcgttggttaaagttgtgtctcagccttggctcccagaccgtgcaaatccatatatcacttctcgacatcctggtttggccgatgttacagtcgatcagctcatggtgccaggggaacaagtgtgggataaggagattcttgaagatatgtttgaaccgagagacattaatctcatcttgagtatccctctcagtgatagaagctttcctgatagatggtactgggcttcggaatccactggtaggtattctgtcaagtctgcctacactcttcagttggagcttgctggtttgaaccttgaggacagtaactctggtttttggaggaaattatggaacctgaagatccctccgaagtgcaagaatttgttagagccctagtaaactgccttccaacgaatactatgctggctacaaaacgagttcacatcgacaccacctgccctttgtgcagaaatgcaccagaaaccgtggtccatgttttcgtggactgtgcgtttgccaaaaattgctggtcttttctcaatgaaggtcatattccaggtgctaatggtgactttttaaaatggatgattgacatctttgataacttctcaaacagagttataaggattgttagtattatctgttggcaaatttggaaggtgaggaatgagttagtttggaataaggccactcctgctgctttcaatgtggtt

SEQ ID NO: 228456 - DNA, 1324 bp, Cannabis indica
atctaagattaatttaatggtgaaataagaatgaaaaaaaatactttttacctaactaaaagtaccatatattaggggttcatgtctattgacatggtttctttagtttctttgtcataagttgagtgattttgtgagtattgattgttggtactgggggttatttcttgtgaaagtctgtcaggttttttctgttcttgagtggggttggtgtgggcattgttctctactggttaggatggcgtcgtctagtcgaaatgctggagcaatggaggatgagactttgcgttttcagatcgaggaagaggacttagaagctgttctggtttcagcgggtgatggggaggaaggaatagatgaccggtggtgcttggttggcaaattcctttcaaatcgagttatcgattttgaaaaaatgcagaacatactcgcttctttatggcaaccggggatggggatgttcgtcaagcagttggatactaatcgtttcttattccaattttatcacgaggttgacatccaacgcgtgatcaatggaagtccttggacttatgatcgaatgcaattgatcgaaaggcttaatgttggtggtgatccaaagtccttaccattgaatactttggatatttgggttcaattacataatgtagaaccaggattcatgacagaaaccactctccgaaaggttgggaatacaatggggaaatacttggagtcggatcctaagaattttattagagtatggagggattatcttaggatgagaataactcttaatattgaaaaaccgttacgcagacgtttgaagatcacaaaggatgatgggtcatggttttggataaattttaaatatgagaggactcctaccttttgtttctgtggcataataggacattcagacaaatattgtcctaaattgtttcatcagccgattgatcaactagcgaaaccgtatggtgaattcatgaaggctttacctccacgaaaccacaagaatgttggctcacggtggcttcgaaccaaaggttggactccgacagtggcaatggcgggtgcggcagctgggagtggagaatcatcatcaatcaatgctgaccatttcacagtaccaattccagtcgtgaatgaggcagtgaatcaaggtaataattatgctaatttggggggattgaatgaagatattcgaccaggtataagaggaaatcaagggagagaaatggttcaaaataaggaaagtgctgtcattattcatcatgataattctatgattaatgatagtaaaaaacgtaaggtggaaaatgaacataaaggagggaatgctgat

SEQ ID NO: 228457 - DNA, 1236 bp, Cannabis indica
gcctgaagtaaccaaatcagagggtgtggagccctgtgcaatagcagcaacctgtgttgtatcaactggtgtaggagtactacagacattagtaggaggattggaggttgtgtgtggaagttgtaaaagagttgcaggtaatatatgggaaacggatataggtgggttatttggtggggcatctggtgaagtgtttagtgtgggaactgtgtatgaggaatcaggatgagggtcatttgtggtggtagaaatgtgtgttggaggattaggtgaaatgcttgatggtgatggtagtgtctcggtatgacagtgggatacaccagcagggagagcattattagtatgaattaatgtagtagaggtattaaaagttgcagtaggtacagtatgtgaagaatcatatacctgttgggactgtggagttgataaaacaccaggataatgaccttcattaaagatgacgtttcttgcaatatatattcttccttgagcactttgacagagataacctttatggtaggaagagtaaccaagaaatatgcattgctgagatcgaaattgcattttgtgagcattataaggtcgaaggtgcgggaaacatgcacacccgaatggtttgagtattgtgtaatcaggtttagatgcaaagagacattcaaaaggacttatgttgtgtagaatagcagtaggaagcctgttaatagtgaaagttgcatattggaaagcatgccaccaataagaaaaatcaagattgctttgtgctagaagagtaagaccggtttccacaatgtgtctatgtttccgttcagccctaccattttgctcatgtgtatgtggacatggatgggaaaacaaaattccttgatcacttaaaaatctcttaaatggtttgtactcaccacccccatcagcttgaacagctttgatgggtaaaccaaattgtttctctaccatacttttgaactgtaaaaacatgtcaagagcttgagactttaagactaaagggtaaatccaagtaaatctgctataatcatcaataaaatgaatatagtatttaaagccatcttttgattgaatatgggagggtccccacaaatccgtatgaataagttctagtggttgactagcacgacttgaagaagtggggaatggcagccggtgatttttgccttgttgacaggctgtgcaaaactgtaaagtttaatggatccagtatgaggtatttgaggaagcaat

SEQ ID NO: 228458 - DNA, 1791 bp, Cannabis indica
aaaaaattaagtcaccaaaatttacattgttaactacctaatattgtatgaactacctaacatggtatgaactacctaatattgaccccctacaaagttgtatgaactacctaatattgaccccctacaatttaattttggtttagtgtgtgattgaaatattaatagtatatcttatttataattattgatagtacttttgtgagggcactaaaatatagacacgatttttttttgggaaagaatagagatgatttttcataccacatatatccttaagttatatgtaccaaatgaaatgatacctttcatgataagaatgacccaggtctaactagaaatgatgattaatcataacataattttttttttcaattatatataacttttcacgataaaaaattatttatgattaaaatatattatttaaatataaattatcattaatttaattatatataatcacaataaaaattataactaaaaatacatttagtcccgactaatacttttaactacaaattttttagtcaaaattaattaacataaaaatgaaagtttatatttatatagtaacatagaagtatagttcagttttcacttattagtttaaatttagtttaggtttcttaatattttataatattcctttcccttcatgtgattttaatttatataaagacaatacttgttataagaaagaacaaaaaattcacatgtgtaaataccctatattaaattattttaaatgattttaaacactatataaaggtcctctgcatgatcacaaattctcaaactcattcacaaaagaataataataacatatattatatatcataagagctctagctagccatggctatcaccctctctcaagtttcttttgcaaccactcattctcacatcaatgataggtctttggggctcaaaagatctttgttcatcaaggtttggttggtttattaatttatttatttttgcatatatactttcttttagggtttttcattaatagagaatattttttatattaatttgttattattagggtttctctggggcacctttgagtttggcttttaagacaaattttggacaagcaatagagaatgtctcatcaaaaaggctaggtactactcctcataatcgctctcgtcatgtagtatgcaccatatggcaagataacaaggttcctgtggctccattagagctcgaaaattccacaaggcctcccacaaatctatactcggaaaagtcacttcacacggccaccattctctctgttgacaagatttctggcccaaatgctcctggtgagatttatcgtattgtatattttcatgatggctttcttccttactgggagggacaagttttgcgtgtaatgaaagcggtaagatttacagtctaaatactcttttgagattcttaaattactcttatcgtactgccatttagtagttgatctcacattttcaattgagatttgagatttaatatttatttgtattatgttaggatctcacattgattaagtatgggattgttaggatcctatattgatcaagtatcactataagaaatatcacttttactagctcagttcgctactgcgcttacttttaccagaacattttgcaaattgtgctggcaaagaggtcaaagttttaccagcttacatttacagtggctaaaatctaacttttaccagtgcatttacgcattgggaaaagtcatttttgctagcgcttttcattttttgctggcaaaagttctaataccaacatt

SEQ ID NO: 228459 - DNA, 1700 bp, Cannabis indica
tacagatcatcatttgtagttcctaaatagttgaagtcaataaaattcagcaatataaatcagaatattctttatctataaaatagtttctaaatttatatttgcttttctttggattgcaatctggaagcattattagaaatttaatatgttgtctttttaaataacagaaactatagtataaaatgtaaaactaagtacgcaaaaattgtaaatagtgtgtacatgtattttgagactatcaacttacaaggctacccttgtttgccttttccagatttcattggtaagctgatattgattcctgttgcatctacagggaagcattgttggatccatatctcagtagatattcagttataattgttgatgaagctcatgagagaactgtccagagtgatgtgttactaggccttctaaaaaatgttcaaattgcacggtcaaaatcaaatggccaactaaatactgaaacaaatggcatggtgttggagaaagaaaatgacgttcaatcttcaatttttctcaagcatgaccaaggaaagaaattccctccactgaagttgattgtcatgtctgccagtttggatgcacgtgtcttctctgattactttggtggtgcgaaagctgttcatgtccaagggcgacagtttcctgtggagatattttatacatttcatccagaaccagattatttagatgccaccttaattactgtattccaggtttttgttcttatcattctttgctatggcatttgggtcatctaagttctattcaatttgacaacatattttgctttggctttaagaagcctaatttatttgtgcacctacgttttatgtaacccatattattacatagttaatagttgaaattcttattcttttcgtactccgtaacctgatgcattcacactcaagtatttaactattcatttatggattctagcacaaaaattgcttaagtttgcattggatgttttaggacctccaatttatatcatatttttgcctcgtcgtgattttaaataagggttattttcttattgtgcattgctgcatcttgttagattcatctggaggaggcccttggtgatatacttgtatttttgactggacaagaagagattgagtctgttgagagacttatcaaagagcgagttttacagttacctgaaaacaatcaaagactagtgactgtgccaatattttcatctcttccatcagacagcagatgcgagttttcgcaccaactccagccgggtatcgcaaggtacttaaatacaaagatgaacctcactgtggattgtattcactttgaaaccctgatatcctaaaatttttacatagaagagttactggaaaatctcgatgtttatttgatttttgcaaaattttatgttggcattttggtcaacatccttgtacttcactatcattattgctgctgatgctgttactgcaaagtagtcacatgtcttaatctactgctttttgctgaaattattaacttttttttgcaacccaatcacatatgacttactttttctaaaaagtaaatctatacccttattttccccactgattgttgttacttgttaggttgatgttacatgacattttacctatttatttttcttaggtgatactggctacaaatattgctgagacatctgtaactattcctggaattaagtatgt

SEQ ID NO: 228460 - DNA, 1775 bp, Cannabis indica
aaaaaaaaagtgttataattattaataaaaataaaagagttggttgactattgactaaattgtttgcatcattattattataataaactaaaaaatatacttgagctcatctgtacggagaggagaggtattgacttgaggtaatctaatattaggttgcttaaactgttgagtaaactattaaattaagtaaagtcagctgtgtttagcaaaaaaaaagtaaacagataaggtcaacaggcataattgccaccattcattgtcagagtcatatttaaaatgtgcagctcatttcatttgaaaatggtattatgatttcaaatttataatgcaaatccaagtcacattcttatcttgaatttttatcaaataccattgatagaaaagttacctcaaaatattttttaaagaaaattaaaagagtttgaaaattacccgtaacagatttatcagtataatccacctcccgagtatgctcgtcaaaaaccacattctcaaccactaaagaaacaaagtagaaacataacatcaaattcatatcattcacctaaatcaccatcaacacagatgaacaaaaagtaaagagttcaataattttaccagttccaaacttgatggcattccaaatatcaggttccttctccctcgaaagatcaatacacttggcataacaaccgccttcgatattcgacacaccagtatcactccaacagtgttcatcatctccaatcaagtatctattgtgatcagtagacagagtagtcttcccagtacctagaaaaacagaacaaaaaacaccaaaagagaaaactcatcatcacaattcacaacaataacatcaaaacaaaaacaccaagtagtcatcatcatcatcatagcatagcataggcaaatatcagatatgtcatggcattggcggggcttaaacgccaaaagggatgggacgggatatgatgaattgttgcgatcatcatcggctttattatgataatgatgccgatgatgacacaatacctgagagtccaaagaagagagccacatctccactttttcccatattgcagccagaatgtagggagaggatttgacgcttaggcatgagataatgcataacactgaaaagacctttcttcatttccccggcgtactgagtgccgaggatgaccatttctcttctagcaagattaaggtctatgctagtcgaggatgtcatgtagtgagtgtaacgattacacgggaactgcccagcattgtaaatagtgaagtccggagtaccaaaactctccagctcttcaggactgggtcggatgcacctgcaacctacccagttatccattgtacgtacactactaagctaaacactttcttttcttttatggccagttgggactttaataacatctaaccacacaaatattattattactgttatatgtatatataacgtttaggaaacttatctggggagctgttgtatatgagtgtgtgatttttcttttataaaagttttttttctttttctttacttacatgttgtgcatgaaaagtgaatggtaagctctggctgatacgattctgactttgattttgttctctggatcccagttcaagaattggtcattcacaaacacctgaaatttttaataatgaaatttaggaaatgaatgtacagagcatggtcaaacacagagccttaattcatttttggcatcaattgagaaaatatcacaactgtgaaggctgttctaaatggagtgtagttcaaacaccaacca

SEQ ID NO: 228461 - DNA, 610 bp, Cannabis indica
tatattattaagaactgttgtatcgttccattttttgctcagttaatttgggaccgagctcttggtttgcctcttgagagaccaaagagtattacgatggattggcttgagagtcactgcaagaaagctgcttcatcttgaaagttgccgaggattgcaccatcatttatttgttcaataataattgtttcaaaaaacactctggctgaggttttcatgttggggctgtagagaactgcaacagtttagtgttatttttactttgttccctgatatttatttatggcttcaaataataatcctgcgatgagtaataataaggccgaaggttttgtgagacttgcatgcgtataatatttctttttttttttgagaataaatacttgttattataaattaataagacatgtcatttagtaaatcctcaaactaaaagtaagtttcatccatccctaaagtaaatttagccaaactatgaagaactttattggctgaacgcttaatatggactatattcactttaggaaaaaagaataaaagactagaaatatttacgattaaatctttgaaagaagtaattgcagaaaaggagttctcaaagcatttgaaa

SEQ ID NO: 228462 - DNA, 1295 bp, Cannabis indica
agtatacatatatgttaatgttatggcctttattatcacctactttaaacaaattgaaatatttttgttattatatgtggacacttacaaaaatacaagcaacatacgcacctatacattgaaagaaaacaacactgtttacttgaatccgtattcaatcaaataaaaatagatgcacacatattattattattattattattattattattattattattattattattattattattattattattttgcagcaaaagatgcatattaattataattaaatattttacacacatatacaataatgatagttttatttattcagagacatcaaaataaatttatttagaaaaaaaattaatttgttttgttaaggaaatcacttctaatgagatgtctcttatagctcataatattggttgggattagttagttagtctcattagtttagttttttttttttttttgttattgctaattgtttttagttagtttggttagtaatcagctgtatataaatcattgtattcattttcttcaattaatgagattacactttctttttcttcgttgtttcttatactcaacatggtatcagagctcactcaatcaaagctatcttttcaatcccaaacacaaatagtgatcgacacaacaacatagtcaatattgagtttgaagattgggaacaacaagacaatgttcttgtctcctggtttccgtcgtcaatgtcagaaaaagtcctaactcgcatactgcagtatgatactgcagcttagatatagatcactcttcaaaagtattatataactttgaatcgtgctaacgttggacaatttgggactttccttcgaaacaacaatgcttgttatattgacaaacattacaaacttcatttttccaactttaaaactgtctatattgatgctttacaagctttacattctgaactttggggaccaacacctaatggatatagatattatataagctttattgatgcttatagtagacacacgtgaatttatatgctaagaactcctttgtcaatttcaaaatacaagtagaattacaattaaatgctaagatcaaacttatacgacctgactgggggtaaatatcaagctttgactagcttcttataggctaatgacatactacagagagtatcttgtccccatactcttgaacaaaatggtataactgagcgtaaacatagacacattgtagagagtggtctcacattgcttgctcaagcctcactacctctcgaattatgggatgaagcatatagg

SEQ ID NO: 228463 - DNA, 1853 bp, Cannabis indica
aaattaaaaacaaaacaaaaaaatcataatccaagtataggatcatagtctcatacctctcaagcctcccaacaaattaaaaagtaaacaaagatgaaattaagaatcgagaagaaaatatctttacacatgtaatccacaatgatcatcagttcactatcgtcattagatcttcataatttaagcatatgatatataattttgattatggatgataattttgattatcaatgatatatatactatatatatgttaagaataaaaaggaaattatatatatctatatcggggtcggatatggtgcggatagtattatccccgcccccgccccatccccgcttcgggtattgaaattgtcccccaccaccgccccattaaccaccaagacggggaatccccaccccattaggggcgggtccccgcggttacccatccccgcggtataaatttccatctctacacccaacactgaagaagtggcacattgacaagattgtaccactctaggccccatcttaagctacctagtccatcccccatagaaacatacgaagcgcagcccacaatgcctccaagctcatctaaacgtacacccatcatgggccccattcaaacccttattaggatagaagcttgaactccaaaccccgactagatccaagaaccgacgggcgaaatgctcaacgtaagtcgaaaactagagctgagcagccacaaactcctctaaacgctagaagccaagtctccataataaaattgtacctaacccaagccccaacacaggcagccaccatacaccatagtcagggaggagaaacgaaaatttcaatgaaatgactgttggtgttagaatttgaggaataagatgaatgaggttccatcccaaaaccaattggccataggaggagtagcccttgttaagaaatgagtattctcaagcagggtcataatagtcttttggtgtgtctatttctgtagtttttccagtactgtccagctcatcattgtgtaatgattactctctcaattctgttagaatatcctccaggttgttaggatatcagggcatacgtgtcaatgattggctgtaatattctagattattccttttgtattgctgctgctatataatgaaagtttagcctctgcattaattgagcagagcattttactcctaaatactagcaatttccacttggtatcagagccaccaaaatagggtttacctatgtctactggtgaccaaaccccacataatcaggcctcagctggaggcgcaagaactacggccagcaatattgcaacaaccactaatgtagcttctgctagtaatgcttctactccaagtgcaccgtttggtagcacactcactcagccatttgccttaagttggatcggaataactacactctttggagaactatggtgtttaccatcgttcgtggccatcgtctcgacggatacttgactggtgcgcgttcaagacctcctgagacaataccaagtgtgctggacagtgatgaaaatgttggctttggtattcaaaccaacccagattttgagcaatggatcatacatgatcagttacttctaggttggctatatggatctatgacagaggaaatcgcaactgaagttatgggttcagaatcttcagctgcactgtggagtgctcttcaggcgttgtatggggctcactccaaggctaaaatggatgagtatcgcacaaaaattcagacagctcgaaagggatctctcagtatggtggaatatctcaaacagaagaaaagatgggccgatgttctcgctattgctggcgaaccatacccggagtctcaactggtcacaaatg

SEQ ID NO: 228464 - DNA, 819 bp, Cannabis indica
tttcgatttgtaatttttatcggattattttggtttagtttaagcgaattatttgagttagacagtttacaaaaatttatataaagccctatcatccaggaatgctgaataatgcttctttgacatttggtgcattaaagtcctctaaaaatctttgccattgtttagagagtcgtgaacaacaatctattttttttaacaactaacaatttatttgtagaatccttgtaaaaaaaaaaacaatttatttgtagaataccttatataagattttaagatcatattaatcgtaaatattatgtggcaataataactcacaaaacaatgcaacacattattgaatttagaattttatgatatttgtatataggcttatttgtaacgtaggttcttaaactatataaattttagtaagttggtctccaaattttatttttttagcaaactggtccccaaataatataatttttaacaagttagtcctcatattttattttattgtgaattggtccccaaacttttatttctttggcaatattaagtcttcactattagatattaatatttttattgatttttatttattttacacactttaatttattttttgtgttaaattccaataatttttttaattttaatattttgataaaaataattatgttaatattttttatttttaggtactcatataatatatactctataattataatatttaatttttttaagaaaatatttaaaatatacattatttatatatattattaataagaaaaaaaagtataaatatactagtggactcatataatggctaga

SEQ ID NO: 228465 - DNA, 1360 bp, Cannabis indica
ctttattgatgttgaataaaatagattacattgaaatggagttttatttagggcataaaacccaacatatgtgtgtttgaggatgaaggttgtatcaaacttagggacattttagccacatggtaacctgttttgacagaatagtgacctgagggagtgtgctgccagaaatatgagtccctttgagtgatatcaggtgggggaagggatagaatgtcgtctataatgttctgttggaaatttttttgcagcaaagggatattccaatccctattaggaaggagaagatcagagacatttacaaggtgacttgggagatggacaggaagaaatcggtagttcgggatccaggtgtcatgaagaatctttgtagtggtcccatttccaatcctcttgcagagacccattttgagaagagatttaccccaatgaatactttgccagacataggacgaagagtgccccaaagaagagtcaaggaaggttgttctagggaaatactttgcttgaaagagcttggtgagcaagggtgactggtttgtttggattctccatgcttgccttgctaacattgctttattaaaaggcgttaaggatctaaaccccagacctccaacactctttgagttgcacagggatttccaatttttccagtgaagtttacgttgaccattggttgcaccacaccagaagtttgccatttccttctcgacaaagctgcagaaagaatcagggagtttaaagaccgacatggcataagtgggaatagcttggatcacagccttaagtaggacttccttgcctccttttgagagaagttttccttgccattttgacaagtaggaccaaatcctgtctttaagagaattgaaagaggaacttttggtccttccaaaaaacttaggcaggcccaggtacttgtccatgtgattgggaatgggaacctctaggcagtcctggataagggtctgataagtaatgcttgtattcggggaaaaaaatagagaagattattggaaattaacaagttgcccggaaattttctgatactcgtccagagcttcttttatgacattgcatgcctggatgttgagagattttacgagcattacgagtaattttgattccaaaagcctcctcttgatgttcagcttgtttgagaatggatgagaggccctcaacacacataaggaaaagatatggggagagaggatcaccttgcctaataccacgggtaggagtgacaagccccagagcttggccattgacgttgaatttgaaggtggccgtggtgatacatgttgggttttatgccctaaataaaactaattacaatctgattagttatcaatttagaagt

SEQ ID NO: 228466 - DNA, 1395 bp, Cannabis indica
taaaaaaaaggaaaaaattcatacagattgtaagagaggatgtatcaaaatattcaaattttatatgacacacaaataacttgactgaaggtctttacctgtgtacgcttgcatcttatctttactacaaagtcatggaatttagactaatttccaatttacagtgacaaatgtttcatgagctgagaaaatccttcactatactttgttcttgtctctagactagattgatgttatggcagaaagaaaactaacattgttctcatgtcatatttttgaggcctttagatcttttatggttcacatgtggaaactgattttctttcattagtgtacttgtctcaacttgatctctgttatctattactattaggagttgttcttataaggaatttatcaaaactaccaagaagcaactgttggtttgttggttcttccaaagtcaatgctacagatatggcttgcgaattcaacaagaactggggaactcatttgagagttggccatcatgattgtcgggattatacgaacggtaatgaatctctcttgtctctttctctgattattcaatcacagtgcctctattttattttctaatgaattccccttttggtagaaagaaagttctacatatttaaggacttaataagtgcactccaaagatcattagatataataattggaggagaatcaactcatttatttacttttgtttatttgcccatacatggtgatgcagcctactctagatgcactactacttctgatattgccaacttgttgaaagttgactaaagtagtttattgaaccttatttcttttatttctttgttttctcatactttataggattggttgagtacctaactggagaaaaacatgttttggagcgcttgaaaagaagcaataaggggtaatgcatcagtcatagtcattcagctacgagattgatgccaaacaaagttttaccttatttccacaaccatctataggataccacagtaagttatagtgtcaaaactcacaaatttattttttgcaattttccactaaacttgagtggaagtgctgtaagtattagtcttgttctctgctttgactgggacatagtcaccatatgtataaatccctacacgtgatatccgtatatatgtatgttaagcaaaaatttcacatttagaatattaaaaataaatgcaaaacacaatttcacctatgccaaaattatagcataagagtttattaatttaagttcgacccatccaagattataagaataacttcttaattacaatccttttaaataaagaaaataccctttgattccaattacgatgatattaaataattaaaataaatttgggaaaaatttggggtaaatttggaattgcagct

SEQ ID NO: 228467 - DNA, 1320 bp, Cannabis indica
ggttctagtctcaggtccgggtcctagtcacagttctagttctatttttgggttcaaggtttgagtcttagtctgagttcgggtacatgtttttcaaatctcgggctgcgtccacgtttgagttcgggtcccatgttcaggtttgggtccaagtgtaggtcccgtgtttcgatcccggtctaggtctgggtcagtattcgatttcgggtcttggttcttgtccatgtccaagtccaaatcctagtcttataaaggggcttggtctgggtctgggatcgagtcatgagtttgggtttggtttgggtttgagtctcagtccttgtttgggtccgggatcgggtccaggactgggtctgaactcaaatttcggggcttggttatggtctagttcagggtgttggtccaggtccagttcctggtcacggtctcagtcctgttccagggtcctagtcacgttctggttcaagtttcggttttgtgtcccatgtttgggtctgggtcaaggtcctggtcctgcttcgggtccttgttcccgttcaaagatccctatctggttaaagttcacgtttcggttttggttcctgagtgtcggtctaggtcttggtatgtatctgggtcctggtttaagttggagtttgggttggggttctgttctaagtccataatccagacactgactacgggtcgggtccaagcatcaaatcccggatcccagaggtgggtgctaggtccatgtttaggtcgagggtcgggtcctgatccaagttctgaagcccaagttttggtcccggtttgggagcccaattcctcggtcttggtcccccatctatgttcaggtcctaggtctcggtttgtgtccaagttcgtgttccggttcgagtttgggtctagagtctcgatttgagtctaggtcccagtttgggttcgggtcccagtcccagtgtgggtacgagttttgggtcccaggtttgactctggttcttaggtgctgggtcgagccccagtttttgggtctgggtctggcacccggtcttggtccaggtcccggtcttggtttaggtcccaagttacaggtactagtccgggtccaagtccaggtatgtgttctggtctgagtttgggtttaggtttgggtcttgttactgtcccaagtctaggttctaatcccacacctggtctgattccgattctgggtcttggtacggatccaggtttgggtcctggattcaaacactaactacgggtcaggtcaaagcctttggcccagattcggatcttggtattggatctaagtcttgtttaacttcaggtcttagatct

SEQ ID NO: 228468 - DNA, 1105 bp, Cannabis indica
tggggacgatcgaaaatttctgattgcttggacatttttaggcagtaccacgaacatcttaaagaaagtaatttagtccgcaactcaatccaaaaattttattcaataatattattcctattttattttcctgtagcagtctgtataacaataatgacaacatcaaattatttttgtttacacgttttcccattttcattaatttgtttagtttagtcaaagtaaaatctttcaataaattaaaataaggcatagctgttagagaagatataatattttaaatggaaatagatcatcaatcatgatattattataactagctataaagttataactcaaatttttgaaattgcaattaaatataaagaaaataaaagatggagatcagaagcaaagtcacaaactcaaggaaataataggttacacgtaaataataagaatacattaattaatataaattgagaacaagaagactcaaaagaactcttattaatttacgcaactaagtgtaaagtacgtattagtgatcactaagcacttgtgaagacttttatctaaaattgtatttccttctgctctctaattaagcactaagacaatctctgttagagtgaatttatttgcctgactcgagagttacactataataataccaataaataaaggtggaagagtccgccggtattcattcccaaatccgtcggtatttgcaattaccggcggagttccgccggtattgtcccgccggtaatacttggtcggtattaatcattaatagtggcggactgacacatccgccgatattaataataaatactggcagatcattagcggcgggtaccccaccggcaataatgttaaaataacaaaatattaaatattaaatatatttataaatatatattttctaataatagtaataatcagattttttttttaaaatatatataatttacaataatattaataataaatattaaaatcaatattattaataaatattaaaactaaaattaacaataaagtaagaatttaaaattgtccaacataaaaattcaataattatcgtccacacataattaaaacttaaataaatccaaacata

SEQ ID NO: 228469 - DNA, 1866 bp, Cannabis indica
ttcctttccattccattccatttcattacctccaaccaaacgtgttaactaagaataagtttcaacattactttaaacttacgagtattggagttggatgattttgtggctatcctcctaagtgattcctgatagttttatgagagctaaggtggaatgcggttatgtaactctcatacaactaacataactaacttgctacaattatctgtttcctgttgcagctagtaactagtaagggtatgattgacgtttggtttaagagttttgggctatacacttgtctcagacatcagttgtggattataacagaagactgatattaagagagaaacatagggaaacacaatgagaaaattgtaatggaagtgagaagaaaattgtgaggttggagtgtttgatcaagaactccagtgtaaaatgaatctcgattcttgcttgagattgattccctaagtttttgtgtttagattgaattttctacgattataggttgtagcaaattcttcattatggtgaaacctcttgagaagaaactgcagtagaccaacttgatattggttgaaccagtataaacctggtgctattctgtacttgtttgaacatttattttcgttgttttatccgtctttcttgttttgttctttatgtgcgatatattgttccaacattgatcttgtttgtttcaatactgaagatgattgtgttgctcatgcaagattttgcatgctttgaatttgtgcgtgttaccatcagattacaacactaactaacctttctttagacagaaaaagactagaaacattagcaaaaacagttccaaaagccatccaaaactctcactcttaaggcctcaaaggagtttcctctcaaaaaacctgacaaaattatcacaaattaaacttttaatattacatctggtaatacaaaatctcataaggccactttattctctaaaaacatgaacattcaaaaactttacaaataggtaagacaaaagcttgatacccgcttggcagaaaaccaattattctgtaaatatactctagacatgttcacaaatgtcactgacttagaaggtgaaaacagtatgagatggagaaagacatgttctcactcgattttccatgatgataggggtggagtttcagactccttccaagttcctgcggaaaacccgtacctgtcaccctttaccaagtctgccgaagcataagattcaagctcagccatttcctctggtgtcagtttcactgataaggctccaatattttggttcaaattttcaatcttggtagttccagggatgggaactacatcatctccttggtgatgaacccaggccaatgctaactgcgcaggagtgcactcctttctggctgccatttcattgactttctcgaatatagtcttgttatgctgaagattttcaccttgaaaccttggaagataactaaaaaagaaaaagataaaagataagcacgtgctatagaaaaatgatagtagataagattgcaatcttaggaaagacaaaaataagaatatctaccacaatattttctcaggcatgttccaacagatgctattttgttaggtattaaacaatatgtaggtttcagaaactacaagaatgcacacatgattcatgcttgagctatacagttctgtgtggcaatcaacaaaccttacgaaagtcactttcatgcaaattttctacaaagttctgtccagctgaaaggaaaccgcgtccaagagggctgtatgcaacaattccaatgcccaattccctgatacatacagaaaagagcatattagattgtgttgaattactaaccataaaagaaatacttgtcatttccagtaagt

SEQ ID NO: 228470 - DNA, 966 bp, Cannabis indica
taaaattggttatattaaaaaataaaattgttaaaaattgagctcatggttctatttttagcattttagaaaatatagagtctattttgttatttaactaaacaaattatctaattgataatttttgcaaaacacgagatctaaaacaagactatctcaaagtgttgagagacttagggcggaatttaaaatgagacctttttttctttacaaaaacataaaatatattatgatgtgatgtgatattgtgtgttagtggatcccatttactacaacgtgcaataggccatatatattgagcattgctctaccatatgggttgttaacttcgtatcaatattttgtattaaatcatgaatttgaatttgatattaatttatactaataacaacatgctatttcttgtaatatttagaactataagatatcatttaatattcctcttatgtattaggctaattaaaaaatttacactaatattaacttgtaacatattatattcttttaaaattttctggcctctaaaaattcttcttgaattattaaaattattagatttaaatttttttatctaattttattaattcagtgactatccatatactaaatcatgctacccaaattttgatatcaaattatgtttgaactttaacatgcaccaaatgataccccttaaacttccatctatgttaggcttttcttactaaatttagacaaaaatctttaaatttaataatttcaatagttcgggggcattttaacaattttaaaagtttaaaagacatgatttaatacatttcaaagttaaaatgataaaaatcttaattagtcgatatattcttccatttgagaactgttatacccgaaattcggctagcacatcaaaggaggacacgtgttaaactggggagaatacgaatcaacacacgtaaagataattatatttgaaatggaataactcgttaa

SEQ ID NO: 228471 - DNA, 947 bp, Cannabis indica
tttttaaagatttatttatgtaggctaataatattgtgccatgtggacaatatcctatgtacacatggatagccaacttagcagttaactgctaaaaatagacagaaagggctaaatgctaaacgaatgctagttttgagagttttgccattaaaatttaaattttaaaagttaattgctactaaaatataagtattaagggttataccgcaattaacccttattattactattattattttattttttgatatttactaaaatgttattctggatgctaggtcggccttaaggtatatagtatttaagataattaaattttgggacctataaatagtttaatagtctactctcacacagtaatgaaatttttaaaaaactcttaaagtttcaagcttggatcctctataagcacacatttaacatttctaaaacaaataaaagagtagagattagaaattgatctattgatctcatagtttgaaaccacattatttatcacactgaatattaatttgataccaatcatatttctttttataatttcaagacttgagcgttcagaggcccaagatgcagaccttggtcacctcaccttaaagctaatcctagatgaaaaaacaaatggaggaataggagtgtatcgaaataacccttatattgtactgtagattttttattttgggcaaatcagaattgtatattgctcaacaaacatcatttacattcatatagcatcataaaaaatgcttgctttaaatttactataatctagcaaatcattaatatctattaattatatatttttttagacgtaaaccctttattttttacatctagtttcattctctttgttagcaactttaccataaaagtcctttgattccaaaatgcttcattttgacatgaccataggatgcaacaatttcagtagccgtggaaccgtg

SEQ ID NO: 228472 - DNA, 1283 bp, Cannabis indica
atttgaggcctatgacctaagtaaaaaattttagacctttatacaaatactattatcctcgaatattgaaatatattgtttggtgtggtggtaaattggtaatatattcttagaattcaaggatgtcacatgttcaaattttattctttttatgattattgggatttgaacttagacaattaataatgtaagaatatgattacaattaaaattcattttaacatatttatgtattattttatattttgatatagctaattctataattttatgttgatgttcacataatataaaaataagtattgctgttaggcactatgatttttagtcttcaagcaacgaaacatccgtgtgcaaggctagctctatgttaatttgagctttagacaaaaataaaaaatgggaccaatagaaaagtgaagttgttgggatttgaacactaaactctttacatattactttaatcaaattaccgctgagctacgacatatatttagtatattatgagtattattttttaattttttaataactatatcttaaccttctttcaaaatgtgggccctgagtggtgggggcctaagacggccgcctccttcgtctcacctcagggccggccctgcccgcgtgacaccttgacttctctaagctaaggccaaccttccaactattcgagtaataattgtttcatttttttctcgtgaccatctgtctcgtgcacactttcgtctcttgaacaaactctcatcgagtcatgcttgcaagcattcatgagtgcattcatgcatcgagactctctagccaagatacttacactatccataggttctcactatgataagataaaatccctacacacgtcactcacctagtcacactagtgaccaaggtagcatgtgtagccagatgtaaacaccaagctggtgtgccaacatctctagtcatgccccattcgatactgttcgaaaaatttccctcatggcccaaggactcccatacttccatgttccattcctcacagtacaatgcctccatgcatgcctgcatgccctttagacaagctcaacgaataacaacctatgtcatctcatgttgagacttggggccaagatgcaccacgtctttacaagaggtttaggtcatgttccatgcaaagcggcatacctaaaatccaatagaaacgtactagcactacaaaaaatcttacttttagtcacacaaaacttgtgactaaagagtaaaaaaattgtaactaattaataattagcattcttatgttgtga

SEQ ID NO: 228473 - DNA, 826 bp, Cannabis indica
caatttaatacccttttgatacccataacataattggtcacttaattttgtatcacactttataatagcatatacattatacatatgtgcccacataggatttttaatccaacaataataactaatggttttaagtatttgttggagctcaattttaagcttttagctattttttttagcttttagctattataactcatttgttatgagtgatctaagaactcaataggatatccttgaagattgtaaccctttatttccttattattacaaacagggtgatcaataatagaattaccatcctttatagcaaccttgaggtgataaaattattgggattttatgccctaaataaaactcgttttgtaaatctcctagtttcaaaatttgagcttaaatgttaaatcttatttttcatttaaccatatacaattatcttctcatctttaaaaaattatataaaataaaaaaattaataaaaattcttcatccttcgtcacattataatatactgatgagtatatttatattgtgagagttatattggagaggaggaatattgatggtaatgtataagttgtgaaaaaattactattttcttagaatgaatgtttctgaattgtaagtattttgaaaaaaaaaagataaaaaaaaagtcgataaaaaatatgtgaatacttgcaataatctaagtgtgcatgaatagtaagctaaaaaaaaggaaaagatacgatattgacttgatgtagggagtgattggggagcataaatgtaaattgttgaggtaacgttgtatatgtatattatggtgtgattcgagattaaa

SEQ ID NO: 228474 - DNA, 2777 bp, Cannabis indica
ctcaatgaaaccttgacctatctccatcaaggtgatgattctatgagctcttatttcaccaaaatcacagcaatttgggaaaaaatcaatcaactttgcccacggttaccctgcacttgtgctgcagcagcttaaaatcataatcatctaaatcatgatcaagtcctacaatttctcaaaggcctaaacgaaagctatcatgccattcgtgaccaaatcttgcttcttgatccatgtccccctcttgacaaagtcttttccatgacaatacatcaagagaggcaaagaaccattggtcatcgcactataccaaccttttatgctgctacaactcccacaccagcagcttacgatcatgcaccagcagcaaatcaagcatcaagaaacaaaaaaccaagaccaatgtgttctcattgtcaaaaaccaggacactacaaggataaatgctatttcctccatggatttccacctggatatggaaatcgaaaacctgctgatgctaccaacaacaagaaatctgatcccagttcttcaaaccgaaaccctcaaagcatgcaaatttcaaccaccaatactgatgcttctcagccacaactcactgcctctcaatgccaacaaataatttcaatgttggctcagcaacttcagcccacatcagatgcctcaacctccacagatgcactaggtgtcaataacttgacaggtataattcccccttctttcaattcttggacaattgatagtggagcaactcatcatgtttgctccaacttagcatgttttcattcattcactaataattctcatgctaaaactgtcaacttaccaaatgggacttctgtcaacatagaaaaagtgggcattgttatcattaacccaaatttaacacttttcaatgtgctttatgtgcctactttcaaatacaacttactatctgtgactgccttattaagcaacaactccaatatcatgttttttgctgctattgtatgttacattcaggaaccttctcggatctcgaagattgggattgctaaaagatttggcagactttactatctgcaacaagaagacatttcagcttctaattctaatctttcttgtaatatacaaatagacaaacacgaatggcacaatcgccttggtcatccatctgtaatgatttcaaataagatcaataaacatcttaattttcctcataatatttctcccacttttcattgtccaatatgtcatttagccaaacaaaagaaattaccttttcaatcacacaataatttttccaaagcaaattttgatcttattcatctcgacatatgggggccatatccaacaccatctgtcgaaggttataaatattttttaactatagtggatgaccactcacggttcacttggatctacttactaagggccaaatatgaagcattacaaataatccaaaattttttcatgtatgttcacactcaatatcagacaactatcaaatctgttcgtagtgacaatgcaaaagaactcaatttatccaccttctttaccaataaaggtgtcattcactacaattcttgtgtaggaagaccccaacaaaatgctgtagttgaacgcaaacatcaacacattctcaatgttgctcaagcattagcctttcaatctaatcttcccattgatattggagttacatgatcaagatagctgtgtatcttcttaacagaacaccttttgtcacccttaaagataaaacatcccatgaaatattgcataactcccccccaattattcacatcttagaaattttgggtgccttgcttatggatcacacatcactcctcttcacaaattttatcctagagcaagaccttgcatttttattggatatccagagaatatgaaagcctacaccctacttgatatccaaacaaaccaaatatttcattctcgggatgttgtcttctatgagtccatatttccttacaaaaactccaatccaaacaccaacatcgacattttttcccctcaaattcttcacctacagtcgcatatgactcaactccacctactgctccagattctccacaatctggtttacaccagaatccaaggacttccaaatttggaagaaaaatcataccccctgctcatttacaagactatgcatgtacaactacttctagcacaccctatcccatttcaaactgtctctcctatcataggcttagtccctcttttcaaaatgctattcttactataacggcaataccagaaccaagatcctatgctgaagctaaactccataaaatatggaacacaactatggataatgagatagatgctctagaacaaaatgacacatggatagttgttccattacccgatggctaacatgccattagcaacaaatgggtatatagaaagaaatataatcctgatggttcattacaaagatgcaaagccagattagtagccaaaggcttcacacaacaacctgacatcgactattttgaaacttatgcccctgtggccaaattcaacaccttgaaactacttcttgctcttgctgccataaaaaattggcacttacaccacatggacataaataatgcttttctccatggtgacttacaggaggatgtttatatgaaactacctcaaggatacactccaaaaggagtaattccaaaaaatgcagtttgcaaactaaagaaaagtctatatggcttaaagcaagcctcaagacaatggtatgcaaaacttagtacaacattgctgaaacaaggttt

SEQ ID NO: 228475 - DNA, 1297 bp, Cannabis indica
ctggtccatgaaatggagaatcgatagctgttaactccaagggacgacataatttttacgtcttcccattttgaacatcgaaaaggtactatattataaatgaaaattaacgtaaattatgtataatcgtaagaaagtgacactatatactctcgaaaataagaagttatttgtgtatgaacataaggccaattctaatagaatcagaaatgtctatattagtgtttgttactaagtgaggtcagatcgagttataaaataatatttatggagaaaagataagaaagagtgttcactattagcacaagtgccacgaatttctttttctctattaatgctgtgtagatttgaagtttctcaataatattttttaaataatttaaatattggggctggtgacctacctcatacacacatctatttcataattaattctttcaacctcaaaaaacataacatatatttcatagtatgagtgatcatggatggctcacatatgttttaatttattaattggtggcaatcacaacaaatcacaatagtgacgacagctagaaagacccaattattacagtgtacagtgagttcatttttaatttgttctttattttaccttttccataactaaaaaccctttaatcaacttaactatatttatgtttactacttgttctctacactgattctatctcctaattggtctctcttccagaggattggatcaaaatcaactgcgatattaaagttggttgtgatataatttgcgtggtggctttagctaaggaccaccaggagttgtttttgtggatagctaccaacatgctcaatttctcaaatcctctcattaggaaagttgcggcgtgtttgttaattatgaaatcagcaatctactggaagcattcttttgtgttaatagagaatgactcagaagcgattatcaacgctttaaaggaaacatgttctctttggagtattactaactatgtactacaatgtaaacaactctttaatttgttttgcagttgtaatttttcttttatttttaaaatatgtaattttgcgacccataatgtgacttagtggcctctcgcttataatattactggtatggttaatccctcatatatacctgataatattttatgtagtggagtgaagtttaaacttttctaatattgtttaatatatttacgcagctttttaaaaagaaagaaaaaaataattgctaaaaggtaatacctagcacacctctcggtgtcaaaataagaaaatatcgctaactaagcatcacttatag

SEQ ID NO: 228476 - DNA, 1540 bp, Cannabis indica
gatgttaatgaaacatacttggtagtaaatctagatcctggtaaaatatttccaacaagtggtcacggacacatgctcaatagggcatgctcttgcttttccatccttactttaaaagggtggttaactactataagatttgcttggtgcaatttactccaaagacaatcaaatatttttctgtgttgttcattctgtacgtgaagcagcgatgggggattctgtcccctcgcgataccaattggctgtatgccttgaagtctagctcgaggcataactgctcaagttactttttgttctctcagttggatcgtccaggactgatcgaaactaatgacatcaaagtaacaaagataggtggttacataaaagactataaaattgtctagggaatggatgtcgaccacctaactggctaagttgtattgcgtcctcatttcatgctggggctaagaacaagggctcaggccattctttggattttggacagggctcaaaatatttctttgttaacctcaagaagaaatattatttggtacggtctgtacccttctaaagaggttgaggaagaagtccctacggctgaggcccttgctctttaaaggaatgtgtcggagaagtaagagaagagccaagagaagaaacaagatttggttaagcagcccattttgataagggaagtcactgaggaggttgtacgtcctgctgtgtaggctgttcctaggaaagggaaagggctaatcgaagaagaattgaatgaggattcttcaaatgatgctgccctttcattcttagtccgaaaaggttcctctctatagatccagggtagaattttgaaagcacttaccttgcttatagttatgtatttttttataaatattggccaagtacttttccctatgcaaccatgtcatccaagttaaataccatgcttaagaggaaggctagtggttcttcgagataggagactccaagtaagctacaaaagaaagaggacaaaggtcttcctaaaaaggatcttccaaaggctctacctccacctcctttggctagagaggatgacattgtggtaatcgatgcacatccttccatggcaaccgtaccgacccaaactaaaaagagtactcgaccccaacctgctcctcatagtaaaaagtcaaaggaaaaggagtttgtcccaatagcctctataatgaagagggcaaaagaaatggtcagttgttatcaagaccgctataacgcccaacttgtttaggcatgcaagaataattttctaattactgtgaacgccttttttaatcaaagggtttataaaaaaatgtgctaagttaaaaaaaaaatcaatcaaagttacactttaataaatacatatatttttacataattttcgaatcccgttaaaagtttacaataatattcaaaatatgttttatacaaaaggtgtcgcccaatgactacaaaatatgagcccatatcgtccaaaagaaacgaacactccagcttaactatcttgatacgtgcaatcaccccaagctctaga

SEQ ID NO: 228477 - DNA, 1371 bp, Cannabis indica
ggagatgtactccaagaatacgaacttcatctttaccagctccaatgatatatgcactggccattagagccctcagggggtacccaatacacaggctaccatagttgttcttgctcccaaatcagagaatccatacccacccaggttggctccaccacccatggatggctatgtggcgactatctctagaggacaaaacattgtcggaagcacacacaatgcacaaaaaagatacttgaacaagctagatcataagggagaagtgtctgcccctctagcctagcattcgcgaatgatgaatatttctatcaccttcatagaagaagatgtcaggcatgtacacttatgttcagatttatgccctaaaagtaagtaattaatgaataatatattagagaatatatgaaatacaattataagataaatgatgcattaattataattgtataattattaaatatctaaaaattctttattcatatggagaaggtataatcttgtaaagacgtacaagagaattaagattatacaatatgaataaaataagtcagcagtgtattaaaacaatgagaatctttaatatagaactgttaagtacagtttactatacactatacttctagtgtgcatgattttgattagatcacatatgtggatagatatgtggtaacagtgttgtgtataatttaattatgcataactatggcaatatgtcataaacatctttcattaacatgtcgtttaccatgaaagaattattcatatcacaataatgaacattagtagatcaacctgaaacctgaatatacgtgaactcctatttgtgttcattgagttctttgattcactcgttaaagtttctcagagaaaataattcttacaacttttattttgggagcttaataacatgagtgactgggaacatgttatacaatagtaaaatccaagcttgcctaatggatcgaatattagttctcttatagtgttaattcttggagtgataacagttggatccaaatctataataagttatagattaactgtttacattgagttaatggtacataagaaatcaagagaattagaagggtaaaatggaattttgaccaattctaattatgaactaataattgaagggtgaactacttatattggttataccaatgggctactagtaagaattctgtaaatataattctatattatcaaagagtgcaattccatatctataatggaataataatagaattaacaaacttgattattctattgatgagatcgataattgttgggttttatgccctaaataaaacccatttcaatataataatatttacttattaataaagatcagaaataacattttatgtt

SEQ ID NO: 228478 - DNA, 1573 bp, Cannabis indica
aaaaaaataataattatcttagagattttgggttttgggcggtcagcgtgggtgatgtgggttgaggggggcggtcggccgtgggtcacttaggccggtcggccgtgggtagtcttcatgtgtgggtgtggcagcgagcgagagagaaagagagaaagagaggcgaaagagagagaaggcagatttcaaatggggagtaatgtgggaattaagtaaatgttgtcccattttaccaataccccttattttaggtttagggaaaaaattaccccttaatgtatgcataaaaattcaaatttcctatttaaaaaaaatttatatgatgaaaatataattttaaaatattataattatttttatctaatgcatataaatttatacttttagaaaaaataattaatatataatatattagaaataaaaatttatatccatatatttttatatatatttgtgattataataaactagattataacattatcatcataataaaatcttaacaactcacaacactttaaaatttataatttatcaaacactcagctcaattttttttctaaagttctgctacaactactttttctcacagcacaacgacatttattttttccataacacaactgtaccaaactgggggccctaaacgggtgaggtacatacaaaaattctaaccaaaaatttaaattatgtatttaaatgcaaccggaagttatagttagatatttttgaggcaaatatctctaactataaattgctactaggaaagaaatcttaaggtgcccaatgtgacactctctacattaggcactcaatgtggataatctataacctttataaaagtgacaatctttcttttttaagcttccacatattaaattatcaaaatgtcctcatttctcaactttaatttattatgttgaggttgatctatacaacacatgtggtgatttttgtgtttaactaaattatctatattatatatgttaaatactttggtttaattcattaataaaactaaattttaatttgttcaatatatatataaaacttgattgtttttttttctcaatatggttgtatatattatcatgtgagtgccacactaatgaccatatgataattatattttgttttgaatatgttaagtgaggtttattttacaattaagtacattacaagacacatgctatgctagattaaaactcaacaatggtggaaagtggagttgaagtcaaatttatttgaaatttatggtctatgctttctttttttgggatatagaagattgtcataaatttcttctatttttaaacaatgcttttttatttttgattaaacgatctgctaacacggttactcatagttttgctagagcattttgttctttttcaaattgagtatctaacaaaggtgatattaatcctattgagttacagtcttatcttttggctgatttagcaaattaataaaagttttatattttctttcaaaaaaaattatcgcacgtgttgttccaactagttataattaaaaagggggaaaatagcatagatagatagagatggatcaa

SEQ ID NO: 228479 - DNA, 950 bp, Cannabis indica
atagacctaatccaccttttggagataatcaattccccgctaagtagtagggttccaaaccctatttcaataaaatcacaaggcctacccaatttattaattgctctcgatgccacatataaatgtgtagccctagagtcaaacaatacatttatatatgagtcattgacaagaaactgacctgttaccgggctggttgtaccattaacttaaggaatggaaaacacttgagcaggattggacattgcctcttgcgtctgttcttctctttttgtttgagcgcagtccttcttaaaattcctgatcaggccacactagaagcatatcttctgatttcattctctgggatggtgtttcttacaatgagggcactcagggaaagaataaccctgatgtccacctctacctttgttccctcgaactttttgtatagacccaaacctcaaaatgttgggaaattattccacttttgctcaacattggaatcactaccatccctaccatatccagaagtaggaagagtggtagtcccataaacaattggagtctcttggggctcttgaagaaatttcactacactcttagctcgtagagccttctcaaccattttagcttaggttgttgtatcacttttagtaatcactagatcatgttttatcttggcattttaatctgccaagtatttctctttcttactgaaatctgtgggtaaagccaacttggctaataggtcgaactttgttgtatattccgttacttttgttgtacattccgttactgacatactttctccttgaaccaagttagtgaactccttccacttagcattgtagaccccttcattataatacttggcattgaacagctcccaaaactcttcccaggtctttaaagtgacgtctcgagtgagggataccaactccttcaacacaagtgcatcttcctagaat

SEQ ID NO: 228480 - DNA, 708 bp, Cannabis indica
ttgagggtggcccagatccactggaggcagagcagtgggtaagtatgattacctctatttatgactttatgcggattggacagatattttaattattgtagaaattagaatgcatatgttcccatgcatattccttttgtaaaatatatattattattattttatggaattcaaattaagagccaatttgttctcttattttgttgctaagagttaggttggctaaaaaaaatttaaaatcctaaaatgagatatacttcaaagaccgaaaaaaataagttaaagagtgaaattgcacttataattacttgatttcttatcagttcttattttgagtatattaaaaaaaatattaaaattacttgcaatgcaaatagtttataattgatcaataattcaaattcgagaaaatatttattaatacttaatttcttaataactataagtttataaatataggtatatatattatttgaggggatgcaatcttaattttaaatacttaaattttttttattaaatttaaattaataaacaaaataaaaataaataaaaatattactaactaaatcacataaattctctatttttttattataattaatatccattactatattaattaattattcgaaaaaatcatatttgttataaaataatataatataatataaagtaaatgagaagaaagaagaagaagatgaagag

SEQ ID NO: 228481 - DNA, 2060 bp, Cannabis indica
aaaaaaaatgatgttcttgttttctcttaatttctagtagtagtctttttgttttgaaaggctaatgttcttatttttacttaattagaaaaattgaaaacagtgctggtattccgttatggaggtgacggtgatagtgtggagactaaacgacagacaatgacggaatataactgaacgaaatttcgtgatcgacgttacagttgacgtcaacactaaactgaagcacatggccacgccttaacgtccttctcaacatatatcctaaagtaaacaatgatattaaaatatcaattaaaataaggtacttttagctaccaataattctatttccaaaaagtatatatatatatatgaagtgaaaattattacggtggtcaacccaattatgctatattattattgctactattataaaatatgatagcttggaatataatgatgaaaaagttgtgatccacaatagaataatattgtttgatgggttgtaaaaagattaatttcaagatgtaaagtgtttttgatttgtagtactccaaacaccttttgaaactacttaaaatcaataagtaagaatacataattagtcaattcacttgagaaaaacaaattacaagcctcacaaagaataaaaattaaattataattaagcgcccgacgtgagacaaacaaacattcacgaatcagtacgtaagcttttatatggcatatagcgagttggatgcatgtttttcttttcgattattatttattaattttgtaatcacatcttgtgtatgattagatcgagttaatcaatttgttcatatctttttttttttgaaaacagatctaatatatacttatatgatggtaaaataatacgtttggaattagtcatattgaaaactaagcaatttaaaaaaataataatttattaataaaataaataatagcttacaaattattctaaaatataataacactaaataaaatcatctacttatatattattattattaattttatttattaaaaaataaaagtccttcaaatatataaaataaaaattaagtctattcacaatattattaattattattgttaactcaggaaacttttttcgctgacgtggacatcaatttttgacacgttgcaagaaggatgacgtcacggagttgagtagactcgagtcatagcagttgacttgggaggggaccctcatcctgcgcccaggttaatttcgagagctccgggataaaagtttggacttcaataactttaatccaactcactgcctcttactattataccatgaagtcatggagtaacctaatctaagccccgagagctgaaatgacacaaacctgtaatctaaacttgggaacctagggtttcaccaagtgcctagcatgacattctcaactagggtttcagtttctgggattgtgttagtgcaaaagggtcaaaacatacattggtacataaactagacatatcacggacatacttgaggcatcagaataaaaatcagagcaattttatttttgagcatatagggccctaacgcccaagttgacaattcgtcaatctgtgcatcttccaagtatcagatcgacaatctaacttttgcatcttcttcatcttcatcataaataggaaaataggtccttcttgaagaagaaacaacacttcatgggtgccaaaagcaaggcccaacccccagagcgttctcgtgagaaataaaaactagaagtagacgtagctctattactatcgcgatacagggagtgaactactataaatttattgtaactcttttataattacttaactacttttttattctctccaatctagtgagcgggtgtggcttagaagtctagtcccgatttttgattcaatattttagtactttcattgagagccacatctcaagaaaattacatgcaagatggttgcaacacgttctataagtgttgacagatagactcatatagctagccaaacagttgggggcacaatagttgatggagttagaactaagactacttttacgccccaggcgccaggagcaggcc

SEQ ID NO: 228482 - DNA, 1044 bp, Cannabis indica
cactcatcacatgcgttggtctctctaaattttattaattcacaatatacacacattcacaattacacattccattgaaaaacaaaacaatatgcgttggtactcagagcaagaatcatgctgtagaatcatgcatacacaacatacacacacatatatttataatcaggagcttcacccaagattatttctaatcatcaatgaaaaatattgttaatttatgaattgagagagccagccagccagtcctctttttctttctactattttctctttttactcttaaccttaacaccagtcagaattcgttgcttcaaaatgagaaatcgacaatgaaagcttaaagcttacctctaatagaaagatttgaggaggaggaagaggcgtccttgtcgtcgttgtctttcctccttgtctccgtcgtcgtcgtcctcgtcgagagctgtaaccgatcgaagagtgctgggtgggtttgagggtttcaggtgtgggtttgaggagggttaagggtttggacaaaagttggggaaaatgaagagtcgtgggtttgaggagggaaattaagggtttggattaaaagtggaaaataacacttttgtcttcattatttatgtaatgaccgaaaataaatgtctccacctttgtcttcggaaattatattagtaaatagcgaagacaaaagtgtatcccgcataaatataaacacttttaatttcggttatttataaaaaccgaaaataaaactaaaatttcacaaaaaaattgatgaagcaagtattaaaatagttttatcttcggaattttaatttattaaagaaaaaaaacgaaaataaaagatatatttgtagtagtgtaatgaggtactgaatgatgtgtgtgggcacttctctctcactaggaatttcgaaattttctctcttattttctctcttgatttcgtgtgatacacaatggaaagcaaaatttctcaagcacaagctcctcaagagaagagagagagggcggctataaataggaaaagggaagaccacaactttccaaata

SEQ ID NO: 228483 - DNA, 1209 bp, Cannabis indica
ttgcatttggtattgaggttgtgcagaatattttttagtttttttaatcatgtttttctttcttttgtttgatttgttttagtgttgttttacaattgttttgccatgattatttatttgacgtcgattttattatttttaatctcaccagaattaatagttgtttttcgattgttctggtgttcctgtggtgattctgtccgtgggtgtggaagatagaggtctctatttttttttttgtgtatacagtaaaaaaaagaaaaaaaaattggacaagacaatataaaagttatttctgtcgtgtggtaatatttttataaagattaagccaaaaatcaatatttttataaattttcctagttattgataatgttttaaattttactgaaattaaaattaaaatccttaattaattatatatgcatgtgttgtggagctcaaaaaaaatgaaatccatgcatgcgtgatttttttgttttcaattattgtcacacgatattgaataattaaacatattatttaccatcttcatctgtcactgctgagtttgaaaaacgatgcaaatcaatggttaggaaatgttgttttactttttatcattaccttttaactcttacccttgtcatatatatacactacaagaaatatcacttttaccagcacagttcgctactgcgctgataaaagttacttttaccagcatactttgcaaactgcactggcaaagaggttaaagttttaccagcgtacatttgcagtagctagaatctaacttttaccagcacatttacgctctgggaaaagtcatttttgctagcgcttttcattttatactggcaaaagttctaatgccaacattgatttgccaacccccttttgccaacacatcacaagtaaattctattttaccaaccaacttttgctagcacaaaaatgtgctggcaaaagtgacatttcttgtagtgatatgagagagaaacactatagtttagcactcttttatgtgtcaatattgctattaaccaaattaagtatcgaatctcatatagttcaatgtaataacttttaaaaagtatcactagccaatcgcaagacgacatatttagaagtaatagacaccattggtatccaataacaatgctcatatgtatacatattctttttaccttgaaagtttgccctaatttatattcattagagcattgtaat

SEQ ID NO: 228484 - DNA, 1438 bp, Cannabis indica
ttgaataaaatgatgtttaaagtaaaatataatattagagtgaatagtaatagtaacattatgattttttagagataattatgaatttttaaagcatcaaataaagttatttactcaagcggcagttgattacttgtttaccaattaggttaaccataatgctttcagaaaattaggttaagcaaaatgtttcaaagtttcctcgttactacttcgccaaaaaaaaaatataaaactaaaaagaggaaccgttggatctcatcaacggcttaaaacctccgttggaaaaaagggatcctgccctatatatagcgataggtaacaacacaaataatccacagccgctagggttttagtgcataaaactgaggatgaagaagaattctcagcgagcttggtctctcccatttatatctcatatcatcatcttttatttatttgttgggttttagtatttgatatatgctacattgtaccaagaaaagggttgaacagtacctttgctcttgatttgccaaagtggctgtagctaaatgaaatagaagtttactggccggttgttgtgatatcagtcaacaaatctgcttaccgaacttcttacatttctcaatactattgttattaatatatattgcttatatgatttgttgatgagaaggaaagaaaagggaaatgacaagatctagccatttcataaaacccttctcttataaaaaggggttaccttccaggcaagctgctttgatccccagctgcttgcgtctattggtgcctacatccctttctttaggcaaatttgccttgtttattcttttcatctggaccattagataaagactggggtttgtgagtaccaaaattaaaccttcacaaaaatctcccaccaattaaggattttttaaagtatgcaaggataagtagtagaaagtcttggtcttgctatataagttttacacaaaatgcttttatgaaattgaaatagtctctcacctgggttcattttgagagatattaaaaggactatctttcggatttaatgttttaaacatcacaaataaaacaaaattggacgagtgttgcaaaattagtgctaggatgcatttttttttcaacattccagaaagcaaatattacatgcacaaaattttatgcgaacaggcataaacaatttacgaacaaaattttcgtaacaaatctcaaatatcgaataatgcagcagtcaaatttcctactctcaaaatctatactatacaggtcttatttgttctttttgagccattatactcaaaacaccaaacatgcatttttttttttttttttgactaattagaattcttgctttgacatataccaaatttttttaaacttatttttttaatttaacgaacagaaagattcaagcacaaaatttagaatatgttaaattttaagagcaaat

SEQ ID NO: 228485 - DNA, 2311 bp, Cannabis indica
taaagaggggtcgagaattctgggttgcacaagtgctagaagagtaaaaaaactcactaagaacattctctgtattaaatactatcataaatacacagactcgtggactaaggctcattaacgccccaaccacgtaaaaaatctccttcttaatttcttacaactctccaaattattattattttattggttgccgaaaacctcggtcaacagtattcattatggttatagtattttagtaaaattgtgtactttttaaatttttttttaatatttatagtgatgaaaataaaatttaaataatttattacctttatgcttcttctatttttttcacccaagtaaaaaattctattcaaaatctaaatttaacagtatatactattcacaattttttgaaaacttttatgaagtctattgttatgaatcctgttataaaaaataattcaaattaaaatacttaaattacatcaattaaaaaataaaaaatatgtatgggcaaaaaattgagaagagtcaatttatcctcttgccctttcataaatctacctatgcctaaaagtgacaccttattattagttagtaatattttataggatattatgataaattataaaggacctagtacttaaatgtaccaagaacaatattacacgttggagggtgctaaattactagtatcctttgacatttctctctttataaatgttacgtaaacgttgataaaaaaaatttatcaacaacaaataaattatcttagaataatttaagattaagaatttttttaattctatacataaaattgattttatttacacaaatacttatactgacgtagctgtactacgttgtttaagatgaattaatagtagatggactaacatccgttcctttatgtataggcagaatcgtagagatatgttatctccatttagtcaaatttttggcgtgtacagtacatgattggcggagctaattacatgaatattataaagtcttcaccacatttttttttagagaagaaaagaatgttcattcaaagataagatatttgggaatcacaatcggggacccctccctaagcagctaatcttaaagtcaagaaaatgttcattggatctagcagacttgcatccgcctcatcattgtcgtttctatttaaatggataaaattataacatataaattcctccatcaaactccaaatctcataattcgattgtatttaccacgtcgaggctacgacaaaaatgtacagttgtgcatgcatgactcattcgtcatttcctctcattaaaactatagctcctaattaagatttttgttgcaaagattactattgggctactaataagagtggtattcacgtcctgcttaatggacggttatactctctcttttaactactttataaggattttataataattttactttcttccttcttcaccttcttcctcttcttggcttaataggtgtcgatatttgctgcacacacttaccacttgtcctacttttttatttttgttttatatataagagggaaattcagacactccttttacggtctcactagtgtgtctaatatcaaaaaatataattggtgacaactattaaatgaaagatttttgtggtaaggcttgctgtagagaatcaaaccttagtaaaattggggtgcacctatacaacctctaaattattatttgattggcccatataactctaatgcacagtaaataatatccctaaaaataacaatatctctctctatttcggtctctcttcatcttcttcactctaagtcaccgacggttcctctctccttctccctcagttccggcaccctctctccttctccctcagttccggcaccaccgacgactccctttccctcaaccccacagtccagcgagagatttcctctccaaccctcagtctctcaaataaaaagtatacattcaaagatgaaaattcaatcttgaatcaagatttcaacaaagaaagaccactgctgccatttgactctctttttattccatgaatctacttataattaaaactctttgtttaataaattatagttggtggaacaaagcattaaaatataaatatatatatatttttgccgaatcgaatatttaaaatttattttctaaaaattatattttatgtatttcttagatttgttttctttataataaaattagtttttgagcaatacaactttctggctcataaaaacaattaataagtacaataattataataaaatataaactaataatgtatacatcaacgtatatttaaataa

SEQ ID NO: 228486 - DNA, 1686 bp, Cannabis indica
atttgttagaaattcataccaatgtggccttgtcatgtggccttgctagcaactgtagggatttatcttgtatgaagacaaagtcgtctctcgagtgtttgcttcatgagcagctgctcgtagtactataccaattgttttcttcaatatagtcttccttagagtgacatgtgaggagggagttggaccaattgcttaagttcaacacgtctccattaacccatgggaagtattcataatgttggtcgtcaagatctcaggagaagtacctataccaagcaccttgttcatcatagaaatattttcgagtgtggagtagttcattgatcttcaacctctgaatctcatactcttcccctttgtggtagagcttcccggttcttcccttatgtctgactgtaggtccctttccctttgtagggtcatggagtagtctagagtcattagaattgtgaagagaatctcacagagattagtttcccgcattgtttgaattgcttcgagatgaattacggttggtcctatcaactgtgtgtggtggacctgtaggtatgtgatctcgagtccgagtcctttcggaagcttggccatagcttgtttcccaaacaggcgactgctccatatcaggcatagatcccatagatccatgttctcgagtctaagtcattttggatgctcgctcttagtttgcttccttatggggaatcttaatgcctgctgcttgttgactagtagcttggctactaggagtggtagtgttgctttgcgtgttcatggatgatttcttgttagaacttatgaatttctttcaaaacaaagctttgagcaaagaaatcggattgtagtttgggagcttgagttttggctctcaatgaaagcaccaaaatattgatgctgaaaaatgatcaacaccagcttgctagattgacgagatggatgataagtttaagtaaataatttaaagagacacacaaagtttatagtagttcactccccatgtcacgatggtaatggagctacgtctacttcaagtttttatttcttacaagattatgagaaaattgactaagtgtgaaatctctaatttctagagagaaaaactagagagagatgctttgaccttatgggtacttctgtaaatgtgaaaaaggaactagatgagctcttcttttataggtgaaagaggtcctgttaaatgtgaataaaataattcaaaaaatatagaaaaatatatttagactatttttgactatttattattgttatccgcatttttgtaagcatgccatgtggattctaatcaaggaaggccaaaaaagtcattagcttccctaatccctcaactggtgctccaggaagataaaggcatcagcctcgcagaaagagtctccgtgtaggggagttccctgactgctagccacacaaaaggtattcgtaaacaaaaattcctccttcattccaggagctaaggctatcaacctccgcgaggagcatggattgcccagaggggccactactataaatattgcattttgcgtcagttatggcaacaaaaatattaaaccaccgatgcaaataattactggtcaattttagcatcagttatgtgcaggcgcaggtttagcgtcgatttttagagtatttgcgtcgattgagcactgacgcaaaacatcccaattttttttt

SEQ ID NO: 228487 - DNA, 1092 bp, Cannabis indica
atttctaatatgcctcagagtaatcatatcctttcccattgtgtactgtgtacctggcttagtcatatctctctcaggattttatcataatccttgctctctagatcacgatggtacacatcgtcttcaatttttggaagcccaaaatactcgttaattattgaaggtgagaactgaactagcgtttctcttactaacacttgactctcaggatgcccaccataagcattggcataaaactctctcaccacactagtgtttgctcctataactggttcacacaattattgtcattgtcgagcaataaccatatctagtaaaacaccatcttccgcacttggacgaaaataagattcaacaatcaaactcttattattagcggtccattcctcaaaccttgcttgtaccctggtagtgacaaaagtatgatcaatagtgacttggagattctttctttttttgtcttggagtcatatcaataaatctaaataatgaactctccaaatatattctaaaacaccgactaattattgatacgacacctatcgatcaaatcaaagcgagatatcacccaaaacttcacaaaatcacaacttttctttactttgggattttaccgcacacttggtgcgcgcaattagttactttccaaatcacactcaaatcttctctaatctattcccaaacttaaaatcacttataaaatctataacaagtaattctaagcaaccaagaaccacacccaattcgaactagagcaatctcatcaacacttcacaaataaagtctcaaacttttgaaattttgaagtaattgaatcaaataatgagacttggactattgaggacaccggaaaaaatgaaaatccattggaatagcgtctgccagaaaaagaattggaagaagatttgtgttttgagaactatgaaaaacctaagagagaaaaaataatggggatggggtttaaattttcggattggtattttatagtgtgaagaatgagttttgatatccatgtgccggtcatgtgccatttaagtggcattttttttcttcaaaattcaacttcgggtgttatggcgtctgtccctg

SEQ ID NO: 228488 - DNA, 1155 bp, Cannabis indica
gttcatattagattcaactaaaataatttttacaaaatcaccgcttccgcctttttgactttgatatggactataatatgacacatacataatttaatgaaatctctataattgagaaattataacatatttgtctattttctaataatagggcttatttctattactacacatataattcacaaattactatttaatatactaattaattattaattttccatatctaattatgcggtcattacacattatgtcaagaacctttgtaaagaattgttaaggatgttctccttctttatgttttgtatagtagaggccttcctttcttttcagcttgtggaatttctaccgtactgtgtagtgaaatgatttgtgagctcatcaaacgagttaaaagatcattcgtttaattgtttgaaccataatctgttcctgttagggtagtagagaaggccttgcatctgatcacaggattatttgtttccaacaccattctttgctcaaattagagcacatgctttaagggatctccttcgccatcaaacaataaaaatgttggcatcatgaagtctttaggctttagtttttctacaatccattttgccaaagtatattttactatagtttttttggttgctttgtttggattgtctaactctacaattttttcttgcctatttttcgctataatttttttcatcatttgttctttccattgcaaaaactcatctctagattttctaaaccaaaaggtttatattggattgtaactgctaaccagttctgagcaggatcacattctatctctttttgcttatgtcctcccatttgaaggaagtgtttctagaacgtatgctctgtgccagcaacatttctttgtattggctcggaagcaggctctttaattttggcaattgtcatccttatttcttcatgtacctctttcccattcattgttgtttctagttgatttcatacttcctttgttgtattttaggaaattttcacttgttgcagtacctactgaagtctatcttcgaccaacaatggctatgaattacttgttttccgatatcatgttgcctttatgttctatttgttggaaatattttaccaggatctagatttactaacaagtatgttgaattaacatcc

SEQ ID NO: 228489 - DNA, 2729 bp, Cannabis indica
aagttcatatttagggtgtttatcaacatacttgtgagtagatctaagatcctggtaaaataatttccaacaccaaaagtctaagtgctcttgttagcacaattgggaaacctataacggtggatcaacacaccaaagataggactcgattacaatacgcaagagtgttggtggaaatggaagttactgatgagcttccccggttcattccttacttcaatgaatttggacagctgcaagatcagaatgtgtattatgagtggctcccagcaaaatgtattgcttgctctaggtacggccacaccaaagcaacatgtaggcatgatgaaattgttaaagcaagggtggagaaacagcaggagctggaaaaaaataagcagaaggaaaaaaagggagctaagatgtgaagggtaatgcagaaaaaatcagcaacactttttcagcattacaagagcaagaggaggacagagtagcattgcaggtagctacagaatttaatacttgtgatgtttctttaattgcctatggataacaacaatatttgttgttggaatgtgagggggttgaataaaatggagaagcaaaacactgtttttgaattgtgttgtctgaataaaataggggtctgtggtttgttagagacgaaacttaaagggaataaaattagagagatgatagatagaaagttcactaattgggatttctacacaagtcccactattgagaattgcatattgattatatggaggaagcactttgttcgagtaatttttgttagagaagatcctcaatatgtgcattgttttgttaaattggttggtcaatcaaatgctataagtcttacttttgtttatgggttcaacacaatggaggaaagaaaagggttatgggatgggttgattaatgttaagttgtctgccaagccgtggttgattacaggggacttcaattctctctttgagttggaagataggaaaggaggtaatgtggttaccatgaatgatataagggatgctaatgtgtggcttacgcaaagtcatatggacagactcattaagatagggtcgggttacacttggactaaccaccaggatgggagtaaaagaatttattccaagatagaccatacgtttgtgaatgaggactggacatatgtgttcccaaggactaaagctcactatagctgggagactatctctgatcactgtttgtgtgttatctcgatggtggaaaatgaagaaattggattcaaacctttcaggtattacaatttttgggctgagcattcggagttcaaagaggtggtgcttgaaagttggcaaaagccgatgagaggtgagggaatgacatgcctttatctgaagcttatgcgattaaagcatgcaataaagaagtttaatagaggaaccattggggatattgggaagaagtatcatgaagctagagataattacttagaagctagattgcaagctcaaacacatgctttagacccaatttaccaacaagttgagaaggagactgccacagctttcaataaccaagagaagatgtatcatagtttcttgagacaaagaagtaaagtcacttggttgtgtaaaggggatgagaacaatgctttttttcatgcctttttgaaaaaaagaaggatggaaaatagcattgtgtcttacacaaatgagcaaggggagatagtagatgacttcaaagaggtggcaaggcatttcatcaagcattttcaaggttatatggggacaagctctcagcctactcaaaagctaataacaaactgcatggaagtggggagcgtccttactatggagcaacgactaaacatgataagaccctttactagtaaggaaatcaagaaggttttattcagtatcccagactcgaaatcccctggacccgatgggtttggagctgggttctttaagaagatgtggccagaattgggcatcaagttcactaaggctgtggggaattttttcacaacaggtttcttacctcaggagtttcatgccacaatgataacacttatccccaagatggagaaccccacaaaagctatagactacagaccaatagcttgttgttctactgtgtacaagtgcatatccaagttattgtgtctgaggttctctcaagttcttccaagaattatagatcagaatcaaggtgtgtttgtgcaagggaggtctatagcgcacaatgtgatgattctccaagatctcttgaagaactacagaagaaagaatacatctcctcgatgcactctcgaggtggatattagcaaagcgtatgatacagtcaactgggatttcttggaagatcttttgaatggttttaaactgccaaccaggttcatatcttggatcatgacttgtttgagatccacctcttactcgattttattgaatggaagagttcaaggaagtttcaaaggcaagaagggattgagacaaggcgacccactttcccctctcctatttgttatgataatggagtacttaaccaggaggcttcacttagcagcgaatcagtcaaaattcaggtaccatcccttatgcaagagtctcaagttaataagtctttgttttgcggatgatttgatgattttctgtaaaggagatatatgctctatccgagcaatcaaagaggtgctagatgaattcagtgcaacttcggggctagccataaacaattgtaaatctcaactctactttggt

SEQ ID NO: 228490 - DNA, 3447 bp, Cannabis indica
atacccactttattacttgttttaatttttacctctattttcatattctttaagatatacccacttttatagattagactccttaagttaatgtaaattatatgctagacttaagtagagagtgagggtatatattgggtaactcactcaaaaaagtagttatattttaataaaatataatatgaggatattttttattaatggataaaaaaagaggtatttttcaacttatcccaataaatttaccttaaaaaaaactcataattttctaaacataacagaatctaatctctctccaaaattctctccacgaatcactcctcaaagtgacaatcttcttctgcgaatcactctcatcaacgatgtctctttcatctgcaattatctctatgagatttgatttcaaaaaatcataaaataattcttcttctcttgtttttccaccattattaactgctaccgatgatgtcgagtgaaaacgaccatcggctatcatcttctctagcttcggtgacctcagcatttcctcccaatcatgctcttcagcgacaagaacttgcaaaacaatgcaaacatgattgcttagacaagaaaacagagcttgaagacaaatcgaaatcaaaactgattatactatacaacaaattttcaacaataattttctcaaaaatatcataaaatcaggtacacacattaaatcgtctcaccaaaatggttggccgaggcaaaataaaataggtagatattttatgcttcagtggataaccgaagctaaaagaaaataattagcgtgactctaaaagaggaactgaggaaaaaagtgtaaaatctaaaaattgtcttttacattttgcttcagtggaaaaaagatgtcgatttctttggcttcggttgtaaacagaggttaaaaaatttacaactaatatccaccaaagtaaataatttaattttgtaataaccccaatttttttaatcagagtaataaacttgactcattttgagtgtttaaaatacccattgcaaaaccctagcaccgccaccaaatcttcttcttcttctccatttcgaaccagagcttaaaatcgtcacctctcttcgttcgccgattaatcctcacatcaatctataatccatagctacctacactcttccacctccactaaggccatggccatcgtgagaatcctccaggctcgtcctatcaccaccgtttcaccatcagctttcgatgtcgaagctgctgctgttgctccaaggaaagatttcgttgttccttctccagctaagtctggtaggaagatcgagatgtactctcccgctttctacaccgcttgtactgccagtggaatccttagctgtggactcactcacatggctattactcatcttgaccttgtcaagtgtaatatgtaggtacgattctctcagatctactgtcttaatttcatttgatatgttgttgatgttaaaattattgctggattagatttgtggtgatttgttttttgtttttgtatcgtgtgagatcccaaatgtgtggaattatgtagatcactaaggtttgggtgtcaatttatcgtttgatgagatctgcgatcgatgttgttttcttgctatatgagttcaatgtatcaatatattctgtatttttgtcgatctttgtctattctaaaaatattaacaccgcaatttgatacgcttaaagcattttgatcgcagagtcttttttcatgtttgtgttttgtcattctcaatatttgaataatatgaactgatttctaggtgttcactgttgaatttataacacaaactttggttcatttttttagaaaagattaaattctagccaattaacagaacgtacccgaagtgctacatctatggttttgcttcctcaatctttttataacaaaaaactaatgcaaagatgatctataaaattagtactgattttacaatttaaaacaatatagtgcctaaatattttgagtgagtgatgtgtatttttggtgcttaatgttgatatgattactaattttacaattttggagtaatatagtgaaggggattatgagtctattttagtaatagagttacatagcacatatatgggaaattttgtaattagaattaagagcatggatgagttgctgattgtgttcatttttataatttaatttgtctcttcgtttagtgttattcatatttaaaaccttttcagtggaatgcttgaaacatagagtaaagtagttgtgattatatttataaataaatttaggtgactaaccttagaatgttttagttatcatgcataatttggagttctaaagtaaacttaattctgcttccctttcctagagaaggaaggctctgagggaataaatttattattattttgtgaaatcgtgtgatggttttagttgtttctgctcaaaattgtttacatgtcttttttcttgaaatgtttctttttatgtgttgggtctaccccttatttgttgggcttggactaataagggctaaagcccatcttaattgaaataattaaaagaaaaaaggggaaagtagcatgtggtatcgtgagcagaaagaaaaggaaagaaaatgtgaggaaaattagagaaagaaagctcaagagagaaagaggttttaccattttgcattgaagatcaagtggtcgattctcatcattttagcttaaattttggatggtgaatccttgcaaggtgctcttcaaatccaacggtttcgatttggcaattgccctgtctaaggtgctcttctacaatacctacttggtgagaaccaaactttttctgtttgtgtatccattttttgagatgatgataatgatgatgattgtattagtaatccaagattgtttaatcttgatgttgttgtgagcctctagttttactagataagaactttgtaatcccattattgaactttggtgatagtagatgatttgagcagactacggtcctgtaatttttcccgcattggttttccacgtaaaaatctttgtgtctcacttttatgcttgatttgtgtattttatattatttgtggtgctttggttgatatttgatattgcttattgtgctaattgataaatatcctatttttatcatacaaagtgggaaaatattgtggttaattacaataggttttcccgacaagtagtatcagagccaagattgattggtgttgaattcttgtgtgttgaaaaatggatgagtcggatggaatgatgaaattaaacttatcaaattatttcgcttggatgcaattgatggaagatttgctttattgtaaaggtttgtacaaacttattaaaggtagtgagaagcagtctaagttagatgatgaggaatgggaaactcaacatagaaaagtcattgcctacattggacaatggattaatataaatcttcatgagcatat

SEQ ID NO: 228491 - DNA, 1493 bp, Cannabis indica
tttatttagggcataaaaccaacgaatacatctcttcctgttctaacaattcatcaagaaccgattcattatgcttgatagcagcagcagtttcatgggtgggagtaggagagttgtttagagaatccacttccgattgagcatctgcaatattctttttcattcgcccatactttttaatatgccattgctgaagtgatgtcgcacaagattctaaattgtgcagcacattgctgatgggatccgtagaacaattagataaccaacaattggagataatggacttactgtcagggtcagataaccatagtttctcaaagcgaaaacgactgtgtcttttctgttgctgagctgttgcttgagtgaagacttctgctgtaatggctcgatgatcagaatgaaaatagtccaagtgagagaccgttggttgctgaaagttagaaggccatacatcgttcataaagcactagtcgagacgttctttcaaagtgtttgttgtttttctatccttagcccaagtgtagatgtctccatggaaaggaggatcattaaggcggcagtgattaagaacatttcgaaaggctatcatttgggattcactacggagagatcccccagatttgttcgcattcaaaattatttcactgaaatccccaatgattagccacggttgcaagggggcaatgtcatatagccaacggagtaaaatctaggaatccattctatttcgcacaataggagctccgtagaaagcagtgaaatgaaacttgttatcactagcatcacttaaccatgagtcaaaataacaggggccaaaagtattgagttgaagaacaatatcatctgtccatagcagcataagacctccactaagtcctaccctaggtgcttccaaaccatgagaaaattttaagagttgtcgaaaacgatcaagagagttattgttgagtctagtttccatgaggaaaagaacatggggagattgttggcatacaagcaatcgtaaatgtcttaacgctattggggaacgttccaacttaagattttcataatcccttgcgggatttcaaaacaatctccgctgaatcgtctgagtcaccatcagaatccttggaagtcgaggaaacattctggtgtgaggaatccccttttaacgaaaaagagggtacaactgtgttgtgttgattgcgacatctcttaagcatttgcctcatggtaggcgcatcagtttgccttttaaacatgcggtttggatgaaggttttccttactgctttgagagtgagaattggtgaacaagattggtgtctgtgtagtggagatgagggatgtgttggaattaatgtctccttccaatcagatctactcacaagtatgttgtttaacaccctaaatatgaactttctaaaacgataaagaaacacatataaagttaagaaaaccttacatttatggcagcgaaattaatgtctccttccaatcagatctctaacc

SEQ ID NO: 228492 - DNA, 2224 bp, Cannabis indica
tcacggataagaacatacagatgtttcgagatcggtggtgcgtggacctattctatcagaacctcagttgagagaacagtgggtgtatattttttggtgattgttgacacatagttattgtcgaaaacattatcaactgttaatcaatagctttgcgataggtgattatcttttgtgataggtcatcatcgactgatgcctttatcttttgcgataggttattatcgactaattgttgacttattgttgactgattgtggacttattattgactaattatcaaccgatgcctttatcttttgcgatagattattatcgactggttattgactgattatcgacttattatagactaattatcgactaattgtccacggtgattgtagaatggaataattatgtgttctttgttgtgatagttcattattatctgatatcctaattttttcactctgatgtggcatcacatgatggtgacacgtggaatcgacttcgagtatctgctcagagaatacagtccgaacaagatgcctcatatgcatgactgaagcaaagcgatcaccaatccgcgtagagcgaccaacactttgcaaattcaacttttgcatcgtgagtcatcaaagaattctctataacttggggatcagattgcagagatatggtaagctgtccaaatcccacgatcagtgtattctgtatttattatgcaatctttcagcttatattcattgtaacgataagggaaatacttcttctccaagctcatagccctataaatagtgatgcatgttcactggccaaagggtcgaaaacattctggtagagagatattatctaagaattcatattcagagatactattgtaagagcaataagaaaatgaatctttctccttattcttgagttaatacaaataacgaggattaggctattaccgaactgctcggggctaaacctctataaaattcccatgtctttatattgctttactatacatcaatcgttataaactacttgtcgcttactaaataagacgaactgtcgttggctaaaagtgaggtcaacattttggtgctttcattgagagcagaatcaagaatcgctcttcattcaaaatctaaccacaagtacgatggtggtacagactcgtaggggcctggttgatccgacaaatccacaggcggtggatcctgcattgcaaaacccaggaaactcaagggttctgccaattgttaatcttgaacagccgtcgaacgtaggtcatggtgtgattactcctgtagatgaaatcgcgcctagtgtgcaagagactgagaataccagttcaccacccaactagggcattcataacacaaccgttccgcctactgccaacgtttaaacgaccattggagatgatactgagatctaaaacctccgcgctgctcttggactcatgcaaggtcataccaataccctacatcatgattaggaagaactccgcgctgcggtaaatctcgcattcgaggaacaaagatgcatgtttgctgagtggagagacaaagagatggaagcgttaagggctcatcatactgagattgaaaatcgtagtcaccaagccactgtgctgatacaaaaagcctaccaaactatcggacaacaacttttgaatgtcatcccctgggtgagacagacgaagatccagcgatgaatacttcccagactataaatggtcagccgccaaatccccggtcacaagttctgcttttgggcctagcggttggcgggcagaccttgtctagtaattcatcaggagaggtcatacctgatagttccaaccaggttaatggtgccattccacctgtcaaccaagcaaatcaatcgctgagacagccaggcgctttcgtattcgataggttggggacgactcatgacctaaggagaaatttgaacagaaggagaggagtagacgaatagattgtcacgacgatcgtatagcttggagcccgtgctcaaattcccactcacaaagatactgatgtgattcagatcgaccaaactgccgagcaagttagtccagctgtgcaggcacatctagacgagctgaaaaatatgttccaaggcatggtcggacagagaaacagtgatctcgagatggaccgagcacgtggaactcccttctctcccgagatcaatcttctggcgttgccccacaagtttaaaatgccaacatggaaaatttaca

SEQ ID NO: 228493 - DNA, 1622 bp, Cannabis indica
ttttttttttacataattttatgatttcaactacagaaaagtaaaaataattacaatacacattaatacaaatctaaaagtttgattatttttattttcaggaacatgaacatttggactactgtcaacaaaacattcattgtagcgagcttcatctatgtttgttaagttagaatcttaaggcagctccaacatagatgagagttcaacaacttttaatgtcatagatgaaagttcagcttccaactttcctcttttttcaacaaacttggtataactactgcaacacgttcacacataagggtcataccacactcaaaatttacacccaccacttgatgtgaaaacaaaactagacaaaatattacttcttgggaaaaaaaacaagatgaaaaagagaagaaaatttttgaaaaaaatacaaacttacattatacaaaggacatctcacaaatcttctacctgagtttgcattagtccaagaggtgaagatcatagctctctatgggggactacaatgatatttcacagtcacataagccattttcttcccccttctttgtgtttctcttcttctattcttcgtctcctttgtctttctcttctttatatttctcttctttttcatctccttcgtgctcctcctctgattattcttcgttgatatagccctaaaaattaggttattgattccttcatgctcctcctctctttgttcttcactgatatagagctattttttctcttcttgtcttcgtctccttctgttcttctcgcctttctcctcttctcttcttcctttgtctcctccctggtattcttttcttttttctttcttttttttttcttcttcttttgtactttggtttttcttctttctccaagctagttttagttttaattttgatttataatttaggttattgattagttcaagttttagtttctactataaagtttttatctagattaattatttagtttttatttttatatttaaagttttggtaaatgtggccatgttgggcaatttttaaatgatttgtcattaccacgtaaacaaaataaaaagttaatgaggctggagaaacgacaccttaaaaatacaaacgaactagtactctaaagaattttcctattgaaatttgaagttgaaaagctaattataagtgaattgagagtttcaaaatttaaccgccaaaaattctcaaaatatattactatattaaatgttttggaggtaagttcaatttcttaatatttaataaaaatatttatttcaataaaagttatatatctatctatatctatatctatatataaaggaaagcattagagaggttaggtggcactctacattttatttcattaaccttttctattttctcaaaattttatatttttattaattttgtattcataaaaacttattataattagtgataataaatattcaattacaacctttcaacttattttaatgtaattagtgataataaatatttaactacaacctttcaacttattcataattttacaacctttcaacttattcataactcttttatttattgtattttatcactatatatgtagatatatatgtcctcttttatgcaata

SEQ ID NO: 228494 - DNA, 1750 bp, Cannabis indica
tttttattttattatacataaagatagtatataattttgtaagtataatataattattttatggttgtatataattttattaataaggtatgtttaacttttttaataatattatattattttttattattggtatatatattttgttataagcgagtaaacatggggaaaaattacctcaaaaaatttaaacaataaagttataatatccttaaacagtacacctagactatttgaaagatctcaaaataaaaatcggaaaataaattttattagaatatctaactacaaaaaaaaattatcaataaaatactaaattcttagactctaccacttgattcaatcaagtaaaacataaactaatgaaacttaaaaataactagccaaaggtgttacccctttgctagtatcaacgactattacccaactaattctaccccccgccaaaattcaataatcataccacactaactcataaaaaaaatgatttcctaaattatttgtttatcgagattttcgaaaaaaccaatataaaatataataaagctaaagaaatagatcaaaaataaagaacatgacaagagatttttacgtggttcgagtaataacgaattctattccacgagtcagtattatttggctaaaaaaaaccttttagtattacacaaaatgtttgccaagtttatgaaccctagaacttgccttagcttgcaagaattcagattctaaccctttgcatgaatgagttgtcttctattttatagacttagggttcttaaatgtaaatgttgtccactgatggggtaaataacttcggtccatctagtagagctcgacctatgaggcatttgatcttttactaatgtagatgccacatcatattgatattgtcaaaacttgtcctattttgtggataataaagacacataaatgtttgattggtaattatcttatttccttatttagaataccttattcttggatataatattgaaaataaagttatgatattgtgagatttgataataaataagtgagatctcaagcttaatatttggaggctcgttaactactcttccaaaagcactgcttgatactatttggagacctgctttgctgggtcgttatcttgcttggacgagtcatatgtctatcatccagatggcttgactttgataatgagtttgactcattgtcttgattgggcctacgtttgggcttgtagtagctgaactaaaccttaaaattacatgtgtcctccttcagaaaacacggatagcattattaataaagattatatcgtttcccaaaattaaatagttattttctaaattttgctaataactctaaatttaaaaaacataccaatttaacttttttttttttgaggaaaacaaattgttattattaatgaatacaaatcattacaacaacattttaacttggaagtagaacaacctccaataaatacaattttatccaaccaagagcaaattttgaaaaaactcacttctaagaaaaaggattaaaggtcataaacatcaacaataaaatcttaaaaataagacaattgagatgtgtttacccattaatgatggaagaaactagtaacgaacattgtttcaacatgtttaatttgcaaacaatgttggagagcccattgtagcaaagactttgttatgcggccataaactcttgatttttatatagaccaaatactacacatagtgcaaatgaaaagttgaaactt

SEQ ID NO: 228495 - DNA, 2714 bp, Cannabis indica
ctgtggtgcaacaggaaattggcatgtagtcctcaactctagaaggtttgtcatccgtaggaattacggtgatcatggtggcacagaaatcccttggcattgtacctgcagaaaagaaattagtgacaacttcacatatatcagcacctatatctttccacattaccttgaaaaaactagagccatagccatctggtcctaggggtttattttcaagaatgctgaaaaaagctttcttgattcttttctagtgaaaggctttagcatctctagctgctgctccagatctaggcgcttacctctttctatacaatacttattaaacttcaaactggctttgctcttactgcccacgtagccatgaaaatgttccatgaaatgatcaataacctaggggaagtcatttatcacaacaccatttgcagagacaaaagtagctatacggttttcaaccttcccttttttcatgctagcatgaaagaacgaggtattctcattacctttttgaagccaatctgttttgctacgctgctttaggaagctaaggtacattttttcctggatacaaaatgcttcagtagccgatttctctttggcttgaatctcaagattccttgggttttcttgggcttggattttggcgttcaaaaggtaattcttagcctcccaataaaatcttcccacatctcttatggactctctgttgaatgtcttaagcttatgtttcagacacataagcttaaggtaaattccctttaaactagaagcttgtaatggctgattctaactcgttctaaatatgtttttgaactcctcgtattgagttcgaaaattgtggaaacaaaatggtttaagctcaatttactccgtaattgtcatagtaaccacacaagaatagtggttcgagatggtttcccagttgagtcgagccatggtattagggaacaaatcattctaatctttgttagccagagcatgatcaattcttgaataattctaagaagaccatcttggttgtttgttcaagtgtagttcgagccatttctcttgagggcctccacttgagcttgaactttccaagttgaagaatcgacaatgtcaatcaagctaatttggttaccccatattcaatcatcaaggtaaaaccctgcattgaaatctcctaatatgagccataacttaacaggaaatctaagttttaggagatttgtccacaaatctttcctctcctctatgttgttaaaacgataaatgaaagtgacacaaaaagattccttttggttagataacttcacatggcaatgaacaaattgaggcccttcaactatcacaattactctagcgaaattcttcctgtaaagaaccagcagtctaccctcaatattactactagtaaagtaactccagttcttgaatttattttccatcatctcaacaatcttattacccttaagcttagtttcaagtaaagctccagctcccattttattcatacatcaaaaatctaaaacaacatcttgttttctaaccttattgatacctctaacgttccaactagtaatattgaaattatccatagtcaagtatttgtgttacatgttcccccttcttcaactgagtttatctcctttctcatatccccttctatctcttacagcacaccgaaagaattcccaaagttgttcgaatcattgtcctcttctgacctccttttcccaactgaactttgttttgctattgctggtttctttggaataatccattatgtatcttgaccctttgtaggcttcttttcaccatttggatcatcaatcttatttctcgtatctgtcttcgttacagcagcttgaactggagctttttgagtgttatcccttactttttgtcccaaaggtttgcttttctcattccctccttttcgacaatcagccatgatatgtccatatcttgagcaacttttgcatttcactgccagccattcatagtcgatactctgctccactaattgaccatgttcattcaagtattagattgatctcagagggtcattcgtgatgtccatctccactattatcctagcaaattgaactcgactgcaatccttagtatgttggtccacaaaaatcgatttcccaatcatactaactaaagcacttaagcgattgcttccccaatactgaagacctaggtcgtaaagacgaatccatagcaagactatttgcaccagcttaatcgtgtttagattcgtagaccagggtttgattataactggtttcttattaaattgtatcactcttgattccagaaccttgtctcttgttgcctcatcgttgaatttgaccataaccaagcccatggtcattcaagctacttgaacaatacctaggtgtccccagatatgcttgatgaatctcttcaagacttacataggggttttgctcccagtaccatacatatcacagtcgagttccaatttactgcttgttcagcaacctcttctggatcaatttgagctatcttgactctgtttttcatcaatggttctgtgaatgtaaactttgaatccctagaaaaggtgttgtccttcgagaaggaattccagtgcaatcttgctgattcttgaaacaattcttgctccttcctgtatattctcgtttttaacttccttggcccaatcgaaacttttattacggtgttcgatgtgttttcatcct

SEQ ID NO: 228496 - DNA, 1159 bp, Cannabis indica
gggaactgttgttgtctaaaccaattgatttagctgatgctatggctaaagcgcagctgtttgaggatagaaacgatgatatcttgggtcgctctaagggcgatggtatccgttcgggatggtcttcccgctctgttacttactctcaatctccaatctcgaattctacgaatgcgtcgtcctatggctcaacctccacgaatgtgcaaagcccgaagtccttcaaaacaggttcctctccattacctgttaagaagctcactccagctgagattcgagagaaacgggagcgtggcttgtgttttacttgtgatgagaagtatagtttcggtcacaaatgcaagaatcgagtactaattttgtgtggcacggatgaggatgaagaggacgagaccactccgatggcagaatctgacaagggagagttggatgacgcgaatgtggatgaagtaagtttgaatgctctgtccaatttggttaatcccagaattttcagattaaaagccactcatggcaaggaaaccgtggaagttctcattgatacgggcagcaacaacaacttcattcaagaatctttagccactcggttgaatcttgttagtgagaatacaaggtgtttcaaggtctatatgggcaacggtaactcattactctgttctaaaccttgtcgtaatgtcgagttgtgcttacaggggcacttattttcagttgatttatatgtactgcctatttgggggctggatatagttctgggtatgcaatggttacgcactttgggaccttgtttacatgatcacaaggcccttaccatggaatttcagtggcaggggaattcggtcaagcttgaaggaacttccgatgcggcagcacatcaattaactttttctcagtttcatgccttactccgggaaggagatgtacgagaaatgtatcgtattattgctgtaacaaagagtgacgagccaaatacacctcaaatttctcaattagatgccaagttacctaatgagggcagaggtcttttgcttgaatttcaagatgtttttatggagccaactcagctgccaccgttcagaagtatggatcatagaatctttttgcaaccgggagcagcgccagtgaatgtacgtccttacaggtacccctattatcaaaagga

SEQ ID NO: 228497 - DNA, 977 bp, Cannabis indica
aaataattattaataaatatctaatttaaattttaattcatatataatctaattacagtaaatatttcaattgatatttatactaatttaaaatttaaataatgaattttattgttataaatatttttaacttatttttttccttaaagtacatttttcaaaataaattttatgatcacaaattaatttgaatattttagtttgtaattattaatttgtttgaaatttttttggttaagggtttgcatataatctaatagtaaatattttagtttttcttctttcatagtaataaaaattagaattaatagatatattaatttttatttatacatttgttaatatctataacaaagaaaggaaggagaaataagtaagaaaataaaattagtaaaattcctcatttataaattttaaaacattaaactccgaataagaatttaaattaacataaagctaaattaaattaaagtatcacatagacttataaaaaatttgttcataaagaaattttgtgtaattctttaattttgttacaaccttattatacaacataagtactagattagatcatttattgttaatttagttaagaaacactaataatagctctacctacaacattaaaagatccttcttctttttcataaaaaaaatcttcttccaacaattttgccctcaccaaataaagtatttcctttctaacaacatgtatttattttcttttgaattgcatgagaatgtgaaaaaataatattaagaatgataacatacatacataagagttacaaaaaataaatgtgataaaaaaaactactttgatcacaagctaatattttgacatgcattcttaaatataattgtccatgttaaactatataataatgttataatataatataaaaatgaagtatatataaacaatatgtaaaatggaataactacagacaaagcaaaatcgtatatacgataaaagg

SEQ ID NO: 228498 - DNA, 1370 bp, Cannabis indica
aagtcccatacgtttgtgaattttcccttttttttcttttcgaaatcatacatatggtacattgaattattttctttagaaatactaataaatataattgtatggttttcctaataaataaataatattaattatacaccctaaaaaatgtaaagatatataaaaataaataaataattcttatcttaatattcaagttgggagccaatgagcgcagcatttgtcagagactggcctcattcccaccgccaccttcatgcgacgtgtttggctaaatttagaaagtcttctttttttaagcaaaagtctcgtttaaaagaaaaattgcaaatcaattgttttttacttagagaaaattgttgaataactccccaaaagccaaaatttagtgaagctcactattttcgtaaatctcttaatccacttttcatacatacctatttattaattacaaatgtcatgtgttaacaaattattgcttaatttttttttaaggctaattaggatttttgtccccttgaactttgacatgtaataaatcatgtccctgaacttttaaggtcgttaaaaatgcccctgaattatagagattgttggatttaaggacttttttccaattttagtaaaaaagtctaacatagataaaattcaggtgcataatttaatacatgtcaaagttcgataggcatgatttggtagatatcaaagtcttgagagcatgatttagtacataaacaatcactgaaattgtaaaattgaatgaaattagacaaaaaaattaataattccttttcatttttaccaaaactccaaacccactcgatcgcctctctcccttaccaacggacctgtctctcgctccatctcacgttgctctagtctgagacgactccggcgtccaatagcgtttagatctcgaccggcgctaccctccttgacaccagaggccagccactctgtcgtggcgtggagtcatcgaagccagccatcatcgccgacgctgtggaccgcaacggcagccatccccagtgacgttttcacctttcttgaaggttgaaagcgtgcaggtaatgggtcaacgagcttcgagattgtgtccgcatagggagccaacatcgattattatcgaaacggatcaaggtcatcatgacaccgttttgcaaccgccaatttcgaggattttaatagtcgatttggcacttgtaatgctccacgaaaaggacattcgttcagtgttttcactggtgttagttgtgattttaagagttgattttatacaaattaaagtttagaggtttgttatactgtgtatataaattatactgttattatttatttttgtttgtaatatactgtgtggaaattattca

SEQ ID NO: 228499 - DNA, 1148 bp, Cannabis indica
atctatacaattatttacaaacaaaaccattctctatctttgagtttcactttttgtggctttagaagcattgttctaattttgacaattctttgaagctgctggaacaagttctctgcctgctgtaccttcttttgccaaatgagatcatttcttgctttccaaatcaagtatacaagagctgcaatacttgatgctttgacacacttcttaaacttggtttgcttagcctttcttatgcttttgaaaatgacctgtagagtatcagctcaggtgctccactgaagccaattcttcacctataatagacactactgggagaaattgcacctgaaaaatagatgctcgatcgtttcatctgcaacattgcagaagctgcaaaccggagattcaatcaccttgaacctgcagagtcgttctttggttttcaatctttgtaacatagccatccatgtgagaaagctatgtttcggggtattgagtctagaccaaacttcattgcaccaatccactctttcatgttcttgaactagaagtttgtaccatgctgccactttatattccttcctcgaaaattcttcaatttgcattgtttgctttactaaatctttgattgacaccatttttcctccaataccaactactacttggggagctttatactcccaccaatttttgtctttacgtatacacaatgcacccatttcacccaaagaatgtcctttttatttgccacagctcagatatgtttaaacatagctgctacattctattgagcaatgttcaataagccaaggccaccttctttttcgggtagcataaattttcccaagccacagctccagcccctaccatcatgctcttccctgtccacaagaaacatctacatactccctctatttctttaataacttttttagggagaatcataatctgactccaatacatgtgtattgtaataaggacagaatttaccaatactaacctcccagcatatgacaaattcctagttgaccagacccttattttcccagtcatcttttgagcaagtgtaacacaatcagcaactgcaatcttccttgcacagatgagaactcccaggtacttgaatggtgctttctatctcgagaaacagtcatatccagcac

SEQ ID NO: 228500 - DNA, 2492 bp, Cannabis indica
aatttgtccatgagacttgaagaagactataatgtccaatcggtacataacagagccaaaactaatctaatctaatgataatctatttgttttctaatctatttgcctactaaggccacattaataacaaggagaaagtattgttaaaatatgtatattgtataggatatatatatatatataatggatagaatattatattctccttgcttccactccaagtaaattgaaaggatgatttaaagtccaaaactattatattatacctataaccattatttccaagcaacatcatgtgactattatttgtctatgtgcatataaatacaaagaaatcataaaacttctttactctataatatctttcacctctgtgcgtcatattttacagatctcaacaaatcttataatttcccacaacttttttagtttctcaaatcaaaaaatatgcaggaaagtgcttacaactcagatcatggaacttgtacagaaggtagtgatggtttctcaaggatgtcttccatcaatcttaggcctttggatctttctgacatagatgctttcatggtatgggccacagacaaaaaggtgcctattttttgcacttgggaacctttcaccagcaaagaagatggcataaactacatcagagataaggtgatccctcacccctggttcagggcaatctgtattgacaataccccaattggctatgttttggtgacacccaattcgggcaatgatcaatgtagagcagaactcggttatggtttggggtccaagtattggggtaaaggaattgcaaccatgactgtgaaaatagttgctgagaccatattcaaagagtggccacatttggagaggattgaagctttggtagatgtggaaaatataggttctcatagggttcttgagaaagctgggtttcaaagagaagggattcttaggaagtacttcttgctcaagggaaattgtagagacatgataatgtttagtttcctttctaccgattctaacactttactatagtttgttctatcatgtagttttctttttagtgaagttaaaatttagtttataataaagaagccaatcaaaggacttggattgggttttgaagccacaaaatgtctctttattgatcacaaacattacattacataaacaataatcagagtcacagaatcttatctgttgataagaagctatacataaacatatctctaatttgacccttacagaagccatattttctctacatcccttcttttaagaacccaaccttttctagtaccctttgtgaagcactattctcaacctcaactaaagcctcaagcctcaccaaaccaggaaactcattaaacaccaaagtgatagccatctttactgccgtagtgacaataccctggccccagtagcctgctcccacagcatagctaaggtgtgcccggcatttgttgtcaccagactctggcttggctgagacatagccgatgcaacggtcatccaaacatatcgcccgccgccatggatgaggtatagcaaccttctcaatgtacgtcaaggcttcttctttagatgttatggtgttccacctaaggtagcgggtgactctgtcatcactggccaatatcaagtagtcatttgcatctgaaagctttaatggacgaagggaaattcttgagaagtccatggtttgaattgaaagatttgtagtttgaaatggttaccaatcttaaacaatatctatagcaaccatttcataaaaaaaaatatctcgtctacacattttaatttaataaataattaaaagacacagttcccaaataacaatgctctatatatagcaaatattttccttaaaaaaatattgcagatattttgattttttttttctaattatgtgactaatataaagtacaacaaagcataaaaaaacaatggaactttcaaacagctataaatagacatttcattaagacatgagatcactagacaaaagactgtacaggaccgtatctcttagttgacctttattaatggtataatttctaaggacaatatcattttgaaacccaagcttttccaagaccctttgagaagccttgttctctattttcaaccaaagcttgcattcagatcgaatctggaaactctctaaaaccatcagaaatagccctctttagagctctagttctcagcagcccaggcatagccaacttcagccctcaacttgtcatcgccatctcggggcatgatgatcatgataatctgattgaacatttattgatgcatatggatttgcaataagggtggggaatacaagtacaggtgttgatgtagaaaagtgcttcttctttggaagtgaaactgttccatctactgaaccttgtcaccctattgtcaccaccatatatattgaggaagtcatcaacatctgaggtcctataaggacgattattaatctccaaataagtggttaccatgttcaa

SEQ ID NO: 228501 - DNA, 2090 bp, Cannabis indica
tttgtctcatatttgatggtttgaccagtatggtaatttgtgcctagtgtggcttgttttgtactatatatatatatatggtagtttgttatgtacggtagtttgtttaatattttttctaatagtttaagatagcagtgacatcctcaagactaccaaaaaatatacaaaagataaattttcaacaataaaattaataattcacttttatttaatactataattaagtagtatgtttaaccaaatttttgtctttttatcttttgtgtattttctcacacacttaaattttcgaggatcaagattttaaggagattaaatttttagtactaatttatttcttatattaatatagtgtatctgtttattattacttcactcatttcattattcaagttttcaaagaatttcaacaaaacataagttataattattacatcatattaattacttttattttattatttttcttattttgatagtaataatttctttccttatttgtatatttgttggttagacacgcacacttttaggggtttcttttataatactaaagttttattgtctagctttttagggacatctctttcacatgctagtcgtaacgttaatattgtaatccatagatttgtttaacataccctaagaatagatagtagactattttagatagaaggaatctcctcactttacctctcggtgttcttttctctaacctagaatggttactcttacaaaaaatgtaaaaattactaataaaatgatttattatgattgttaacccagaaactttctttggtgacgtgggcatcaatgtttgacatgtggcaagaaagataacgtcacagagttgagtagacccagtcatagtagtcgacctaggaggggaccctagccctccacccaggttgacttcgagagcttcgagatggaagttcagaattcaataacttgaatccaacttactatctttcagtattctataccatgaagacatggagcaataatatccaagccccaaggagctaaaattacatgaacctgtaccccgaaagccaacctagacacctagggtttcacccagcgcccaggttgacattcccaactaggatttcaatttctggggctgtcttagtggaaatgggtcaagctttgtattggaccatcaactagacatactatagacatatttgaggcataaaaattaaattcggagcaagttcatttatgagcacccggtgcctaggcacctagtgcccaggtcagcaaattgttaatctgagcaccatccaagtatcagattgacaatcatacttttgcaacttctttgtcttcatcaaaaatggagaaacaggtacttttagggaagaaacaacacttcctggatgccagaagcaaggcccagctcccaagttgacacatggggctagccgagcgcccaagttgacattttatcaacttgagccgatttcgatggtgttttctgagcaatgttttgaggatcttctccgttttcagcaaagattaagattcaattattttggaggatcaaacagaaattctgaagggccataattaggacccagcacccaggttgacatattgtcaacctgggctatttctaatcaagttattgaaaaagtgttccaggtatttttttcgtcatcagaaataaatggagattcaagcaaactcgaggagaaaatcacaaacccgagaccctagacaaggcctagcgcccaggttgacaatcaacttggtgcgctagtttcgaccactcaaatgtcactctcaaattgacgattcgacttttgaatctactttttcttcattaaaaatgggaaaataagtactttcgaggaagaaacaacacttcatgtgtgccagaagcaaggcccagcgcataggctgacattttgtcaacttgagcaaatttgatggtgttttctaagaactcttctgagcattttctttgttattagcaaatattaagatttaactattttcagggaccaaacaaaacttttgaagggccataactagtacccatcgcctaggttgacacctggcactaggcctagtgccca

SEQ ID NO: 228502 - DNA, 792 bp, Cannabis indica
ccaccaaagttctctgttcgattaaaatttctacctgatgcttgattaaacagccctgagttgccattttattgtgtgtttcctctcccatattgttgttaaaatcttctccaggcaagattggcttcgatcaaaggatccataccaagatcttgatcattcgaaataaggttcgcactaagatcgatttccttccccgacttttcgattcttgattccgaagcaagaaggagagcctcgatttctccgacggtgtactgctcagttcgagtattagtggatatgacgaacgtatcatattcactaggaagccctttgaaaatcgccgccacatgatcacgatcgctcagaacttctcctacagaggctaggagatcgacggtctgtttcaccttcaaaagatagtcattgaggctgagatttcctttcttcaggttctgcaatttagtcctaaactccagaatctttgatgatacttgcagagtgaaatgtttctctaaagttgcccaaatttgttgtgatgaatcgcaccctaccattcgcgtgagaagaccttctgtcatcgatgacagcaaccaagaaactaagagttgatcttgaactttccagctgatgtaatcttgattgactctgccttgtgttcgatcttctggagtgaggaattcagctagaggtggatccttgataaacttcagtaaccgattacctttgatcgcagcaaggacctgttgcttccacaaaagaaaattttggtcattcaaacgaattaaaatgctatgattgaagtaaaca

SEQ ID NO: 228503 - DNA, 1153 bp, Cannabis indica
tcgtatgtgtggtagggcgtaggtggagccgagttgaagtcacagatcaggatcactagagttaaggctggccctagcgtcaacatttggccagcctggtggtcaatatcctggctggccacttcctaagcaagtggaccggccagcccctcgtcatggttccctaatgatgacccctctcaataggcattagtctagtctgctcccaactggctctcaaagagcaccttttctcaggccaacttgttctccactaaagcctcattgcccatgtatgacagattagttctggaattacgtagcttgaactcataggtgagttcggaggacaagtcagcatactccttcctttatggcctgctggccatcaagagctgctctcagtctctccccatgccctgctagtttagactccagcctagagataaaggcagcttgtgtggtgttctacttgtttctggctcccagcatggtctctaagccagaattcatgctctgtctttccacaaggagagcctccatctcaaacatgggtttgtccttcgccagaaaggaaacttccacgttcttcacctgctcccgaagagcatctaaggacccccgggagctatcgcatacagagctcaacttcatcaagacctgaaagtaaaacaagacaaaattagtatcaaactacaaactggtcaactagcccctctttgtgactgttatggccggctagcccctcataaatacatccatggtcatcctaccacatgtaataagtcccttggttggctagcttacacagtgtcagaaagatgaacaaagctaaaaataaaacttactagaaaaaagatctcgaaggccagtagagtagagcatatctggctcgccatcaccaagctccttgagctcctcatccatgaaatgaaaagctctctctatgcgtatgtgggcttcccccacaaccctctaccccgcagttgagcctgctcctcgatcgggcctctgagcaccctatcgcgtaggttgtatcacaggctgcctagcaagtccaaccccggtggaggaggaggcagagatgacctagaaacatctctgccatgagaagtttgagccaccttggccctcactcatcccatgggcttatctaaggttcccatggagaagt

SEQ ID NO: 228504 - DNA, 723 bp, Cannabis indica
gatattggattggattggatcggttatccattggatcggatgtctcatccaacatccgatccgatccatttggatttttaaaatttgcatccgatctgatccaattatgattggatatccgattctattggatcggttgggattggatcggtcggttgaaattggattggatgactttctgcacacccctaaatgtgattgctcattgtttggttcgacatgtgattatggtataaaattgcatattattacgtgtaattggataaataaatagatttaaattatctatcttcatggatttaactgttacttgaaagtatttatttaatctaattttgtgttaatttttagatttgttgtggaaattgttaaagttgaaagagaggatcaatagcaagcccaatttaattggtctaagcccaaccattttgcaaaactttttctctcaatcaagtcaatatattaagggaaatttacaaaaatactggaatttgagttaacttttacaaaaatactgtcacacggaaatattttcaaaaatactgtgtttctataaaacaccagtagaacacagaacagaacaattcaaaataacaatagaaaaactataaaacgtcagtagaacactagtgaaaacttaacacagtatactgcagtatgaaatttataaaaaatacaagtaaaaaagtaaaaaataaacgtctgacagtatttttatagaaa

SEQ ID NO: 228505 - DNA, 1875 bp, Cannabis indica
atttgtaaagagagagtttatagagattatttgtcaacaaatgtgacatgaaatctccaacacctctgtaattgttcaagcttggatatagtgaaatgagctaaactttctgagaatagctcacaaggatgtagcctaaagattggggtgaaccttgtcaaaaatttatgtgttcgatctctatactatgttctatcctatttttttgtcattttaattttttattctaattttgcatctatttgatttgtatcgtgagttgtgtgaggaattcaagttagaatccctacacggaatgttcatatttttatatttttttctatttattttattgttgtttttttttttttttgttttcttattatttatatttttttatgttgatttgatgttgtttttatagaatattgtaaaattgtaattaaaaaaaattgaccatataaatattaaaattttggcaaaaataatgttttgggtaaattattattttactttattatttagtttaaatttaaaagatccattttcttttctttttcttttcttttatttttttttcttatcaataattaataaaaaaaattagtttattttttatttattaatataaaaattattttaaataaaatagtagaataaacaaaaattttatcactgaactataatcactacttgattgtatctctaatctttttaggttattttaaattcgccaaggtattaaaactatcaaaatgtatcattttgtcaaaaaaatattggaaccaaccacaacttcgcaattaaataataattcaagtagcacaattctataataatgaaagttaattttcatcatgctacgttaactttttcggacaaactgatacaattaaacagtggtaataattcaatgagaatttaaaacaacgcaaaaaatttgggtaagtagacatgattaagtagtagtaaatagtaatataattcaaataaggtgtagccatactagcattaatgcactaattattccatcacaactccagtacaattaagcatgttagacgagaatagtactaaaatttatgacctctttgttgcacccctaaaatttaaattaacccactgttttggtaattggaaaaatattgtatttaataataataataataataataataataataataataataataataattgtagaaaagttctaaaaagtagtttattttgatgcagataaattttcaatcacgaaaaataatggtaatagtcctcaagttcgagattcttgtaagtctgttggtcatatttttaagagatctgttaattcctccttaaaatatcacgtgttgatattaaatcgcggcataagttcttaaaaaatttattttgatgcagataagttcttaatctcaaaaaattgtgacaacacctccaaactcaaaattctcgttagtctgtaggtacctaatttaactgttccatttgttgttctaaaaaatacaacgtgttgaatttttaattggttcaaattataatttaattaaaattaatttaaaataaacaaataaataaataaattattttaaaaactaattaattaacatttttttttttatcttttctgttttttatctttcttcttcttctagttcactcctagtccaacattcccatctattctactaaaactctccaatttagattagcaagaggggtcactctaaaaagaaaatctaagtaaaatttgaaccaaagaagctacgataagaaaagtagccaccaaaacccaccatcctaccaaagatggggatttgcagaatagattcagggagatgatccaaataaggtgcagctatttaaggttttagggtttgtttttttgttgttttt

SEQ ID NO: 228506 - DNA, 1990 bp, Cannabis indica
tatgggagtccttggacgatgaggaagattgttcggatagtattgaatgaggcatgataagaagcgttgacacgtcagcataatgtttggcatcttgccacacatgctcccttggtcacgactgactaggtgagcgacagtgttgagatttatcttatcatagtgtgaacctatagacagtgcgagtatcttggctagagagcctcgatgctttgatgcactcatggatgcttgcgagcatgactcagcgggagttgtttgagagacgaaagtgtgcacgaggtacacggtcgcgcaaaaaatgagcccattgttactcagatagttggaaggttgactttggcttagagaagtcaaggtgtcgcacgagtattcccctgtctagaaaagtgagcctgtaacactaagcatgtgcccttaagatatactacttattaataatatctctcgaaatattatttttacattaacataatcattctatcacactttatcattggtagacttagaccatcactaatacaagatgtaaaatttgacacaaaaattgagtttgtataatatttagtttactatttacaattgtactctaatgtaaaaatattaaaatatataattattattgtgggtaaaatttggcacaatgttatattttgtgttaaatttagtataatttttaacatgtgtcaaatttaatatattttttagagcaccattaaagtaatatttttttttatgtataccaaaatataacaatatactaaagatactcgtagcactctattttataataaaaaaaataataacaattaacaataaaattatgagaaatgttaaatggcaccagtagtgactaatattctcttatatgtcaatatcactattaattcaagtatcgagtctcatataatttaatataataacttttagagaatattattaaccaatcgcaagacgacatatcaaaaagtgttagacaccactattggaatgctctaaaattataatttaactccattacaaaagcattcaaggtgttttctttttagaataaattgcatatatttaaaaagaaaaatggattatgggaacttgaacccttgagataaatataaattaacacaaccaccccaccaaatatttcatttttatcgaataattgcttaaagttaaaacatgtacaataattaactaaaatacccattttttttgtttttgtttttttttttctaaaaaaaaagtaataattcaacgggccagccgccccctcttgtttcatatgagttctatgcaatttttttttttttacttatatttaaaaatatgagaaaaattattaaagttgctataaatatagcataaaaaataaatgtcattaaatatagtattatttaaccaattaaattaaaatatatattttttaaaaaaaaaataattcataaaaataaaaacttaattgaatcaccataaaaaatattaaattttctttcatatttattttttttaaaaaaaataaaataaatgaaactacagtgatcgtcggagttgtcactcgtgtcggaaaagtcactggagtttgctgttagaaccggaaaaatcgtcggagtagctgccggtaccagaaaagtcgctgaagttgccgtcggcaccgaaaaaatcttcgaaattagcattgtcgtcggtaaaatcacaggaaaaatcaccaagataacgccaattctgacgactattctagagattgctatgggtgccagaaatgtcactggagtagttgtcgatgtcgaaaaagtcgccgaaattattgtcgacatcaaaaaagttgtcagaattggcattgtcgccaacaaaatcaccggaaaaattaccaagaaagtagtttcttcatcaagaaactgattttttcactaagaaagtggtttcttcaccaaggaactagtttcgtcacacaacaataataaagattatgaaaacaaaacaaaaatgatataca

SEQ ID NO: 228507 - DNA, 2213 bp, Cannabis indica
gacatgcaattccatgtaaatggattttcagaataaaagagggtgctgatggcagcacaattcagtacaaggcacggcttgtagctaaaggtttccatcaacaaagtggttttgatttcagtgaaacctttagcccggttgttaaaccagaaacaatcagagttgttttaactctagctgtcacaaaaggttggaaaataagacaagttgatatcaacaatgcctttttaaatggagatcttgaagaggaagtttatatggttcaacctcctggttttgttgacccttagtttccaaacaaagtttgcaaacttaagaaggctttatatagtttgaagcaagcacctcgagcctggttttccaagctttccaaagccttaacttagtttggatttcagtcatcaaaaacagacacttctctgttcatcaaagttgacccgcacaatgttatctacatacttgtttatgtagatgacattataataattggtagcagtgacactcaagtatctcatctgatctccaatcttcactcaacctttgccttaaaagaccttggagaactcggttactttcttggaattcaagtaactcactcggattctggtctgcatttatctcaaaagaaatatcttcaagatctgttatgtcgaaccaaaatgcagtgtgccaaaaccagcacaacaccaatgaccagtggcctaaaactgtctcaatttggcagtgatccagttcttgacccttctctctacagatctgtagttggggcactacaatatgcaacaattactcggccaaatattgcatattcagtcaataaagtgtctcaatttatgcaatcccctcttgagtctcattggattgctgtaaagaggatacttcggtatttagcagggtctcttgatcatggtatacacatatccaaatgcaccagttttgacatccaagccttttgtgatgctgattgggcatctgaccctgatgacagaaggtctacaagcggctactgtgttcttcttggatccaaccttgttgcatggaaatcaaagaaacaacaaactatatccaggtcttcaactgaggcagaattccggagtttagctgctgttgtaactgacattacttggcttcaatccttacttactgaactctgcatttcatcctctgctgtcccaaaagtatggtgtgataatctcagtacagtaatgatggctgccaacccgattctccatgctcgaacaaaacacatagaaattgatctttactatgtgtgtgacaaggttcttcaaggccaacttcaagtgttacatgtccctgctcaagaccaacttgcagactgccttactaaagcaatttcaagctctagatttcctattttgcgttacaaactaagtgtgatttctgctaccatacttagtttgaggggggctgttagatgagagagtctgttacttttctgttgagttagttacttctgttaatttctgttattgtccttgtaacaaactcttctgttgcttactgtgtatataaatagacctctctctcatttgtaatgtaacacagttaattcaataaagcattctttgctcttctctgttctggttcatctttctctctttcaacagtagacaaagctcttacaagagtaaagtcaatggtacgccatgcatcctgaagcacgtgagcaatatatgaggctagttactaattttgagaagtttgaggtaattttgttttattatttattccttcaaatatctggggcagaaggcatttggaaatagtaattgtttgataatgttttctttttatatttgaacagattggtgaggatgagaacagtgcatgacagaaaatttcatagttcaaaatagtgtgctaatgcctaaattcaagacatttttttccttacaatttttgatctcttgtagcacgtcctttcgaattttaagaggctagctcaattttctggttaataattgcttatctatcttgacttttattgtttcgtgcagaaaaaatttgttgaggccgatgctgacgatggccttaagcacgggtggcatgcatcatttgtcatgatcgaactcatctctgccaagcacattactcatcatgtactgctctttgtttataaccttatatacgttcggtcatatgtgtgttttaactctagatagaaagtgtaagataaaggctaatgcctctcc

SEQ ID NO: 228508 - DNA, 1046 bp, Cannabis indica
attttagtgggagaaattaaatttggagtttgtatgacaatattagaaagtcaatttagcaaaataaaattaattttgtaattagtagcaatacaatatgtttttttatgtaagaatttgataagcttggctaaattattaaaagggaagtgtgaaaatagagtaatttttatcacaaaaaaaaaaaaaagaatttactttgtttggtttatatatgcttattactttatagtaattagattgaaatttattaagttaattagttgtataagatttttttttttaatttttaacatgaatttattaattcttaagtattggttccatcattagctctccattttgttgtgttaatcagagtaaaaagaacttggatagccaatcaattttaaaagaatgctaaaaaaaattaaatatttgactacttttttaggatggggaagatatatatattttaacatgagtttcaattttatgttttgaaaatatagatataatcttatgttattattaatgtggtttaccattttaattaacttttttaaggatattaattattatatatatatttgttaaattatatatttttgaggtgccaaaaataatataattatttatatataaataatatgtgtaatattttataattatctttgtgatattatttttctatatatctttgcttatcttttgcacaaaatttatttaataaatcatgtcatttactttattttagtttatctaataagacatgtcgttttccttattttatgcacgaaatttacctaatatgggtttcgttcgaatcaagatcttctgttaaaatattgtgtttcatagtatattaaatcaatcttattgtgatagatcaattaattgagcattttaagagaaaaaaattgcatagatggttaatgttgatcgaggttttcggcaaccaataaaataataataatttagagagcattaagaaattaagaaggagatttttaacgtggttgggggcgttaatgagccttagtccacgagtctgtgtatttatgata

SEQ ID NO: 228509 - DNA, 690 bp, Cannabis indica
tagttcccatgtgaccagttggtcgatgggggaatatctctaatatcctcagaaagacccctacaaggggatggtttcgtgacagagtcataggcttctctgattcattgagataggttagctctctgctgttcgtgctcaacttgttggctctcattgttttgccaaatttccacgaacctgttttaaaactactcgtgttgtctgtcaagagagtcttgtagctgtgatcgtagattagccataattttgctaagcttttcaacccaagtatccccgtcattgggtttttccaactccacccgtggctctctaggtggaatcttctcgttggctcaagcaccaggagcatttagtggccttcggggacgagctaagtagctggttctgggacctcctcttggcacctgaggtgtagtagtagtcttagttcctgcttcagtaactagcatgcccgtagtttgttgactagttgttaggactcctctgttgatgcttgaggagcatgttgcaacaatcttgtaagtaacttccttgagctatggttctcaatgaaagcaccaaaatgttgactcactaatctggacacagacttctaagccacactcgctcgctagattggcgaaaatgatataattgttaagtataaataaagagacacaacaatttatagtagttcactccttatat

SEQ ID NO: 228510 - DNA, 752 bp, Cannabis indica
tcttgtagggtgtaatagattataggtttttttttcttcaaggtgttataggttattgttagttacgtggttttcatttcttttaactatttgattaattatattataaataaccatctaatccaattgtcttatttgactttagaaaggtgtttgtttattctttaagtgggtagtccgtcgtccgatatcgagagattccataattattagaatttacaatatcttttttatttttgatgactagaatttataatatcttgtttgtttggtgatattgacttgtattgtagtcatcatctataattttatattcttttaatgaaaagtcattaggtattattacatgcatttctatttttctctaaactcatttaattaactattgataaaatgaagctgttgacatatagtaaaaattgatcttcaatctctatgaggtgtataatttagaagtaatattaattatctagagaccacaagttaataaagttctaccttccaacctacgcattgtgtataataacaataaagttttatttgcaaatcctagtattattgatttttttttttttgattggaatagtaatattgaatttaatttggtacctccatagaggatttggttcgatgtcttcatcagtaacacgtgtaacggtgtaaggacatcatcgaatctaccgacacagcaaagctagtggcacaagtgcatatttttaaactcccttcgattaacgcttgatttttttttt

SEQ ID NO: 228511 - DNA, 1413 bp, Cannabis indica
aatatataattttttaattagattgaattagattaatttgatataattgaaataatgacaaccttgaagaatgattagtattaaagtagttttagaaataaaattatccaaagtgatttatacaagagtatataaaatattaaatatttagataatatcaaatttatttgataattttaaagagagtcatcattgaaattagagcattgctatgagacattaaagtatttagagcttctatgacaccacgtcttataattgatttgcgattctctataaattttttaaattaaaataattaagtttcgatattaaattatatcaataacgatattatactaaagccaattttcaggagactccatattgtatatatggagtgggcttcttctccaaagaaatactataatgcacactaatttgaggttaatacaacaatgcacgacatatatatcgtacactgtagatacaacatttatatatacatatttaattaatatttatattatttgatgtatttgtgaaattaagaatttgagtttgagaaattttacaatatattttttttaaagtgttgtattttgcaaaacacagggtccaaaatggtatttacccttttatttatttttgtgtgttcttactctaaaatatgatttgcagagcatcatattttgtagccatcattattgattatattgattataaatacaaactaattatacaattggaataaatttaaagtcaagttacacattttgagtttttggaaagttaagtacactacaacaattttaatctcttcttttttttgcatttaaattaatataaataaaatcaaatatggtagtgtatttaactttccaaaaactcataaatatatactattataataatttttaaagagaatttgtcacttgtatgtattaattatcaatgtattgaggtttttcataatagttttgagaaatattgtaagagagtttttggctttaagctattataaattagtattcaaatgttatttgtttttgaaaaatattactattatatttttttaaaaaaaattatattaaatacttttttattttttaaaataaatattatttatgtaattaaactacttatgatttttactttaatttatagtaactaaaaatcataattcgttacgtaaacagaaaaattaaatatataaaataaagaatacgtgcaatgcacataattttaatttagtccatcttatatatgggtgtaactttatgtcattatgtatcctttgtcgttaaaagaatggaatattattatatagaaattaatattgtgttatgttcggtataatttactaaatgaataaataggatttttgtccctgaactatgaactttgattagttttgcctcctaaatttctttc

SEQ ID NO: 228512 - DNA, 681 bp, Cannabis indica
ccacaaagatcacatgttaaacccactcttctactgttaaaggtacagaacgatctcctaactctaaaaggaattctttataaactaaacttgatcatttccaaccctgtagtcaaattaaccacattttgccataaaatccgggagctgtacaacactcataatgacaatcaaaagggggatgaagcttaaggatgatttgtttgtttgaccatactcaaaccacgctatcttcaaaggcagtcatctctttcgtctcttgggctccacctgcaaaagagattttaccttttaatcactaaccatctgcaaaggcatataataatgatataaacaaccaaatatttaacatatcccatgttctgtttaccaactatattttatatctgaattctgttcacaatcacctatttcgcccatcatatcacaaaagtgtatctttttgagacacctaaatatattaggtgcagcagtgattcatcctcaatatcattattatcatggctttaagctctagttatggcagtttatcaaggttgatcgcaaaacagtcgtacaaactgccaaacaaacattcttttataccaatatcaatagtaagaaaaacaaacagtagcctaaaatcagaaggtaatcacttgtttgtacatgttaaatgtcaggattttggatttttttttt

SEQ ID NO: 228513 - DNA, 1033 bp, Cannabis indica
aatctttatccaaatacgaaacaaaatggaaccaaaaaaaaaaacccaccattatatcaatagatagtatacatagatattatatcgttatatcgtataagagaagctgaaagtggaaatgtgaagaggtttacctgaagggtgaaattgacacggtcttgaatgggagagaggtgcctgcgatgctgctatatgatcaatcttcttcttcttattatcattgttcggagagaatgagagttttgtttgggtttaaaggaagaagggttttttccttctttttattttttcggttttcgcttcaatttttttgtatttagaaattttacccatgaactattacaactactaaattgtgccctttaaactagaggtgacaattcgtgttgagtgacgtgtcgtattcgggatgtattgaggtcttaaatttactaaaaaactactgactcgaacacgactcgcgacacgaaaaatttacaaaacatggacacaaacacgactcgaataaatttcgtgttgtgtagagttcttaaatttattttaaatggttgacaccaacacgaccggtgacacgaaaagtttataaaatacgaacacgacccaccaaattttcgtgacatgtcaaactcataaaatttcgaatcgtgttcgtgtcaacccgtgtctcgtgacctaaattgtgactcttactttgaactctaacaatatttatttaaatttaaaattgtataattaaaagaaccacatcaacaaaatgtttgctagataacacaaaacttaataaaagcttcttattccaacattttgaataatttaaagaaaatttttaacggaaaaaaattcgaagacataattttatagagaataaaatttcaaatagcctttttctaaataaaaaaacgtttcttacttctttctttagtttgcctttcattttattagggtaaaagaaaaatagtcataataaagaaaaataatagattagtttataattacttttttactttttcctattattattttgaaataatat

SEQ ID NO: 228514 - DNA, 1081 bp, Cannabis indica
gtgtccagaaccacacctggctgggtaaatgtgttgtctcctcctcaacatgtgaaaagcggcatctatatctgcattaaaagtgaagaaaactacaattagaacaaaaaataaataaatgtcgacatacatcgatattgttcgcgatttttgtcgatgcccaacacaccagaacaataacagcaagtgataccactttcacgatatatgtcgacaccattatcgatatatattgacatctaatgcatttcaatgcaaaaatgtcaactatgtcgacaagtgtcgcaaaacatatcaacaaacacacacaaatttgctgtaatttttcattttatcaataaaacaaattaacagattaaaatttattataaaaaaattacttacatcatcttccagccattgtccactcaccaacaatttcgtaaagaatgtcacattaccgacgccaatatggagattctggggacgattgtttgggatgtcaccaaacaaccacctcttcaatgtgcgtaccaatctacggtctggtggtctttccgggtctacattctccggaagaagccgcttcttctttttctcctctgtgtagtccagtaaatagcagggcttcttcctctttctcacaaatggtacctctttgggggatccggttaggagcaacacattgcatgggattgtgtgtcagatggtgtgtcaataatggccaacataatggcatccgtcggagttgtcagtgcatcattatcatcttcttcccaatcttctgggaacacatcttcatcctcattgtcatcagttggttgggatggtgcaggtgccccctctttctccttcaacagcattatcatgttcgccaattgagttgtgaaaaaatctttcatctctttctgacaatccagaaaagactgcctcatctctttctgactttcttcaaaggagcgcctcatatttggtttggctagtcactaactcagtctatgagagaataatggcagcatgttaagcctcaattttattcaacctctcaataagtgctctaatgtttgatgtattagctgcagttgtcggagcggtcgaagta

SEQ ID NO: 228515 - DNA, 880 bp, Cannabis indica
atactctattattataattaaaatataaaaacgtgcccaacacttttcatagacgtcactttatgattggttaccgatattcttacaatttattttcttaaattatatgtgacccactacttaattacaagcggtataatattaaagagaatactttagcaaaaaaaataattttatttgccccctttaattttttttctctaatcgtttgatcctttgatgcttatgcctccgtccttgattccaaacaacctattggatttttctatacaaccaacgattattttataagaaataaaaaattcaataaatacaaaaaagactcatatatatatataaatatatagtttattaacaaaataacatggattatatcgttgttaatcttgattcttgagattggattatatgttacaaacttagccaatgtggttgcagttacagtacaaaacaaaaatttgattagtttgggaacttttagagcttttctacatagaaaattaaggtaatacaccattgatagtgttgtttgtttcaatgagtcaaagacacacaacactgatctaatagatatatttacatcaacaaaacaagaatatgaagatgctgagctcaacttcacttaatttagttcaatttacaactctaataatagtaaaaagaaatcttcttgtataaatttttaaatgttcttttctgcctgcatctgaatccaactataaaatgtctaatgactaagactatgttatatatataaatatattctgtggtgagaatagaacatgaaaatacatacatatttaagtttttttcttttcaaatcagtgatcataaggattggagcagacagaggagagtggctctgttactcttagagatc

SEQ ID NO: 228516 - DNA, 1174 bp, Cannabis indica
tacttgtgagtagatctaagatcttggtaaaataatatccaacatatgaatcttcttcttccaaatcaaatacgaccccactttgcttctgggaaagacgctttgttaacttggttaatttagctatttggtcttccagatggctagtgttatcgtcctggaacttgcacccagaaactctatcatggatgtgatttttgaggtcatttccgcaaggtattgccttcttgcctctggttcaatctttctttgcattcaagcattcccagaggtccattgttgacatactatcttctataattaggtgaactttgtctactccatcactctagtgaatagaattacaaggcaatttttctatcctcatacggtaggcctttgtatctgagtaccaggcctatcgcccctcgcaactctgcctcgtggatcaattggctaacttttctctagagcattagctgccttctttttctgcaaaggttggttaacaagattcatgttgttccatggagcagttggagttgtcttttttctaagttcccttataacactttttcctttgtcccttgtgggatcagaagttctagaatctttagtgttttctttcttcatggtgttattttcccgaggagtgggttcatcaagaatattttcatcaggagccacgttccctgattcaattttggccgccaacttgtctgaagtttcttgtatttgacgagaattccttcctgatttgctaatttctttttggttttagcaagttctttgaccattcgaataacttcgagacctagctcgtagtaataaccttcctcttccttattgtcaccattacctttaggatctttgtcctcatgattatcatcttgatcttttaattcaccatcttcattgatgggattctcatgaacatacttctcattatgttgatttttcttgataagatgattagtcacttttgatgtatctcctactacatatgctttcacatgtatagtaagaggatcatgttatccatgggagtgtccccattacgagcaccaggttttttgacaggggttctcatggctaccattattgtagtgtaaaattatagtatccattctttctttagctcttaatgaaagtatcaaaatctttatcgagatttttgcaagccgatataaaatat

SEQ ID NO: 228517 - DNA, 664 bp, Cannabis indica
agtatcaacttaaatattgttttttattcatttccttattataaagtataataatataaggtattagagaaagagcacgaagaaaacggttgatggtgcatgtgcaagtagggtcattgggcttagcagttggtagacgttttggaacatttgcatgtgcaacattgatacttgcaaatgacctgaaaatacgaaatccttttttgtggctttggttttcggctctctaacaccggtaacttgtcattttctaagacattaccccacataaaacccaaactctttcccaaaccatcttacctctcatccctatataagggaaccctttatgccccttttacttaccacactagctcacaacacctcttatcttctttaaccaaaaccaaagaaataagaaaaaaaaatcacattaaataattacacaatggcagccattgctactctctctgccctttctcttctatttatggtccttaacctttgccttagaggcacttacggtgactatggaggaggatggcaatctggtcatgccacattttatggaggaggagatgcttctggcacaatgggtaagttacatttcatatacattaaattttactatagattatattttaattaatgtattgattgggttttttatttgttttataggagg

SEQ ID NO: 228518 - DNA, 870 bp, Cannabis indica
atatatatatataaatttacatatggatatcgatgggtttattatagagcctgaatttatggtgctcgatctaatctttcatatcatcaccaccaaaattataacattatttcagagataaataataaagacaaaatgtccccttttgcattgtcggaacccattaattacatatataaattatttatatatatataaatatgcatgtgtaaattaaattaattgttgtaattagcccatctcataacctaatacccaaattatatgatacataataattatcattatatatatagtgatggaatctcgtccccacatcacaaatacattgactctctgtgtctctttctctatctcactccaagtgggtcactcacacatctttattaagtttttctttaatttctttttttttattacttaataattatttttctatttatcaatttggctaggaagatgtatactttactaattagctttttttattaaatagtatttgtgtggtagtactttcttatttgatcattgaaaaaaactgttatttagtgacaattaaaatctcttaaaaccagattaattcttgttgttttaaccgcttgtttattggtttgttttaatgctattgtttctgttagactagttttggtctattattttaaaaaattaatattaaaataatttaattaaaaaagaaaaaaaaagaactctaatatctctttagctttccccacactcttctctcttgctctttctttcctcacacacactctctctttgtcgccggcaaatggagctctttcctcgttatcgaccgatggagctctcggcgctgacaatcccgacgagctcaacatcctctctctctct

SEQ ID NO: 228519 - DNA, 2001 bp, Cannabis indica
ccccaacgtttggaagtcacacctcctggcaaaaactttttctcccaagaaaattatctcactacattatgcaaataaataaaaaataaaaaaaattctccaataaaataaaaatacttagcaaatagtagtaagaaagtaaccaaggatatttacactggtggtagattaggctccattccatatttcatcaaaccatccatatgttgatctaaagaagaaaaattgttcaagtaactacaatttaggatagtcttcgaaagcacatattccaatcgacaaacctgggcgattatttatctaattcaaattacaaaaagaaacacgaaacacatcacataccacctacgagaataagaggaataaatgaccgacctggtgaagaagcctatcgttttcatcttttccaatgtcaaacaaatccaaatcaaagggagatccaccgtactccttatataacatcttctcatcatgtaagtgcaatgataaaacataatcaccatttacagcgttacttttaatgaatttccccgacttcctcatctttaacacagctgcatccaactttgctgaatcttcatcaatatcaacattgcttccctccttatcaatgttggatagtgctttctcaattgtaatattgaaaaaattctcttcatcaaagccccttattaactcctcacgtaattcagctgcctcgtgttgtaaagctgcaatctcatccttcaattcattaaattttcttatgtcatcaatgaattcctcaacaatggcagctacttttcttttatccatggacagtaaatattggtcctctactatcaaacaaatcaatattatatgaatttatatataaaaataaatttatgtgagagcagatttttaaactcttcttttctctgttttgtcacaagaatatcttatccttattgtaaaaagtcattctcatatagtcactcacgccacattaaataattcaaattgtaaaattattattttttttttaattatagcatatcatcttcggaagttgaagttaaattaattataagatattggttctgtaaatatggtggttatatttcttgagaaatgagagaaattatagcatatcttctttggaagtttaacttaatttaatattcaacaaaaaaaatgacaaacaattgggacatggatttggagttcaatatacgtgttagagcattgattgtttacataaaatctaaaaaagactacatcaaattaaaaaatatttaaaatatccaaactccttatctagctctatatatgatatgtttactcattgttactccaactaaaacttctcttcttcccaaattttctcttgattctcatcctccaatccaaaaataaaagcttgcaatggacgttgattactcgagagttcgatcacttatccaaaatatggttgcgcaactacaagcagagatcaagttttataagtcagctgttcatcaaaaagtaacatatgacaatgaattcacgagtgattcttgtatttgcaagaaggcaaaaaattaccgtcaaatgagaaaggaatatggcattctgatcgtttccaatatcaaatctgaaatcaagctttgggagaaggaactgcactacctaacattgaaagaacaagaaatgaatgttctcctccatggtccaagtgatgaagtgttcaaaaagtggttaaattctatgatgaaggtcgttgagtatccacttcaaaaagatggtgatgatgtcaaagtagatggcgaggacaaggaaaaaacagttggtaatcaaaaactcaaagaagaagcagagcttaatagtaaagaagacgttgagtttccagttcaacaggatagtgatgatgtgaaattggagggcgacgacaaggaaaaagcagttggtaccaaaaaactcaaacaaaaagtaaatcttcatagtaaggaaaacgacaatgaaagatccatagcaaagacagatggaaatgcatcaaaaaaa

SEQ ID NO: 228520 - DNA, 1794 bp, Cannabis indica
cttcaggaaaaagataatggatctcattccttcagagaaaatctcaaagccttcttcctatacctagccgccaccttctctctctcttcctctcttctgaaaatcgaaccctatagtgagtgagtaagtgcccaaacacatcaagtggtatctcagtcatagtgtggaaaattgtgaagaatccagattcaagagaaggacattcgtgctcagatcttggtgatactctgcgacagaaaggatacaagggttagagatctgagtggaaggagacattatattttgctgcaaccactataaggtttcttatactttatatgtgtttatttcatatcgttttagaagttcatatttagaatgttaaataatacttgttagtaaatctcagatcctggtaaaatatttccaacagtaagtacttttgctggcgcagttcattatgtcgctggcaaaaggtcacgccgacaagccattgccggcgacaaatggcgccgccaaaggtttaccggcgagttacacgtacttttgccagcgagcttaagcgccagcaaaagtagcttttcttgtagtgtcgaatactaatataattttttaaatagagcatacggatatataggggccacacatgagtatctcggcccgtgacaaaaaatttcactagcaaattttcgaacacaactaaaaaccaagagtatggtttttatgttttgaaatacatgactaacatcgtcgctcgtgcaaaccccaatcgttacatacaagatcaaaaagctgtaagttttaattattgattatagtatttattataataacaaataatatgtatatataaactcatataaatttttatttttttttaacagtttggagataagcggcaatacaatctaaaaactgaattgttaccaatatagcgacagtggatagaacggttgatggtggtgattcacgatgacgaatgatgttgaaagacccaagaatttttcttccctaggttatttttttaggttaacttgtagttatatttattcacttgttaatactagggctaattttacaatatttgtgtaatattttattacttttatgaaataaaattaagtattttggccaattctaaaattaatttaaataatatttatgaatttaccttttaaaaaagtaaatatgtaatttaaatttaaattaaataaaataatatataatttaaataaattcaattaaattgaaaaaaattgaaatttgggtatgtatggcgtaagtttctatgccatatatagtgttagttattagctaggagttgacgccatatatacccctatggcgtcggctcctagctaataaccgacgccataggggtatatatgggatcagttatattaaaccctacagcgtcaccctgatcagcgtcagtagcgaatttcgccaaaaccgacgctgaaagccctaaaaaactgcctttaaaggtagtttttgtagtagtgttttagttatattgtggtgtgcatcgctaaaaagtattagaaaatgtccttagtatattttgaattaaaattttgatataaaaagattcataattttttttatcacattttagttttaatattaatgtttaatttattactagaaaaaatgaacgcaatttagtttagatagagaaaatttttagggttagtttaattgtttaggagaaaaaagtttagcatagtttattataatttcagtatagctttgttaatgtttaattttaaattttaattttataaaatttatttgatattggaataattaaaa

SEQ ID NO: 228521 - DNA, 1310 bp, Cannabis indica
gattaaaactaaattaatgacaatttgtatctaaatactatgttttagtcacaaataatttttattgggactaaagtcatatttagtcacaaaaaattaaggtgggaacaaaaaaattgtcactaaaagtaataattttttatagtgtggtctacgacaaggattccccttctttccatatctttaaatcgggatacccgaacttgtactatcctcatgtacccgtaaacttgtgaagatactcacaggtcgggtctgacccgtctactttataggtgggttacgagtttaagaaataaaggctcgcaattacatgtccaactcgttaatctccaagcctgccctttaacaaatacaaaataataaaatttccaaactatacacagccactatatctttatatattaaaagtgtttatttaacgacatttcttggtttaacggtattattttaacgttttatttttgtagataggaaagttaacgccaagttaactccgttaactcttataaaagaaaaaagaactgtctcacgattttctctcaaccatctcttgtgattttttttttaagattattgatttagaattaggggttttttttaagcctcacctctctcacgattttcctcagcgacatctcttacgattttttttctttttcttttttgctggaagactattgattctttagagttttcgactagaaaaagtggctgggaaagtgagtttgctcaaattgatgaagccaatgatttaaatccaatcagacaacaacaaatttgctggttcactaccctgttgattttcaataatgaggttgggtcttagatgaagaaggtagattccatttgcactattatttgttttacaatgcattatcatatatgtcaatatattaaattatttgatattttgagtgatgtacttctaaattttctaaatttctgcaatttctctcttattattatgtatgattttaacttgatgaaggcagtagctccatagtttgctcccatgaggtttggtgttctaacacacaaaaaacgaacaattataatttatttatatatatttcttttttactgaaagattataattcatatttgatttcaacaacttccgtccaaaatcatccattttagcaccaaaaaagtcattccctaccctaattctttttttttatcctaatctcaacatcattctcatcggtattaaggtcgatcgcctgttgttgaccgaagtttttggcaaccaataaaataatataagattagagaactgtaagaaattaagagaaggatttttacgt

SEQ ID NO: 228522 - DNA, 2440 bp, Cannabis indica
aaattatttttatttttaaaaactaaaaacgatttttaagttatgaactcagacaattcttaaatggttttctcaaaaattgtaaacttgtaaatacgattcctaaaatgagaatataaatataaaactacatatatgaatagagagcaaggctttaataaaggagaggagttaaataaagtggtcctatgtacgagtaattagaaattatttagcaagtagttgtttggtagagtaggatgaaaagttcataatcaattcataccgcatacgatacgaccatatccataaccgaaattcttaagtggtgtttggttgggaggaatgaaaatatagaaatatgaatgtgaataggaataggaatgaaataaaatttaaaaagcaaaaaaaaattgataaaaaaaaatcttaaattttttcccaacatctattaaaatggtctttccttctaattcaagatggaatagtcattcgaccaaaatggtgaaaaagttattctattggaaagacattcttatactttaacgacatatttagtttgttgtaatgggaatcgtaatgaaatcaaattaccattacaatgtttgctttgcttttaaaaatgatgtaatgggattacattgtaatcataattacagaagaagattttcagttgggaaaacaagttcctctctaaagcggggaaagaggtgttgatcaagtctgtggctcaggctcttccaagctatgctatgagtgtgtttctcttaaccaaagaaatatgctctagtctagaagatttaatggctaaattttggtggaagactcaatctaattcttctcataaagggattagttgggttaattggaagaagttatgttaacacaaacatgttgggggcttggggtttagagaccttagaaactacaatctttctttttttggcaaacaagggtggagattactcactaaggaagattcacttgacttgttggaaggatttacaaggctcgatattacccgaggggttcttacatcaatgcagaactaggacaaaatcctagctttatttggcgcgtatttgggaagctcaatcccttattcggcggggtgctagaagatctattggagatggctcttctgtgagtgtattaaatgatccatggctgcctcatgatagtatgccttatgtccttactgaccaaggtcttgaagataaattggtatccaatccgatgttgatggaagaaaaagggtgggatgtagagatcatagaagatatgtttgaagaacgtgatgcccaactgattttgagtattcaactgagtgactcaacaaccgtgaattcatggcattggatgatggaaaattcgagtttctataccgccaaaagtgcttataattatcttcaagcttcaagtggtagttggcttcattttgatgatgagagctattggaaaaggctttgtaagattgatgttccttcgaaggttcttcactttttgtggagggcttgttcgggttgtctccccacgaaggttcaacttagcactaagcatgtgaatgtcgatcttatatgtcctctatgcaacgtctactatgagacgatttttcacgtgcttgttggatgtcggtttgcccaagcttgctggcacctctcggccgctgtagttgctactggtgtggacgagttcagcagctggtttttcagccttatagacagcaagcaaactgaggtggttgtcggtgccgcaatgatttcatggagcatttggaagactcggaatgaagtcttctggcagaacaaaaactatactgcgttgagagtagttcagtcggcaagaaaggccccttgatcaatggcgcgttgcaaacaagaacacaacagcttcttttgctactggtgtactttctaatagcaacatttggcgcaaaccaatgggtggaaagatcaaggtaaatgttgacggtgctatctttgaagctcaacgaatgtttagttttggttgtgtggcgcgtgatcatgcgggtcagctcttggaagcaatttcggattcaaaatttggagtggtgttgcctgaaattgccgaaattgttggtatgaaggaagcattaagctggattaaagaaaagggtgggaggatgtgttcatcgagacggattcgttaatggttgttcaagcactcactagttcagttcatatgccttcatactttggtttgttggtggaggattgtcgtttgattttatctactttaaagaatgttttcatttcttttgtgtatcgatctgctaacaaagctgctcattctcttgctcgggcgtcttgttctttgtcaggttgtttgtttaatgagcgaaatgctcctatctttttgaagaacattgtaatggctgatgctattccttaataaaattattttaaaaaaaaaaaaaaactctaataccctttttatataa

SEQ ID NO: 228523 - DNA, 1495 bp, Cannabis indica
catctatcatgaaactgaaaatccttcttgcatccaaccttagtcatgattcaactaagtactccattccaagcacaaatagtaacggggacataggatcaccctacctcagtccttagcttcaaagaaaccatgtagagaaccattaaagagaaaagaaaatcgaggagtggaaacacaagtcattatgagtttaatgaactttgttaggaatttaaaggcctctagcatttcttctaaaatgtcccactccatagtagtatacgccttttgaagatcgagtttgatcatacagctagccttgttcgttttccgcccatagtgcctaataaggtcttgacatatcataatattgtgagcaatatatcttcctttaacaaaatctcctagattttgagaaacaatttcagggaggatttgttttaatctagcacatatcatcttagttgctattttgtaaagaacattacagcaagcaatggggtgaaaatcactcacaatattggggcacttcacttttgggatgagtgtaagcacaatagagttgatctcttttaataatgcacatgtatggagaaaagaagtaactgcagcagtgatatcatccccaatcagatcccagttttcttggtagaaagaacttccataaccatccggtcccggagctttgatactaggaatgctgaatgctgtggctttaacctcctcgcctgaatactttttcatcagcaggtgaatgtgatcatcaatgattagtgctccctgctggacaattttttttgttcacagactttcggttctgaattttagagcctaacaattcctcatagaatgacaagaaagcatcagtaactttagtttgattttctactctagtaccttctttgttgacaatagagtagatattgttttgagttcttctttgcttgagtgcctggtggaaaattgatgaattagagtctccttctttgatccaagtgatcttcattttttgctgcataaaggagtaatgtggttgttgagtttcaagaactttgtttcgggcttccaattcttcttcaaggagtacaatattaagaggatccttatgcagattgttctggcagatctccatatgctttttagccagcaaatgaacattttgaatgtcacaaaaacaatctttattaattcgcttaataacctgcttcaaggacttcattttcgacacaacctggtacattttagttccagaaattggctgattccactcatcttcgactagcttcttgtactgcgggtggcttccccacatttggaaatacttaaaaggctttttcccagtaacaagagtcgggtaaacacttagtatagcaggggagtggtcaacaagcccttcatttaggaataatacttcagctatttgaaatagatccatgcatgcccgattagccatcactcgatctattttggaacaaattctatctcctccttgttgcttattactccaagtaaa

SEQ ID NO: 228524 - DNA, 1895 bp, Cannabis indica
ttactaagaattacatactcattattttttgaaggaattcttctaaagcttagtttcaaggttgtccaaccaactccaccattatgtaaggtggccgaacgatagtagctccgacgatgggtagtccgattggtagtgtgctgtgtgtatggtgtgagtttcctagagagagagagatgagaagttcggtcagtgttggtttttatttttttagaagtaaaattggagaaaaatttaattgtagcatattttacatgataaaaaatagattagcatacatagaatttcgaaagagacctccttcttctacaaaggactgatggtttgtcttatattgacccttcatcttttactactcctttctgggtaagagtacttcgagtccctttcaaaggtatgaatgaatcaactgcacgtttttttggaaatttactgggaaaatttataaaggtttataataattctctagctaataattggggtcatatcatgcgtattcgagtcctattagatattaatcaaactatacttaggggaatgaccctttccttttctcttgaaggacctgcttttgatgttgattttcaatatgaaaaacttactgatttctgtttctactgtggatgcataggacataccaaaaagttttgtgcttcccataatatactattcgaaaatggaattcaaccaaaataaacatatgatggtcaaaaacgcagggctccaaatgattggtataagttttataaatgtgttagtcaaactataaataaaggtacaagatttttaagtgagaaaagtcaagtaaccctgccaattgaaaagactcaaattatctatggtgctcctactgaacctgctactacagattcattaattagtcctactctggaaggatcacatatttcccatttatctaagactatacctatccctccagtatccaaaagtgatggaaaaaggccaatggaaggtccatctgcaaactcaatgaaaagtatgaaggttacaccatctaaggaagatgatattttgcaaaacatggaggctaacaaagtggttaataaccctaccattatagatattaagaagaagggtactaaataggctgagttaataaagtaacaatgaatttagaattttacaatgtcttactttaattttatttaattgtatgttaattaactgtccttatagtatagatttcattgtggtgtatttgttttgcttccttttaatgtaagaaaaggccctgtggcaagattaagttctctttgattttgtgttaataggctatataatgttttctttatattgtaaaaatctatattacgtggcttattttattataaatttttttgcttttgttaattttagccttttttggtaacaaataaatcatatattgattcaattatttcaaaggtagttacgaaaagaaaatataatgaatgttaattttttaaagaataaacgaaagttcacttttgaatattataaaagtatataaaataactctcaaatacatggcttaatacaatatcagcaagtgtccaagtaatttaaaatttaaaagataaaatcagtgttataactactcatttattcctaatttacagatgttcttatccttttcaaaattgttaaatattcattgttcaataaagtaagataaaaagttaataacaccattcaatcattcatgctagtcttaattattaggtctagaatttgggttgatacactatgagcatcctttcttggaatgcacgtggactgggtaatgaaggaaaaagaagacaacttaaaaacttactacgacaacaccccgctgatgtgctttttatttcgaaaagtcatcttaaaccagatcgaatggaatatttttaagaaat

SEQ ID NO: 228525 - DNA, 4574 bp, Cannabis indica
cgggaattaagttgtgttgtattcgaattatgttgggttaggttaaatgttgaggagtggctgacatcaggaaaattaggaaatgaccattatatccctaggttatgttatagcttaggtttctaaagaggggtagattagtcattttgctagattaggtgctttgtcttatttgattttgggctgattattattatcatttaagtttaattatttttttaaaaaaaatataaagggaagtttatgtgggatttaggaggataatgatcaaacttaggaataactcggtgcagctctttctctcccctcttttttggccctagaaggaactcaggagacagcttgctcatctcaattcaaaccaaaatctagctaagaaacaaccctagttgttgtccctattggttgaggtaagttcttgatgcttacttctttgattttcttaagttaggattagttgttggttagggtattaagaatttggggctgaaatgatatgttgaggtaggattatgtttataggtttgttttagggtttgggtgtttcaattaagtggtttagtgtctgcttgctttaatttgacttagatggtgattatttagtttaatttcatttgactatgcaatttggagtttatggaagaattgttgtaaattaatgcttgagatacatcgtatttattgttttgaagtgtgatggggtgtttgaataggtcctttgtggtttggttgggttttgatgcaaaaacacaagtctctcttttctggaaattgaaaaaccagtttaccggtttcacatgcattgaaaccagtcaaccggttttgctagcaggggaaaactctagttttagcctcaaaaccggttttgattttgggtgtctcttagagcttagattagggtattttagtgatatttgaattttctaaaccagtaggaagtttcatgcccagttgcagagattagggtttgctttcgaagattggatatgttgtttatcgattttttattgttgtgacataggattcaagatcgtcgagcgtaattccactaaggttggcccgtacacttgattcctggattgaggtaagaaaagtgttatacattacttagggttaagtgattaacaattgtatggttgtagtctcgattatgatcgagagcttgaataatgagtgcttagcctaatttatgaccgagggttagaaatgatcattactgttatgagtaattactcctcaaatcgcgaataggtttcttatttatcgtttactttatcgggcaacgaaagtgacatatacagctcgtggttaactagtggtaagggtactttataaattaccaagattgtgtttacgatattgtgtaaatgtttaatcatgttgatattaaattgaatagatgaatgttatattgactattgatttgttcacttttctttctgagtctctatgactcacgggtgctaaatggtgcagttaaagggaaggccaaagttgagctgccatgagtttgaggtcgtcgcagcaatatacatatctgccgcggtgcaacgacccagtggacatgataacctgtttgactgtattttgaagtataattgtactttgtaaagcatttttgaaaccaaatgtaaatattttgtattaaggggtcctcgtaaagattagtacttattccttataaaaaaaatatgtgtttattttgattgcaaaattttaattaaccacacttttggtataattatttaaatcagtaaaagataattttataaaagcacacacgtggcgtccctgttggacagggtgttacatcaaatacctccaaaaattaaggagacagttgaggtagcttcgcgttggtcacgtctcctaaagcgagaagcaccgaccctttcccctatataaagggtcatccatgacctaggaaggggatccaaaattttgagcacttacaaaaaataaatactttttcattctttgcaatcaagagcctgttctagacttttgcaactcagattaataaaacacaaggggagtaaactattaccgacatctggggccgaacatctttaaattttggtgtctttctttatatttattacaaattcgagtgtcattaattgcatttattgaaataattttagtttaaatctcatttattacaactccgcgtcggttggttaaaaatccagtcaacattttggcgctttcattgagagcttcaaccaaaatcttgaagtttttcaccgaaaaaaatggtgttaacatgaagatctcatgaacgacctgacaaggagatggataacacccagcaagttctatcagcaagcaatctcgccgacaacaatggagaatgaatccctcgtctggggaacggtggtgcagccaccacccatgccacttctcagactgatgttggtcatgggaaaactggccaaactactgccgctgggcagacagctgttgggcataccaccaccgccaccaccacaggagacggcacgattgacagtgccaccgaaaggggtaatctatggacctgaagagcgcccaagcaatcaagaaaaggctaggagtcacccctccaacagggttccctgtaacaataatcgaccactccttgccgatgaacaagtcctactcgtcattatatgggacatgatgactcccataatgtccgtttaaggtggagtggtggaggaaactcctcgaacaacaatggtgaccgtggtaaaaacagtagaaggacaccccaacatagggagtggcaaccccgcgaccaatgtggccaaccaagagagggtgatgatagcttgagaaatagtaggtccaaggggagaagggaagaccccaaagtcaatagtgattatcatccaaactaccccgacggtcatggcgatgatgaaggtaaaagtcggaccaacaaccaacaaaatcatgagctggggcttatcaagcaggagggttgtatgcccctaataggtaacaccaacctaagaatcggccccaaaggggtagagataaccaagcaccacccccagtcgatggaagggttgacagtcaaaatgtaaaacgaaggccaagaacggggtagagaccttcgagatgccctcagtagaaatatggataaatgcagtttcaacatactaaattcacctgagtcggttcaaagaaaccaagagaatgttgacgttaatatcgttcaaccccaagcagccacaaatctggtgatctaggcttggttggacaagttgacccgactagtcaaggaccttactacaccaaaactcattgacttggaactagaaaggagagggtctactttcttccaaatgatcaatgacctccccattccagcaaaattcaaaatgctcatttgcaagtacactagtagtgaagaccccctaactcaggttgagaacttcagaccctgatgtcacaggttggctggtatccactgcagtgactataaatcccagacaacctctgctcatcaggtccttagctttcaacaatgttattcttggtattcgtgccccctgaaccttacccacaaacaccgttggttagcactatcaagcttaaacaccaccatctttcgtttatagtcgatcgttgccccatactaagatagaaaatctattccaaggattatgtccaaaatcagatagttgcaattcaattagattggcggtcaattcacaactgtcaatccaaaaggacatagaccaaatccacctagtggatactataaggtctctcgagggtaacagggttccaaaccctgaagcatagatatcacatggcttatggaaactttcaatccatctactcgacaaataggagtgagtagctcccaaatcaaacaacacagtatatgaacaaccattaatagacaatggacctgtcacaactgacggactagcatcagcgttaacttgagtcatggtaaaaagtcgccccagattctgtgtagtattcttcttaggctcctctttcttggcctgaggaaaatctctaataaagtggcccaccacgccacattggaaacatgccttggcccaacactcacccggatggtgtttcttgcatttaggacactcgggatatgatcggaatgatgacccgcggccctgacggccacctttgtttccccaaaacattctattaccccctgatgctccggcagcctcagccttccgtttgtgatcagggttgccactgtcggtccccttactgccattaccactagcgggaggattcggtgccgtgacggcatcctttacattcttctctttcgcaacatgctgctcagccttttcagcaatcaaggctacctctacaactttcttgtacaaagtgtcatgtgaagtagtaatcttcaagtcccgattaattatggcattcagtcctctcacatatttcagttttctggtgaaatctgtgggcaccagagcaccagcaaacctcaacaactgataaaactccagagtatactcggccacagaaattttcccctgagtcaacttcacaaaatcttccatgtgtggagtccttacagcaatattgtaaaa

SEQ ID NO: 228526 - DNA, 988 bp, Cannabis indica
agtagcattactcatatacagtggcttcatttgttaaaaggaatattgtaacatacttgtattgctgtttcagtcttctagatactaatcacagagactgttggcacttatttcaattttaatcatgtgtggtagttctgaagttgggtagaaaggttatttttaacaatgtgtttctatcaaatattacgaaacagagtgatttttgttacttctttagtcagtcaaaatactacactcctctcctacattaacacacaaaatgtactgatacaacaaaactatatttcagtacatgtgctcttaggcttctatttcaggttatgtgcattttggttttgttggtgcccactatagtattctcacttgcaaaagtttcatacatgacaggtggcagggttggtcagttaattgctgtaatatttgacacataaataaaagcatttgtttatgaatatggtatatttttcattagttcactttgttgggaactgaagtttgtttcaccagttcgcgtttggctgattaagtctctgaaaattcaacttgcagagaagctgcagttaagttcaccaaattcaagctaaactttacttatgtatcctaacaaaggttgaggtgaagagctactatttataatgtctgataaaatctgaggaagactcagaactttccatggacaggagacttatgtgcttcggcaagtactgtaaccgttttcgttacttttcgttgatactattaaaattgtcaccaactttggttcgaatgtgtgcatgtaagatgaatctccattgttagttatgtttaatttattttttctacattttggatttactctcattgcttattctattgaaatgtaagtccactgaaattttgtatacacgtcgatcattttaaacttgaaaaccaaaaaataaatcaatgtaacctctcttttgttcttgggtcctacaggttgatcatgatattgacatggtatatg

SEQ ID NO: 228527 - DNA, 3784 bp, Cannabis indica
atctcaggattaagatctttgatctaagatcaactatgtgaaattgacttagaaaagatattacggtaagttgatgatattttttccactgtcaatatccttcctgtctaatttatagccaatacatctgatactagtatactttactaatgccctagaaaggacattccacatatcattgtgtaggtaaactttatcattgattatcacgtcagtgtaaatccagtatactgataaatcatgggactaaatagttttaggcatataatcaaaattaccttgtactatgatgacatcactataattgtgaataactatatattcaggattcaatagaacttatatattaaaaccataatcatgaaaattacatgtaaacctaaatgatttctaatcttctattgataataaataagattatattgaaatgagttttatttagggcctaacatcccaacaatttgatgattaccacagttgacatgactacctatgataccaaggtggataaggcactacgagctgaaggcatagtagagtgtattcagaagtcccgagggactcaaaatgttggtggtggtggggccactgctcctcctacctctagtttcggtaagggtggtagttactcaacttctgatcaaaagagaaaagctccattttcttctgatggctctagccaaagcaagaggttctgagggaaccaaggctatagtaatcgatagggtggttcagagagtcgtttcacttaccaggaatgtcgtagttgtaagaagcatcacttgggcgagtgcaagggttgagcatgtttccagtgtggtgtaactggacattaaaaaagagattgcctgaagttaaagaaagaatagcagaagacaaaggcaaagcctgctccaactagggtgtttgcccttacccaggtcgatgctgaagctagtccttcagtagtgacatgtcaactttcagtcaacaactctttttactctatattgtttgattttggagccacacattcctatgtggcggccagagtaattaataaaatgggtaagccatgtgacaactatgaaatagggtttagaatattgttacccggtagagaattagttatcttcaaaatgtggaataggtctatgccaattaggattgaggatagagagttgagtgttgacctggtggaattaagtttagcacaattagatattatacttggaatagatttttttgtacaagtacgctgctagtattgattgtaagtagaagatggtgacttttcaacctgagggtgaagaaccatttgtatttgtggggtaagttcaggattttcaaattccaataatctcgttgttgaaggctatatatttgttgcaggaaggatgcatagggtttctagcagtggtattagataccactcgggccaagttaatttgacctgataatattaaggtagtacaagagttcttagatgtatttctagaagaacttctagggttaccaccacaacgagaaatagagttcttagtggttgatgttagatgtcaatctgggcgctgggatgtcaacctgagcattaattgggacctgaattgccttcagtaaaacagccacaacacattcaatttttatctgattgacgcgattcaacttgcattttgaagctaattcaatgctctatcaagtcatgtgtcacactctagacgtaattctgaagctatcgtgtcaaaattcaccctaaaggagttacaaaaataagctttaaattacccatagcgggacctgtcgggcactaaaatttggccatcaccaccgaaagctaattttcaccgttagatcatcatcaacagtcgaaaacactttatttgtatttttacccgatttttgttggcctccttcacatctaaaaggagagatccacaagtcattttacatattcagagaactacctaaaaggtcaaagcttctctctctagaatttggagcttttaacacttattctattgctgtaattaccatcttgtgagaaataaaaacgcgaagtagacatagccccattactatcacgatataggggtgaactagtataaatttgttgtgtctctcttataaatatttaactacttatccattctcgcaaatctagcaagatggtgtgacttagaagtctagtccagatttttgagtaaacaatattattgtttaggtgttctatagctgttttatacttatttttctattattttaatgtgttttttagatttaatttttttttattaatctcatatgtgtaggtgtacaataagaataaaatcaattaatatattttttaaaataaaatatattaaatatataaaattataaatgtatatcaaaagtatataaatataagtggatgaccaatattggatgataattggatcaattcggttcgattcagttatccattggatcggatgtcccatccaacaatcgatccgatacgattaaatttttataatttacatctgatatgattcaattatggttggatatctaattctactagatcggtcggtagttggattggataattttttgtacactcctatacctcattttaaaattataaaattttattatttctatgattaatataactatttatttaatttctaaaaaataaattacctttttaactgtcactaaatcaaaaaggaagagaaaaaagagttaaaagtacgaaattgtaataacaaatttcatgaagaaaatactgtagcggttcaaaaagataaattaagtaaaaaaaattgatatacaaaaacatccagatgagttgatattgttttacatattgcaacgaggttattgtcttgttatttttctgttattttgtagctttctttctgttattttatagttatttttatgttattgttaaggtatttaataattattttttgactatcttaattgtttttttattttactaaaatatactatttttataattttaaaacttcatgataatatttttaaatatttaatatagtaaaaatataaaaataaaagtataacaataaaaaataataaatatttttgtaagaagcacattaagttcatttgatcaaatgaagtccaacctaaaaagaaggggtaagttgaaaaataccacttttattaatcaattgatcaaatttatctctaattttatatttaattaaaacatatattttttaatatgtattgtatctaaaattctctgacataagagatttatgtggagaatatcttgaagtgacaagaaaaagttgatacaatatttacaaaaaaaaaaaaagaataaaaatagatagaactttaaaataataaaaaagaatatagagtataaattacccaaaaaaaaaaaacaagaaaaaaaataagaatagaagcaaatgggtccacgttatggcccaatatttattcatctaattcaaagtggatcatctcttgaaacagcttcattccacacggcccatgcttcccatgtacagtcctaatgaggggaagaaccaatgaatggaccctcagtttctgcaaccgatacggattctttatttaataataataaaattatttttcaaaaatactatctcctacattattatttaatatattatttattttaattataaatatatctatactaaaattttaaaaaggggtaagttgaaaaatgcctcttttattcatcaattaatcaaatttacctctaattttatatttatttgaaacatatctctttttatatgtattgtacccaaaa

SEQ ID NO: 228528 - DNA, 1545 bp, Cannabis indica
tttcctttatgaaattttctttggtaaaatccaaattcaaacaagggcttagtatatgataagtaagccatcatcaccttaatttcctcactattcattttttatattttgagatggttgtgttggaaaattcaatgcaatgcacacacaaagataaattcattttacaccagatataggaatagatctgtcattacagctttgtttttattggggcaatatagtggatttaaccatcaaaatatacataatttaaagtataaatcaaacctgcacttttgaacaaccatttctcgaagttcttccaaatgcagatcaagctcgtgcagctgaaataagtgcatcatgatatagctacaaagttcaaccatcatacttctcttaaagtataaaaatatcttaaagcggaaatatatgacacttgcaaaatcattttcaaattgcttgaaagtaaatcataattatttagaagtgatttatcacttttaactatgacacacctcattgtttatatctctagccattttgttatgagccgcctcataaacaagctgaatgttcatctgcgcctctgcttcctcctcctctcgtcttttttcctgtaagcatgttgctctagaagtttagtggtgaagaaatcaacaagtgcccaggtccataaaaacaaacaactaataaatgagtggatcaaacaagcaaatacctcttctataaccttaggcagaaattgcagccacttctcctcaaactttttcagcaaagttttggccataacatgaacgttacttctctcttcattatatttcatagcatttttgaaaaccaaccttacatcaccacaaatttgtcgaacatttttatatccagtgccatcgttagcctccatttggttttttattgtattaaaatccattggcttgtcaataacctattaattgaaaattcaataagatattaagaagaaatctgagacaatagcataatgcaatcaaggattttcttgctaaagtcaagaaaagagcatttaattacaaaagttaactatgcaggagaagaattctaactagctattataatctcaatacatcctcaataaggctaaatacattaacagtgagccataatttataaatatatatttaaaaaaaattacaaagagtgccactagacctgtgaaataaatcttgtgtcaagaactccaaacacaaacgcctagcaagtaatatttatctcacacctagtctagagaacatgttacaccgcctgtacttatcatgcaatcaacagttgaatactttataatgtacatatttcccatgacatccagttgaaaccataaaaggcagagaaaatatatttaagcttaaacttcacaaattgttacatacatatgtaaaatgtgcaagcccatgctacacatgtttgtgcatactcctcgtttttcacaagtataaaatgtgcaagcccatgctacacatgtttgtgcatatgactctctcatattcatgttatacctgcaaactacattggagattcaagaaggaa

SEQ ID NO: 228529 - DNA, 1805 bp, Cannabis indica
gtctctaaagtttaattggtgaaactaataatcacattttgttggatttataagtagcatgtgtgagttttatattgtataatatgtgttttatatgtattgtgcctagagttgtctatttttatatatatatatatatatatatatatatatatatcactatttttcatatacccaattaaacactaagtgtgacaatatttgcaggttgattggaatgatattaatcatacttggattgtattcattcttgtaggggaaaaaagaaagagaacaaaagcttaagttcatgatgagaacttagaaggagaagaaatgagtactactcatcaaattcaaacattgccaacaacttcaccaccaattactactccaaaacagtgatataaataaaattaacataaaactaaaatatttctatgtagttaagctaaacttgttagtgttttcagtttgtctttagaattgtaaagagaaatgtaatttaattttggattttatacattttaatatacacaatcttatacattattatcatctattgagtaatttgcgacataaatatttaagtttaactctagttgaaaatacctaagtttaatttttggcagtaataatacttaaattatatttctggaacttctataagtacctggttattaattattaagtaaattatcacgtggcaatctctgattagtccacatcattatatttctttttttgaaattaaatataccaataagaaaatgacacgtggataattatttaacaattaagattaagtacctatgaagttccaaaaatataacttaggtatttatttgcaactgaaagttaaacttaagtatttatgccgcaaattactcttatctattatactcaaaaataaaagtagttattaattgatggtaaagttcaggtttcaaactgagaaatgcatcaatgatattgaatcatcaatggtatttatgtgttatttttcactaattaagctcatgattggcactagaattggctgcttcttctttcaccctttgcatctcttttcttttccccacagaaaagagtacaatccaaaaattataagtacaacacctattaacctgcaacattcacattattaaaattaaagcttaattatgtatataattattactaggtgttttttctttaataagttatattattatatacttacgttccaacagtgatgggttcaccaagtgtgagagcttctaaaaatgccacaaaaataagagcaagaggattgaacattggtggatatgttgggccttgaactgatatggcccatgaaagtaagcacaaattcactgctgttgctaatattccctattaattaattaataaaaaacattaattaatataataataaacacattattaattgattacattattaaaagagcttaattaccgactagattatagtaaccaattgaagattccagcctaaactccaagctattgagtctgtgttcaaacataggcctaagatcactgattgaaatgaagacaaaatacatgtcaacatagttgacaagtatacaaatggtaattgtttttgtaattttacctgcaaatccaaaatataacaaacaaaattaggagtaattggtaaaaacaatgtctcaagcatttgagggaccgaaatataaataaatttgaaataatgtatttttaagcatgtttttgagggggaaacttaccaaaatattagaatttgggttaacttttataaaaatactgtcacacgaatttttttttcaaaaatactgtatagt

SEQ ID NO: 228530 - DNA, 2281 bp, Cannabis indica
atattccttcaaactctcttttccaccaaacataacccaaaggcgaaaaatttaaaacatcatcaatcacttcctataagctgacaaataaattttagtaagtcatctactgttttatattcaaagtcatataaatcaatcaaagaggaaacttcagaatatactctctaacctatttattgttaaataaaaataaaataaaatgagcagctactactctctatctactaagtccaattcttaacaccaaacttccatttcaataagcatcaaatttggaccaaaatattttgtcgcaaacattacaaaaataagtgattccctatgcaccgaactaaccaacaatgatctttataactatcccccaaagtaaaataaattgtcagaaagcacactacatcatatggtgtcaagttgtatcttttgaaaaacatcccacaatgtcaatatatatagcaaaacacgaacaaatcatctaagataggtcacccaaaaacctaattacaaaccctgattcaatcaataataattataaacactattcacaaaagtaagtatttggcttagaaagtttgaccgaagtcgtaaaagaaaaagaaacaaatacgaaagtgttgcttgcttaccacgccggcatcactgtaggtggaaatggaaaatttctgatcggagttataatccttagttagaagatctaaatccaaagtgagaacaaccggtttcagacaaaatttgaaatataaacaaatcgaatcaaaattgattggacatggaaaaaggtgtagtaagagcaagagagtagttattacctttagctttctttccgatttcggtgaagagtcctggtcccttgctcatctttgcagagagagttttagagagagaaagaaatggtgggtctattttggtggtggctgcaaatgtggtgtgatcattttgattttattatttcttttacaacatttcatcgacggctgtccttcattttccctcacacgagccttttccaccgttaattttattaacaatgaaggtttgtgtgtgggttagcatctgctagctggctatctgattcaaaaatactcctttttttttatttttgttttcactttttactttttttttactgtattaaaattttaaaattactgtattaacgtttaaaaattataaaaacactgtgtattgataaaataaaaaaataactctaaaataacttaacaaatagcatgaaaataactataaaatatcaaaaagataattacaaagtaacaaaaaataacaaaataataacttaattacaatatacaaaacaatatctattcattaatatgtttttgtattgtgattttttttccttagttttgataatttgatttatccttttgtactgctatattatttttgttatagaatttattgttacagctttatatttttaacttttcttttctctcttttccttttttgagttagtgacacttaaaatgataatttattttttaaaatttaagaggcgtttggtaatacttttattttttaatcgcaaaaatgaaagtaaaatttgtatttttttttaaaatgtgttcaataactacttttgtttttcagttttaaaagctgaaaataaaagtgtattctataactttatttttctttttttattttttcaattttatttaagttgggtctaagtccgggtctgaggtcggggtcggagtccaaaatattgattaagaaaaaaaaactgtttaaaaatattttaaaagtatttctttttttaaattcttaaaattttaattctcaattaaaaagtgaaaataattttatagaacatgtttttagaaaatattttcacttttctaattaaaaaatagaaaattgattaaaaaaatgttaccaaacgtaccctaaataaataatatacatatctatatatataaataaagcagagaaatatcactctaaaatcactccaaataattttataatttatatgctctttcctttgttctctcatttattatttttaattttcattttatactactttctaaaaaattaaaatgtattctaaacctaaaatagtacaacgacatatttttgtcttatataatgtaaagattaaatctgtgtaacaaattaatatataacatatgagattattttctaatgaaatatgtaaaagttagtgctatatttagtactaaaaaatagttttagtggtaaatttataccaaattttagtcttgtgctccaatacacaatcgctaaaattcgt

SEQ ID NO: 228531 - DNA, 2344 bp, Cannabis indica
agctggtctgtcacttgatcctcgtttgaatgtcgggatcttcatttgttcaggtgctgactttgcctttttttagtgagctgtcctaccacgtggcactagttctgtccacgtaagcatgccacgtcatgagaataaaattgggataacattttcaccccatgtccctgtgcaaacgtctatacggatagggactttaccagatatattgatgttgttgggattgctgttacctttgctgaataaaagttgatatgcttgttgaagcactttttcttgactgtctgatctcattgcagtagagaaataactgctttagttgcctttataatgtgttggtaaggtaagtgagaaaaagaggccacatgtactacatacgtgaatttttgggggaaaacccttttttcacttttatttttcacttttactttctctcactagaaatttactctagaaaaagtttctcattctctctaggtggccgaacccacaagcactattcttctcgagatttttgcgctattttaacagtccaagcttcccaccttcttctccaccgaaattttgtagtgggtaagcttattattcctgctatttcacttggtttgattgattttgccatgaatagatgaacattatttcttggtttgatcatgctttgattcatacgttagattgtagtccattcgatattttgattcgcgtgatagccttaggataaacaatgtgtgatttctagacgaaaaataactaaatctaaccttcgttgtgattcttggctctttgagtcacgaagaacatgtttgagctcttaaaaaaaacatgtgttttgatccatgcaaatgttggccggaaaggaggctttgtttgaaacctagccgaccataggtggccttcatggggtctagccagccatggggactgtgtccctagggtggctggcctatgcctagaactagggttcctggcagcccactaggctgagtcttagagtttgccagccactaggacctggaaccctggccgaccaaggccaacgctccaagtgggcagctaattttctccctcttttgacctcagctagtgtctcatcacggctttggaggcatatacaactgtggctttatgcatagtttctcttggagactctgtataaggctaggtaatgaatccattatagtcaaccgtacaacttaggacttattgtatgtcttagtaactgtacctaagacggtacgtggttgttggttaaccttgtacactttgctttacctgaaaggtaccaatatgtactgttgacttgaatatatttgtagctttgtcaggatgctcacctcctcttatttcttccatgcaggtagtgttgggtgttgaattggggaggtgatagctatgtaggtctcttgtttacctcatacttatggcaagaacgaaacagactatgcataaggtgcccccgtattatcctcatgtggccatggtggccacaaggggttgagttaaagtggagggggagactgcccagccccttgtcgaggctgagccagagatggattcagagtctgggagttccgatgcagaatttgagttggaggaggttctctagtcaggaagaggaagtataggacttgttctgtcctccttggccatactttaggccattatgacgcccaaggtaatccactaaatgggctcggcggacctttagagctaggattggaccatgtcctagagaaatctcttgagctggagatactggatgcaaaactgcctaaagcaaggtgggtttcgcctacttatgctctcttcgatgaggcatttcataagatccttactagtggcctaatatggggtgccattgtgagattcctggagaaactgtagggcgcagaagcccccttcggattggttggcatggtgtgggcgccacattgaacatggggcagtgccgccgctccaccagtattttctagacattgctgcttactttgggatgtgcccaacacagctcatgccaaagagcataaagtatctcttggcgatgtttttcttgtatagggagctaggttggcctattactggtggtgtggaatgaagaaagatgtagtggattacgtgtctaaatgtctaacatgttagcaaatcaaagttgaacaccagaggccagcagggttactgcaaccattagcacttcctcattggaagtgggaggatattataatgcacttcgtggttagtttgctcataaccataggaatgtatgactcagtatgtatgactcactatagggcgactatgaagtgttgggttttgtgccctaaataaaaccctttacaatctgatt

SEQ ID NO: 228532 - DNA, 911 bp, Cannabis indica
tatattatattatcaaaacaatctaacacccaatacaattatgtcaaactaatttttaataaattggtttggctttttagagctcttcaagaggggttgcccaataaagtatctatgccacatttaattttaattcaatcttcaataaaaataagagtaaaatcaatgtaagtgttgtcaccattagacaacattcatgtgagtatttttgtattattttgttttgtaaaaaagaaatattttttcataaagtaaaataaaaaaaaaaatgtgtgtacttttgacaacttttaagatgatctattacggaacaactttgtaaaaaaatgtatcaaatattatgttggatgagacatttatagatagttccctcgttgtaaatgctcttacttaatgtcattgtagttcatttcaaaaaaaaatgtcatcgtagtctttttcttcctctaccaaatggtcaaccgttgagaatttctcactcaaattagagtgttttcaactttgccctttgcatgtttagtccagaaccttgttaacatcttaaattagactcgtgagaagagagatctgactaacaattaattaaatgttaatttcatacacatgtacatgtttgttaatattccacttattagttaagatatatttatgtttttatatttgtcattactagttgaccattctccaaactcaatgtagaacatgcattctgctaattgaagagtcaatttaatttataattaacaacttggaagattaatattttttttttgggtgatccattattgaaatattataaataaataacttctttattataatcattattattagagatgaaaaaagtagttatttgtgagaacatattttgtatttctccataaagtctctccataaagtctcattctgct

SEQ ID NO: 228533 - DNA, 1641 bp, Cannabis indica
gtcttatctcgagttgctgctagtattcttgtgccctcattttctttaggttcttattcttgtaagagaataaatgcatttctggtgctggtgctatcggcctttgtagtaccattaactttcagacccttgtgaacttgtttaaatccatcattatccgcaagtcccactggtttcttccccttgtgactttcagcagctgtaacaggaggattcacaccagaattagtgtttaaattcacaccagaattagttcctgctgttgtacatccatttgtatcagctccagacctcacctcaatatcctctttcaattcaccctttttgtttttcacaacccactgctgcttatgagcagatggtttcctcctgcactcatcagtgctatgtcccaaaccattgcaattcttgcaaatgattggtttccattcgtatttaatcccaactgatgtaatacagccatgctcatcttcaaacgcaatagacgatggtagttcttgttccatagaaacttcaacaagtattctagggaaagtgagtttttgcctcattttagtgacttcatctaccattataggctctccaatctgccctataatcttgaacaaagtcttttggccccaatatttcagttccaagtttcgatttgaatccaaattggaaccttaagaatatccccttttctgaaattagtatccggatcccatgctttcattatcaccggcctcttgttgaagaaagtatagcctccattaagaatgttatcccttgtctcaactgaagtgaatctaatcagaaaaatgccatatgagaggagcccaaccttatccactttctcctccatattcttctagcaaatccttcaagaacatccaatggagggtttgcacccaacacataacatacaatagcagaattccaatattcaatttccccctcaatatcatccattgtgacctttacaattactttctcattatcaggtttctgtttctcagtcgaagcctcttgaaaagaattatctaacgacctaataacagaacctgacctaagaatggggggaacaggggaattacctttcgagacatccctgctgcagctatggtttgcttccaggaagtgagcgaagtcactgcgaatgtcatcttgcctctgcaattcacaaagcgaagatcgtggtgaaagagcctgaagctgttcaaaatctggttcgtgtttatcgtcttcttcgtcagtgaaatcgatgggttcaattcccagaattgcatccatcgacttggttttcttgacatctccagatgaggatggacctcgtttcttcacaggtttatgattcttcgaagtagatgctagttttccatgattcttggacctcgtttttgccatggcgccagctcgggagctgcgagagcaagaaacagagaaaacttttttatagaaatctttgggattgtattttttaaaaaaaaatctggaattgtacttttttatgctagaattgtattttttatttgcttgaatctgggtggtgttttaacaggtttatggaaatgaaaaatttatattttactgacattatattgcatgtaatataaaattcaaatcttaattatattatttttattaatttaattaatattt

SEQ ID NO: 228534 - DNA, 879 bp, Cannabis indica
tatgatgttgtgtgtgttgcgatattaatgtttttttctctttttcttacaaattcaggtatgttccaccaactgctcacaagttatgatgagattgatgatgtgagtgagtctagagaagaggaaagcgctcaaacccatcctttagttcctcgagcatcgagttttcctaaattcatcccaataatgctacaattcagatgctagagtctgtgcacgacaacattgacctccttgttcaaaaaactgcaactattgaggtggtgcgtgacatatccaattatgaaggtggccctgtcactagaggagtccaagatatccttcgggtaagtgatggactattcatcaaaatgtattaataatggcttatcttttcatgtgcatgctcatattttttatatgatctcgcatccttttattgtgctaacaccctttaattctttctcttatttttaagggtgtaactcaattaatggtctcccaacctaattcttcaaatttacaagagaagctagctactgcagaaccagcgcttgaggagcagaaaaagctctcttctctttcggatgcaaagtataagcatgacaaggatgaacttgagagcattctctgtaagaggctcgcggaactccgtgatgcgcaaacagagttggagcaatgaaagggtcaagtgaattattacattgatcagaactttgcttattcgaagaagaatgaggagctagagaaggatgctaaagaacacgattcaacggttaaggcattgaaggacactattcagaagcatgaagatagggcagtgaaagaccgtcagaaatacaagcttgtcttcgacaacaaattttatcggttgtgaaaaaataaccaaaatcttgacct

SEQ ID NO: 228535 - DNA, 2437 bp, Cannabis indica
ctcactgtaccctatatgttattttgacggcaactgacatgcatgataaacatgtatataaataagaaacaattatattaatcttaccttgattacataatcaagtgtgtcagttaaactgagtggacaattgctagacgtttaggggtcctaagtcacatgcacataaaactggtaagtgacccgctatatcactttcggggacttaaacttaaatctaaaagtttccttattgatagatagcgtgaaaatacattaaatatcgataaaatgttaaaaataaggctcttttgaaaaatctagtgaaccaaaaccccaaacgattaaccattttttggggttctgctagaaaaactagttcactgtttatgagaaaatggtgaaccatttttctctgtagttttcacaaaactttgaaatcttgctcaaaactctcccaagttcaaccaaactttctagatcacttaattattgcataataaacaaatcccaacaaataaacacaacaaaaactcactgaatgaaaatccaccattggagacaaggctttgagcttccaaaactcaaaacttggttccaactaacacgactgcaataagcctcctatgaaagcttaaataatcttaatttaactcccaatacaagctctaacatccccaacttccaacggaaccgagttccacaattacacatgtaaaacctaaacttttcttaaaaataaccaagagaagagttagactaggttacctttaagattctcttaacttccctactaaattctcagctgaaaaatccctagtttttgggctgaactcacaacaaaagtctagttttcccttggtgtctccttgtggccaacccaaagagaaagagagagatgcaaagaagggtgtttggtttataaattgatattatccctattacacttatttttatttcaacttataattcttaattatcatatagaattcactagaaaatacacttaaaggttctaataaatatccaagcaaaattaccattttgcccattttcttcactatgaaataagcttatactctagggataaaatgatccaaaactataaccccaatcaatcctgacattttaactattcataattcttgcacaactaatgctaaaataattaaccgcatctaagtgacataattggccaaaacattgatttctactattaccgagcataaaatataaaaatgctaaaattcatatatgacatgcataacacatctcgaacctaataaaatctccataactgagaaattatattactattgcctatttctaataataggactactttctgctaatgcacatataatcataaattattaagtagataatgttctactaatttccgaattaattatgcggtcattacaggttagttgtcatgaagaggcgaaattttttcatcatcattgctgctttggtcttcagttttccaatcatcagattggctagaagatgatgacagattgttgtcatctaaattttccatctctgcattatgattgatttttgtgagattatttagatagtgctggtggatgatgtttgtaatgtcatttctctttttgatcatgaattgagtactgtattggccttgattatttttttttgtttcttctttcttttaaggttatcttcatcttgaattctttttagatgaaaaattcggtctgctatttatgggggtgatgctaacggttgcgcaaattttggtaatgttgaaaatacccatggtgtagagtctaagcctggagtgagaggtgatctttctttagattgagtttgagtttgtatagagatgtgctagctcttcaaaccctttagctctacttctttcgcgagaaaaatctcttggggaacttatctggatttgaccagctatagtagttcttcgtgcacttgtgaaatttcgtagacgagtctagttgttagagagtctcacattgctaatgtgttgaaagataatagaatatataagatgaatgagccactactcttattgccaattggttttgaaatggaaccccattcaccttatcccaaattctaacatggtatcagagcaaaaaacaaacaaacaaaaaaacctctaacgacaattcgcacaaaaaaaaacccaatcgaagtagatccaaaaaaaggagccagcaaaaaaaaaacttatccaagagccaaaaataataaaaaaacacttgtgattcgggaatagccaaaaaaagagccaccaaagatccaaaaataccgatctaaaaagtagagcaaaagaaccacttgtcattagggatagtgagcaaataaaatagcttccattttgaggggggatgttaaagagtcccacattgctaatgtgttgaaagataatagaatatataagatgaatgagctactcctctcattgccaatt

SEQ ID NO: 228536 - DNA, 2250 bp, Cannabis indica
tttaaattaatatttatagttaaatttgtttagtaaccattcatgggtaatacccattaagaagtgttccatacatatatatatatatatttcacaatggtatattaagttaggattagggtacattttcatacaatctaaattttattattttattttctaaatgttatactgtagtacaaaaaatgtatataccatcatgcaaaatgtatataccacctactaaaaattattttatcaattttttttttattttagtacaaacaattgatatattataacttttttctctctaagttatcatcaaatatatgatttcatattcatatatacacaataactagttttatacgttgatgtatatcaacacttgttaataaaaagagaacaaccaaaaaaaatattcattcaatagtatatacccatccatgtttgactaaaaaatataacataatatgtaattaatataccatattctaactataattggaaattaaactaatgtatcacaacaaaaaatacagtataataaattaaattatgcgggacaacttcatgttttgatcttacagttttatttcttttgaatgaataaaacataataatatataccttatatctagtcggtattttaggtagaaaaaaataaaaagggacatttgcgttattattctaaaaaagagacattaactttcactagagagaaaaataaggccatttgttaacatttctcttaattttattactcaatttttaattgattgttgaaatattctaataattaattataacagtgattgaataatttacctatataaatacaaggtaataggccccaaacttctgctcatatttgattcttatcttcattttcaattgtgttattccatgttgttgttaggaatgattcgttttgcttcttcctaatgtttctaagcaataaaattaaataataggcaagaattgttgtcatgtgttagccaaaaattttcgccaactaattaaataaataaaaatttaaagtaggaaaaaaaaatatggaaatcgtgacttttacgtgattgaggcgttaataaatcttagtccataaatcatttgtatgagatggggaagcccagtaagcccaacaaaaccaccacctccgacaaaatcccaagcccagacccagattgatatcgtgaaaccaaattcaaaattgtgaaaccccaaacccacattcgacatcacaaaaaaaaaagtatttttctaaacttttattttattttaattggatttttttgttgtttgtgcttcattgtaaggaaatttgtttgatttaggttcaatttttgtgttttcatttgaatttcattgacgcctgttcgagttctgggtttttggtcaattatcgacatgtcacgacattgttcgcgacatattttgattttttttcaaaatgttatggtagttctttatattagcaatgttttcacgacatgttgcgacgtgtttgcgagttatttttggtcggaagtgccttttgaaattttacttatttaatgatagtttcacgatgtctgcaatatgattggcgatgttggatgaaatatcccatgataatattttcggtatacgtcgttaattgtattgcaagatatgtcgccaatatgtcatgaaatatcgctgaacactaggctacttatctgcgattctattttgcgatgattcacatatttgtgatacatgttatgatattctttttttaattttttaacaaaatttcttacaattttgcagatggctcctgaacttaaacttctagtttcctagcatttcacaagacgtcttacctatcggggtacaaataggtttagagatatcaaggccaagtttacgaagcttgagttgattgatacgattaaggctagcccttttggacatttcttttctctagtgctttggtccacagcctcttcttacggaagatgaaagtcgataatgaaaaggaagatgaggtttggtttcatataggcaaaaatgacatgagattcgagtggatagagtttggacttattagtggcttacctatgagtagtgcccctacaaatgaagaaatagaagtcaagtccaatgaccatccagtcaggatgtattttgaagggaagagttttgtgcaattggattcattgttgctccaactgcagaggtacgaagtaaaagatgatgcctacaagcttggactgtccgctttcattgaaggtgtattagtat

SEQ ID NO: 228537 - DNA, 1328 bp, Cannabis indica
tttttttaaaaaaaaataatcagattaacataattttatttattaatctaatacccaaagtaatttgacatagtcttagttgctaaaatcgaaattaatatttaatatctatcttggtaatatcaatagatgtctattttaattgtgttgtgaaaaccaaaacttcgtgctttattcaaattgttaaaatcagaattaatatttaattttaacattatttttcaaaatcaaatatgtatgcttctttaatttaatataatttcaaattaaatatacattgaaattatacatcttaaaaatatcaaaagttgcacattttttaatattcatatttatgatatttttttgttaaaaatccatatccataatattaattgatggtctctttaattttaaacaatctttaagtctatttttttatgaggttgttatttatatagatgttgggtcttagtacaactaatttacaaacgaaatacatttgaaaaaagcatacttgaaaaacaaagtactaagaaccaactaaagtttattcttcaacaaaagtcaattattttttaaaagaggatattatgtataaatgataaaatggggtccatttataaagagacatgttatcttagaaagtaaatactcttaaattttgttaaaccactcataattaacataaaaagagagaattaactttctctctctagaatgttcaagagtctggcttgtgttcccctttctggtacccgaaatgggtttatggtccacctaccagagttgtgtggtggattctggtgccccgatcccttaatctactatcatcatagctatgatcagtgcattaaatgtgtatttaatgtctttgattccctaaattcattttttcttgttttttcttctccacctaactgcattaattgctcaagtcatcatttagatcctttgcagcccccatttctttcttctttgctcttgcaaatcttgttgatccctggctatcaaatcactctgcttctcaaagagcctttttatctcatatttatggcggcgaggaagaaagacggccttcgtgaagttcaaagatcccatcccataatgagatctactcctagtgaagtggaggctctgacctgtaattgtagaggttattatttggggactcccttgttttttctatttaaagtgcatcctaagcttcacatccaggtatcttcttctgtattccttatttttatttactttttttttgcaactttaccttgctatggctaatcttcccaatctgtctcctattcctttgtccctcactcaagatgagagtgatgttttcactcttc

SEQ ID NO: 228538 - DNA, 1150 bp, Cannabis indica
actaagcgggctttacaacaatggtcatggatcactaccccaaatcccatcttccaatcttccacacaaaaaacctgcattagtgttaagcttcacacgccccatgggagttaacaaccaagggaggaaactgtaaaaagaatgaggtttcgtacccatcatattggccgcctgaaatttttgagtaaaggcaatagaccaccccaacaccctttcaatgtccaacaatttcttattgtgaactcactggtttcgacaaaaccaaatacgtcagagaagaacaaggagttgttccatattatctttcaccaaaaccacctcatgttctctaagggaaaaattcaggttagtcataggagagaagatgaaagaatcataaactccaagaaatttatgatagaattcaagctaaaacatctccaaagagcatgtaacgaggtttcaattataatatcaaaaataggacaaagagagaccatgggcatatgatggagagaaagattatggtttgtaaaaaaccaatccaagtaggctttccaaataaacaccttaatcttaggtagaatggcaaggctccataaataattccaccatgaagccaaaacttgagaagaatcacattgccccctacccaataatctgatagcattccaatagccacttttcacagtatagtcaccagaaaaattataatgccaaatcaagcaatccttatgattagtggaccgaggaacaaccaatatatctgactagcttcatcaccagagaacaaatcatcaataggaccacactttcaattcccattatcaagtaaaagatcactcaccatagaaacataaagatgaccacaaaaggagcctatagttagtctggactagagagctaccaatttcatatcatcattgaccttcgtcttcgcaacaacctccatcatccgctagatgaagttcttcaagctttcaccttgctgttgtttgaggttggtcaccaatccgacctccatgtcataatccctagaaactataaactatttctgaaaggttgactgtaactccttccaactatggactgatttgtgagacaatcttttccactagtattctgcaaacttggtcaatattagtgagaaacaaaggcacttggcgtcatc

SEQ ID NO: 228539 - DNA, 2263 bp, Cannabis indica
accaagaaacaccaaataacccccagtagaccttctatcgtcgacacagctagcccaatctgcgtctgaatatgcatgaagtgtcatggcagttgcaggccgcaaccataacccttctcggatagtgccttttaagtatcgtaatagctttttacatgcttcccagtggacagttgttggggcatgtaaaaactggcataacttgtttactatgtatgccacatctggtctggtaagtgataggtattgtaatgccccaagtgtactgcgatacaaggtaatatcctgaaacgactcaccttctttaagagacagtttgacgcttgaactagcaggattaggacaggcctttgcaccttccatgtgcagcttgacaagcaaatcagtaatgtacttcgtctgagatagatacatcccagtgcgatctctataaatttcgactccgaggaaataatggacatgaccaagatccttcaaagagaaatgagcattaagatccgagatgagtttcgaaatgatggatgaattagggcctgtgatcaatatgtcgtccacatatataaggagtataactagactgttgccgtgtccatatataaagagagaagagtcggcctttgaactgtgaaatccccaagagatgagagtatgtttcaatttgtcattccaagcccgtggggcttgtttcaagccgtagagtgccttttgtaacttgcaaacaaagtttggatgagtagaatcttcaaaccccggaggttgagacatatagaccgtctcattgagaggaccatttaaaaacgcattactcacatctagttgggacacatcccaattgttagtcacagccaatgataacacagtcctgactgtagtgggctttacaacaggactaaaggtctcctcgaagtctatccctgcttcctgtaagtatccctttgccaccaaccgtgacttgtacctatttaaagaaccatccttgttaagtttgactcgatgaatccacttgcaaccaatgatattcatagaagaatctgggggaacaagcacccaagtgttggccttttttagagcatgaatttcactatccatagcaccatgccagtggggattagctgaagcttctttaaggtttctaggttctctaggtaacaatgactcatgaagagggtgtttggtggcaatgtatgacttaggtttggttatgccatttaaggatcgtgtgcgcatgctatgggttcgggttacagctacaggaggtgggatagttgagttcataggattgttgttggaaacattttgtggtgggagagaagtaggaactggttgtgagttattgttgggagtggagggcaagtgatcaggggaaaactgaggctgactattggggtgagtggattgtattggtggcacaaggacacgtgggctatgtatatggggagaagctgacacatgttgggatgagtcattgttattagtggtggtgttaaggacaggtgcaggtacattatgtgtttgaatagtcatacgtgaagacatatcaaatgctgcagtggggaaattagttgcagagggggattgtacctgagatgcagaattgtgtgttgtggctgggaagagttgttcatgaaacaccacattgcgtgcaatgaacagtcggccctcacgattttcacataaatagcctttgtgagatgaggaatagccaatgaatatacattgttgagttttaaaatccatcttgtatcgattgtatggtctgaggtgagggtagcaggcacacccgaaaggcttcaggatactgtaatcaggtgtttggccaagtaatatttctgttggagatccatagtcaagcacaggtgtggggagacggttgataagaaacacatcagtgtgaaatgcgtgccaccagtacgagaaatcaaggcccgattgtgcaaggattgtaagtcccatttcagtgatatgcatgtgtttacgttcaacccttccattctgctcacttgttttgggataagggtgttgaaaatggatgccttgatcacttaagaaccgattaaaaggtcgatattcccctccccaatcagcttgaaccttcttaattggtaaattgaattgtttttccaccatagctttgaatttaatgaacatctcaagagcttgagacttttgagtgagggggtaaatccaagtgtatcggctgtagtcatcaataaaatgaatgtaatagtagtatccatctttggatttgatgtgggaaggaccc

SEQ ID NO: 228540 - DNA, 1788 bp, Cannabis indica
atatataggtagatcatgccgaatttattatggctaagaaaaatccattagtattggatgactatcctgcaatattaactagctttcagaaactgatcctaatatttatgaccttattaaaaaaaaataacgttaaaaattagtcttccttttattttatttatagtactgacaattagattattaatgagaattggtagggacagctctcttatttatgagaatcctaactataaaaaaaaccctacattattatctatatacaatctctcaagctcaaggaatattattatcataaggcttcaaggtattctctgtttaacaagaaaaaaaggttatctcaacaatatggaggtgaccatattttctcgagaaacaatcagaccatcaagttcattgattcgccacttggaacccaaaaagctgtgtctcttcgatcagctaactccatcaacttaccctgaagtagtcattttttactctatgaatgatccaaacttggatcttaacaaaaccctaatccagttgaagaaatctttgtcagaaaccctaactttgttttatcccttctccgggaaaaccaagaacaatctgtacatcgaagactacgacactggtgttccttactgggaagccaaagttaactgtcgtatgtctgactatcttcagcttcgagaaactgagtcactcaacaactttgttgctattcatccctttaccaaagaaaaagatacctcagctcctcagcttgcaattcaggtacaatataagaaatatattatagctacttagattaacaactttatttaaattattacacgtacatatactacatatatgctatagcttatagacttatatttttggcttacattaacgttttagttgttttgtattgtatttattagttagcttatatagttagtgatatatatcttgatgaacttatagttgatgagcttacattttctcatatatactcgggtcgggtctgggtttggggccggcatccgttcgagtttggatccagggtataaggtttgtagctaagttgggttcagggtccggagatctgggtccgagttaggtgccaagtttgggtttaaggtttgggactggcatcaagtccaagtctaggttcgtgattcagggttcagggtttgcggtcggctcaagtctagggtggggttcgggtttaggtccaagtccagtgccaagtctgggttctgggtctaagttcgggattcgagatccgagtctacggtctggggttcaggtccaggttttggggttcgaggtccaaacaaggataggcttgggctaaggcggactatgtccacgtctatggccacccaacccaagggctcaaaaaaaatatttttcatttaaaattatacatatttttaaataaatggcccaataattttttttactcctaagatccacccaaccttaggatcgccctggtcagagatataggttcctattgtggtgtggtgtagaatatttttatgtaaaaataattttttaaaaacattaagcaaatatcattcaatttttaaaatgacaaattactatattttatttttagttttaatattgctatactattggttattaattcactacaaaaaaatgctatttttagtgacaacataattatttttctgtgactaaatgtattttttagtcgcaacaaaatgtttcttgtgactaaaatataatctttagttacaagttgtcactaatttttcgttttagttacaacaagtattgtgactaaaaata

SEQ ID NO: 228541 - DNA, 1972 bp, Cannabis indica
cccctcaaacgacagggggattcaaccaactggagtttgttgataaaaaaattaaatctagatggtgagagacccttggttagacagtcagtcacctactcgtgtgagggaatgaacctgatgtcaacttgtctttgcaagactttgtcccttatgaaatgaacatccaactcaacatgtttggttctcgcatggtatactggatttgtagcaagtgctgcaacccccatattatcacaccaaatgacagggcgatttggtgaattgaacttcatttctccaagtagtccctgcaaccatgttatctcagccactaggtgagcaagagccctatattccgatttcgtacttgagcgagcaacgacgaattgtttcttagatgaccaagagatgaggctgtctcccatgaacacacaatatccgcctatggatttcctatcatcggggcaacatgcccaatcggcatccgaataacctgttaatgaaagatgatcacggggagagatatgtatgccatgagacattgttccttttaaatacctgaggactctttttgcagcattccagtgggtggttgtcggagctttaaggaattgactaagcttgttgacgacataagtaatgtcgggtcttgtgtgacaagtattttagtgcaccaattaagcttctatagttggttggacaatttagaatttctccatcagtgatggacagtggcttgccagcaatcataagtgttggtgtaggtttcacattagccatctcgactttttgcagcaactcactaatgtattttccgtgagatagataaactccagttgagtctctgaatacttctattccaaggaagtaattgagaagcccgagatctttaagtgagaagcatttgtcaagacgattggtgaaggcttccaattcagtagtgtcattgcctgttaagataatatcatcaacgtaaataagcagcatgattgacaaactttggtttcttcaaaataaagaaggaagtgtcggacctggaattttcaaaaccccatactttaatagtgcttttgaactgatcataacagccacgaggtgcctgtttcagaccgtagatcgccttggttaacttgcaaacatggttaggaaaggcggttgactcataacctggaggctgcatcatgtatacatcctccttcaaagtgccattcaagaatgcattgttgatgtcaagctgtttaatcacccaattctttgatacaaccaatgtaatgaccactctcactattagtgcttttacaattgggctgaatgtctcttcgaaatccaaccccggtctttgatgaaaacctttcgctacaagcctagctttgtacctttgatgactaccatccgcattgtatttaatttgatagacccatttacaccccacaatgttgtatgctgctgagaatggtaccagaatccatgtcttattctttctcaaagcaatgatttccacgtccattgctcttgaccagctaggatggcgaagggcatcttcaacacgagttggttcatgatctgtaaaatcaaatttggcttcaccaatgtaaatttttggtttaaagatgccggccttggctctggtaatcatagtatgtctttgtggtgagttagcaggaggcacatttagttcttgtacagggaaaatttggacagtagcatctgcactagcagtaggagtgtgaggcacttcagttgagaaatcaagttcaatactgggtgaattactaacatgtgatgaaggagactccagagttggtgactctgagagatgttcttgctgctgtaaggatgaatcaccagaaggcagggactagtttgagtgagaagtagcaacagtaggtatagtaaaccacgagtgaggggctttcattatgagaacctgttcaggttgatggttatttagaaaacccttttgaaatgggaattcatcttcattgaagat

SEQ ID NO: 228542 - DNA, 1030 bp, Cannabis indica
aaaaatcataattagccttaataaaatatatgttcaaattatatatccctctctaaaacatcaaataaaatatactaatttatatttttaccaccaattttacttttctaataacaaaactaaaatccaatctctttccttctcattcccttcactctctttctatctctacaaactcaccacacacaccttgttggattcttcatttggcagagcactattgacaaccaagtgtatagagtaacttaaactcccttccaacataatttttgaaaaaaacaataggtatgtaatttatttagtaactattgttggattaagttatttttagttatttaggttgaaatgaatagatctacacatatcaatcttttattttggttgtgttgttcctaaaactcgaactgcaagaattctgcgttttttggtttatttaaggtttagcgatattttgtgatacttttcacgatatatggcgacattagagcataccgattgttagagatgactttaccgacattttgcgacacttttcacgatatatcgcgacattggagaacattgattatgatggatagtttttaacgatatatatcgacttgattcgtgatattttgtcgatattgttagagttatttattagcgagttaggaaatgatatttatcgacattttacgatatgaggcaacgaacttgtcgacctttcacgatttcacttgcgatatttctcgacatacctttgttaactaaggtttttccttattttttaacagattcaattgtatttgtggttgtactttatgatggggcttgggcagttaaaggttttaactgaaaattcaataacgcaaaaagcaagatgttaatgtttgaggttgacactactttacagaagatgcaggaaattttgtatgaagagtttgatatagaccctcttatgtatgaattgaaagtagaggtgtgttacatgtacatgaaaggcaatacgatatcgccagaggttttagtgaaagatagtcaagtaagattg

SEQ ID NO: 228543 - DNA, 2218 bp, Cannabis indica
ataaagatgtacacttattatatatatttttatagtttatatatataataaaagtataaatgaaaaaataataaaaaaaaaaaaaaattgagagagagagagttggaaaaaaaataatattagagagggaggagaaaggaaaaaaaaggatcagccaaatttacataaaaaaaaacaagaaagagaaaaaaaaagtcaagtaaaaaaaaatagttaataaaaaaaatacaaaaagaaataagaaagaaaaaaaaaatttatagaagcattaataaatacacaagaggatgtctcaagttcaaatctttatttccgattatcaataaataaataaataggtaaagaaagtataaatataaaaattatcttatcaaagtataaatataaattttagaggaaagttagtatatggtaaaaatatctcaattattttatcaagcattgtgttttttagcaagtacttgtgaatagaaaatttcatcatacgaacacattagatgtttatttatagtagttaagatcacacactttgaaattcaacaccctaaatcccatgactaactattactatatcttaattgggtgtaaatgagattaaatagtgatttaaaagttatgggagttgttaggaagcatcctcattgtaaaaaaaaagttcaagtaataaagcttaaaaaaaaaacagtaattatttactagttaccaaaattttcaatttttgtaaatacatctccaaagcattacaaaccatttccacttaattttatatcacttacacacattataaatgataagaaataaatccccaacaactatatatttttattttaacttttaattttaaataattaagctatgtaatctctctttacacacttaattggtgaatatagaggttacaaaatattaggtctgccccttttgttgtgggcttggaccatttaagggcttaaggcccattttgtttgaaccaattaaaagaaaaaaaaaaggaaaacaagtagtattagagccaaaggtttaggagcactaagatagtgggctgcgtttgcgatgtgtgggagaagccctcaatgtgatgacctcgcgattgaagatctatatggtgtcttgtatcgaaagtctacctgatttgaggtagtcatgtggcgtgtcctattgatgattacgacggtacaagatggagatcggtgttaggacctgtgtcgaaagtcttcttaacaaaggtgatggtcgggcgacgagtttcgttggtgataacgctgacataaggtggtttcgttagaggggaggccacaagtatgtggtccttagtttgaggggaggattgttggggtatcaaacaaaatcccacattggctagaaatgaaaaataacatgggtatataaggatggatactactccattagtatgagaccttatggatactaatgtgagagtcaaggtgaggtagcagcccgataaagtggaagaacgaagcccaacacaaaatgtaattaacttcacctcttatattacaaatatttatacttaattgttttgttacattttatatttaatctatatagtatattacttaacaaataaataatataagaataattacataaaacactaatttttgtaagatttttacgttcaattttttttatatatttttacagtattctataaaaatacaagaaacaatatcaaaacaataacaaaacaacataaaaaataatatagaaataaataaaaaaaatcaataacaaaataactagagtacaacggaaaatataccaaaagactatattttgtgtaaataaaatttaaaaaatcgtaaaaatattaaaattccgaactgactgtatttttgtatcttttttgttatttttgtgttttttaaaattatcccaataatataacacaaacccatataattgatcctcaaaaaaatctatcccctcccatccctcattggtaaaagtaaactcacttttttttactttgaaaattagaacagtgttactttttaacttcttattacaatttttagtcaatctccatacttaaaaacacatgtttttttttaaaattttttttatgacagtattcgttatagttacaacaattttacagtgtcgaaaataggtttgaagttttttgaatacgtatgataaactgaaggctaattagtaatttttccccttggattttgacatgtactaaatcgtg

SEQ ID NO: 228544 - DNA, 1828 bp, Cannabis indica
tcatggccatgttcatagtggtgtatgtaaagtatccatacaacgtgatactcgaaaggccagccctctacaatctttgagccatctcgttagtgtaccatttgcccgtcaagttcctaacgacgcctagtatcagttgtctccttcgcaatcaaggaattgctctcgagtgtcataacgcttcattatcactcgccaagaagacctcctctattgctatgactttagaggagacgagcaaggcctcccttattgctatggcattaggggggacgagcaagacctctcctacaaaagctggagagacaacaaagacctctagagttcaaactacagagaagacagagacgaaacttaaagccacttgaaggtgtgccctagatgaggatgacattgaatcccattttagggaaatcgactctggagttggtctaattgaggaactcaaagaactttccctcaacaaaacacacccgaccaaggttatccagattggaacaaatttgacggaggtcttgaatgagatgctcatggcttgcctcgagagaaatcaagatatttttacttggtcacatgaggacacgatcaagatcaatccccaggttatctgtcatgccctcaacatatatttagtttatttttttgatatattttttttaaaaatacaatgataagtttttttatttttttaattgacacaatgtgcactagtagatattgacatattaaattatattttttgttttttaattatatattacccattatattatataccctattttaaaattatgaattttaatatttctattattaatgtaactattaatttaatttttaaaaaataaattatcatttttactatcactaactcaaaagtaagagaaaaaatagttgaaactatgaagttgtaacaataaattttatgaaaaaaataatgtagtagtaataaaaataaatcaagttgttaaaattaagtgaaaaaaaaaattcgtaaaacaaaaacatgttaaggaattgatattgtgttacatattgcaatgagatcgatgtcttattattgttatgttttcttgtagatgtctttatattattttatagttattttcatgttgttatttaggtgttttatagttggctttttattattttagtgaaacatatcattttttttttttgtaaagtatagtgaaaatattaaaaaaaaaatacacgactataaaaatgtaaaaataaccaaaaaaaaagtatttatgtaatttttttagggatattggcggctaaactacctgaactttaaatttttaaatacttaaccacaaaaagtctaaaaatcacagttaagtgccacagtggactgcccacgtgtacacacttgtacacgtagtaaatttttagtggctcgcgtaatattaattttaaaaaaataattataaatattttaaaaaattaaaaaatcagaagaaaaaaataatttaatttttttttttggatattggcggctaagctacccgaactttaaattttttaacacttaaccacaaaaattgaaaattattttaaaaaatatttttttcttacttttttttttctttttcttcttcgtttcttctttcttcttccttcttctctctgtcttaaactttctgaaacccttatctctcagccctccctcctaggccctctctttctctctctctcgtctcaccacccaagacctcgccgaagccaaagcacccatgccctcgccggagccatttgccctctctttctctctctcgatcttctccttcccagaccctctctttctcttctcttctctctctct

SEQ ID NO: 228545 - DNA, 1627 bp, Cannabis indica
gaacattttctcatctcttctccttccttgtgttgtttactttactcttacgaaaactcccttctcttctctcaaacccagaacatttctttctatccaaaacgaagccaaaaacatataaagatcaaaaatcaacctttttgattgagacaaaagaaaagccaacccaattgttaatttttccctaacaaagattgagattccattcttttaattcccaaccccgaaagaaaaatctaattcaactttcttctctgccccaaaaccccagatgacttttccgagacttttgctgcttttttctctgttttccctcgctttttctcacgaaaatttcgatacccacctcctacctcggccgctaatcgtcgaacacccagagacccttttgaaagaacaatcggagacccatttgaaagaagagaatagattagagtgtagcagttggagattttccgtggaggctaataatctgagtccatggaaaacaatcccagaagaatgtgtagaatatgtgagaaattacattactggaaggggatatagtaccgatctccaaagggtgtctagagaggcagctgattatgcgaaaagcgttgagttggccggcgatggaaaagacgtgtggatcttcgacattgatgagactttactttccaatcttccttattacgccgaccacggttatgggtacgactctttaaactttattaatttattaaattatttatgttattgttttgggtaggtagacaaagtcttatactctatatttattcagcttttgattttggttaaataatatctgttagagcatgggggtgtttgtttttgttttctgggtagtgttgtttactatttttaggaaatgatttcgtttcgtaatatcttctgtaaacgacatttatgtaaaccactagctacgacatcaaatattaaaaacgacattaacctgaaacgacgacattatctgggataggatggaagctaggatagtgtagaaaacgacagacaatgtgaacttagaaaacgacaacataacaatattaacgacattaagtttgtattgtccaatacatctgcataatttgtcagaatattttgtctaagaaaaagggaataaataaataaatatgtcagtcacttggattgggattcaatgtaacttggtatttctttttttcaacccaaactttctggaaattagtcaagtaaaacgtggaatgccatgtactttttcaacagttttatcatcagcataaaaagggttatgtgaccagttttaattaaaaatgtgataccattgcataatgttatggttttcactaatggaatcttccataaaatgactacatgtttaaaaacatacttattttttcgattgttagagcatctccaaccatgttagctatcctatacattcttatgaaagatttgtctttttctttttcttttctgcaaaaagatgtcatccactttttatgtaattatttatagagaattttaatgatactttccacaaaaaacaaaaaaaaaaaaaaggaaattagaatgatactagccaaggagtttaatgtggagagcaaaacaatcctagtaaaattctctttcttattagtttagtatt

SEQ ID NO: 228546 - DNA, 3413 bp, Cannabis indica
caccccttctggcctataaaagctagcactttcctttgctaggttactttcaccatcttgcgattttcaaaccagccaacacattcgaaaaaaattctaaacttctaaacacctctgactatcttctgttgttcctccaccgttgtcagacaaagttctaccatcagacgccgtctgcctcttccttaccacttttgtgtaagtttctgttcatattttttctgctttttctgcatgttagggcaaaataagaatggtgatattctcgtttggttgcgcttgatttctgtgatacggtggttatggcgaatgtcatggtgacgcttccccaaaggggggtgtctgatgaccactgccgtatgttgttttatttgcatgcttactgtcgtttttctttgaggatagaaagtgatcttttgtttgtttgccatcgagtagggctgtacatggattgggttgggcggtttttgggcagtttggcagttttttaaatcacaacccatacctgcccaataaaagtttggattgggcggttttttagggggcagttttatgtagttttttgagtggtttgggttgcttataaacaaaacttccaaattatattgtcacaaggaaaaaaaatattcaaccaaaaatttgtacctgttaataacaatgcattaaagtccttaaaaatttcatatcaattttgataaactccataacaaggcataataatagtccatgaaaatttcataacaattcttataaagtccatactccataacaatctaaaaaaggtccttaaaaagtccatacaagttcataattaaattaattttagactatgataaaataaacttcatacacaaaaattgtaacaaacaagatcaaaaataaaaaaataaaaacaaaaactttaagaactaaactttatataaataaaattagttttaggttttagggttttgttttttcttattagttttagttataaattttaaaaaataaaaaaaaataagcaggtacgggttggacccgccccttttaggctaacccgacctgcccgccaaacagcgggttaaaactcaacccaacccaatttttgtgagttttaaatgggcggtttccatgcgggcggattctaatgggttgggcggttctcacggtttagcggtttttatgtttcggcctaccatcgagtgtttgaagtgacttccacactcctcttttcttgatgttttgcacccaatgtttgcctaagagaatctctagattctctatttttggcaggcatttggagggggcctctttctagcggttaagggaatcccattcctcttttttatcttagggttttgtttgggggctaactgatggatttcctttttcagatgagtggagttccctacgaccttcacgctcacgatttcttcggattcgaccaagaaatcttagaacttcaccaagtccacgccatgtctacccctacttcaactggagcaaaatcttcaaagaaggggccaaagtagctgaccactttggatgaagtaatgaaggccccagtggtctataagaagttcacctatcgttccgatggctgggaggcagatgaattacactcgacgctgacctgcgcccattagctggagaagatcatcactgtcgtcgagatcaaaccttctaatgccgcggttttccatcgccttctgagagatgaagaaatgcccaaccacaactgtaatggctttggggcatggatccaaacccacctcatgtctggagccatgctcccactccaagactattttatagattttctagtttttgttggccttgcaccttaccaacttatcccttaagcttaccgccttctctcaggcttgtatattttctatgttgctaggtgctgggccccacccagtccagctgaaattttatacttttacgaactcctgtcggtccccaaaaagacggtttttacaaactctagtaccaccccgccaatgagggtccgatgccttttaattttcggaaaaatgtgaaggaatatcgtcactgatttttcttctcctccagttttaaagcctttgagcgtcagaatatgctcatggactgggttagggttccactcatgcaccgcaccgcactgcccccaccaaactcttcttaaaccacgcaaaagtatttgctggttataataaggatgagttgaacgtgggagattcggtcacgaccgtcaactaccggagggccaagctgatctcggagaaccaatcggtggatgactttaatctgtcgaaggttctttgtcctcatatttggaatcctaagaccgagaaagcgctctgggggggacatcatttcttatgcgaaagaaaaatacaataagtacaaattcaagaaggaacaggagctggcgtttgcctaagcataggctgcttcggggaggaccctccgagaggaagctaggaaggagcgaacccccattcgttctaagtttcctttttcggttcccaactctagggctcttggtgccagcactttcaaaacttgtaagtcccatttgactattcaccacatcccttctgtccaagattacgctggcctaaggccagtggaatttgacaatcgattgtataagtttcgaatgccccattcacggtggggtgacaatgccaaaagcttttatttttcgaacctaagtcattttttgagtcggtctcagatgggttctggtcctcccgcaccgatcctcttggaccattcttcatacatatcttcaagttggttccttccctcagatagctttctaggggatgacgacaccaaccttttaatatataccttttaaaggacggaattagatcatcatggtaggactagtttcactgtgttatacttgcatgcatggattttgatagtattgtgactcctttgtttatttttgaatagaaaaacccatggatgatctcttggacgcccttgcccaaacacacagtcctgagaccgacttgcctgagcaacgcaacagtgttatgactccaaggggaccttttgctgaaaccctcaaaattaaaaagttgtcttgattgacgaggaagaagaagaaggagagatcgttcttcccctcgactgcaagcgcaaaggtaaaatggttgagccagagccttctaagaagccaaggagggcggacactcctggtcctagtgttgactcgggaaatcctttagaagtggatgaatatcttgcacctctaggtattattttgacttacgttcaccctgacgaggaaaaggttcaacttcgcatcgccaaacataactatgccttggggggcttacaagggggatgctgatgcagaagctctaagaaatggctcagggacgctcaagaatgggcctttttgaggtgagttatgccagggatgt

SEQ ID NO: 228547 - DNA, 1749 bp, Cannabis indica
tttttttttttgttacaaaaattcctattgaattataaaaatcgtcgcgacttgcaaatctgccactttagttatattatgttgacgtaatttttcgtcaactaatttaagaagattgtaaaaaataaaaggattgcatgaattaatttagctaaataaaatcccgataaataaaaaagaacactagggatttatacatgtcgcgatagtaatgaaattacgtctactttatatttattaattggattcgacacactaaagttatattctcaaaagtgtgtggatatcaatacaaaaagagatttctaggcgaaattaatatcgaagcttatgggtaaaatgctcatgggagacccaataccataaacctgataataatgatggtggtattgttcttgggattttcaatctctcaaggatttcgtctctcgcttctctaaccctagcatatcattatctttatataggcctatgaattgttagtgatcctccacatgtcaagatatttcactttcaaattacgtaagttattccaaataatgaataaaaaataagaataaataaatatctatgaaaatatcccacaaatattgggattgttgttaaagttggttattccccttgtcttaaatttgcttgtgtggcatggcgctttgaaaatgcaaacattagagaggagtgataagggatatcacctctcggctcgaaatacataaaattagagaggagtgacaaggaatgccacctctcggctaagaattcataaaattggagataagtgttggagagaagtattttgggatgacacttctcggtcatgatacgacatcccaacatcctattttagctcacatttaataaaaccaatcaattcctgagtaaagtgtgtcagcctgtcttgtgagccaattttaagcctgataacttcagaattgaactatgaccgtaagacacacttagatccttcttgaaaaggtctttccaatgcaagttgaaccaagtcatttcgataaaaattaagagagttatgtctgttttatcgaagaataatatgtaattttcagctccaaatctgaccactgccacgtcaaaaaggctgttctcccaaaaatcttaggatgtgttttgatttttattttacggtgaatcatattttggaggtcttgggccctcaaaacctcatttcgacgtccgaaaccctaataagagaccacaagccctgacaaccactgccatcttttggcaccgactgatggtagtggtctcttattaggcagtggttggctatgggggttatacaccccttcgtgacttttcttacttgtatttgataccttgatgttggaaatacactttggccaaatagatttcccactatttgttgtggaccactgctattctttgggccacaaagatggcaatggtcggccaagtaattctataccacttggtggccttcttcacttggtttgatatgttgatgatgaaaatgtacttttgccaaagaatctccttcccattgggtgtggctaacatgtgccacttatttgtgcataaagatggcaatggtctactagggtgattccttagtgagaaatagtttctttcacttgtgttgtactccttggtgttgagggaacacattttgacaagtctccttggtattttgagagaagagagcattgccatcctcttatggcagtgctccaaaaaaaaaaaagagcactgccatcttcatgtggcagtggt

SEQ ID NO: 228548 - DNA, 1303 bp, Cannabis indica
agctattacaggaaaaaaaaatgtaaccatacggttacaataaaaatgtaaccattgaatagtcacccatatatatatatatatatacatactaagtattagtaacatgctagttataaatatagttagattataattttattttctaatttgattttttaaaattaattgtcaaaatatttacacaattaatataacacaaataatgataaagtatattatctataaatataaagtgttgtcggttcccaaactcctcattcattttgtaaaaaacttcatttaaaaaaggtaaagaaagatcttagaagcctgattacctacagaaactagttggttttcttttgaagattcaaaaattgtgtgaaattaaagttcaataaatcaatagcatcatttttttaatagtacatatatgttttcaatcatatatattcatatcattcataaaaaaaatctaacaatattcacatagttaatctaatattcatcaatttataatttgtatttaattttaaaggagagtatacctaaactatatatataaatacactgaaagtagacgagataggagtttagtttgagtctattatatattaataatatcaaaattcttaattagaccttaattaactgtttttacgtgctaactaattattaatgattttgtcttaagtttgattataattaagctttttcttaacttttctcatcgttaaaaaatttcttctatattattaaaattgtttgatttaaaatttgtttaattatataaattatatccttgaatttttattagtaaaattaaataataattcttaaattaaataatcttaattcgaaatttattttaatgatttaaaaaatttaaagaagataatttaattatgatagatgggaagcctttagagaattgtgggttgggatttctttgtttctatgttgagagggttattacaagccggcaccgactaataataattataaataaatacacaatgacaatatgtattatcattattgtaggttgatttgaagacacacatatatacataatattctttttcttctgtatatatatataaaacacgattttgtccggtaatatatttttacggaatgtattccgtagtatattagatgggtctgaaggtacgagtgtcaggttacgttactattttttagtcttaattatttctacatcaatttcaactctcaaatcaaattaatcactcatctaacggctgtcgtacatcacggaatacaatatgtgaaaatagaataaaatcatgtctatatatat

SEQ ID NO: 228549 - DNA, 956 bp, Cannabis indica
ggccttgttgaagcggtgaacctcgtcgacgaagaggacaattctcttattcttcgtctttgatcttctggcttcatcgatggcgtcacgaacgtccttgacaccacacatgacagcagagagggagacgaatcggtaggtggtggaggaggaggaagggttggggaatgagttaagaatggctttggcgatggaggacttgccggttccgggtgggccccaaaagagaatggaagggatacggtggcggtggagggcggagcgaaggagggagttggggcgagtaggtggtcttggccgacgacgtcgtcgagggtgcgagggcgcattcggtcgtagagaggcaggtgaggaggggtggtggggtggtgttcgtggtcgcggtggcagtggcggtggtggcgtgggtgagagtggacttgagacgcttagagagaggaaggaggtcgtcttgaatgggtgtggaagaaggagcatcatcaggtttggagttgaagaaacagtggagcttgggttgaataggaggagcaaaagaataatcgtctgaggaggggatggttttgtgatttagaatccattcaacgactttggttggggaactaccgccggttgccgacaaggcctgtgccgccaagtcctccgagaatcccatgctaactagccgctctttctccgtcatcgcacagtccactcttctctctctctctctccgttttgggaggggtgtttttgtccacctcaaatcggtgggttttgtccttaaagaattatatttacacttcattcttcttcttcttattattattatggtttttatatatatatatatatatatttcactttaaaataattttttttatttttacaaaattttacacaaaaaatctttagaacaactaagagagcaatttaaatcagcagagcaacccaaatcataaattaaaaataaaaataaa

SEQ ID NO: 228550 - DNA, 1889 bp, Cannabis indica
tttggggtgatttgggttgggcacactatgaagtatgcgacaatgtctcttaattaggggtgtaagggaaatactacccccgatcaatgtggtgctctgaccaggccatctagttaagggccaaccaatgctctcgttggttcctcgacggttgctcatactgaacaccctcctactagtccactctccttgatcttatcaagtgtcttgatgctgatatggatggagaagagacctataagtcctactattccccctgttcaagaactttagactcaatagccttccctagcacatggttaactctggccattgaaggctgactaagcctattcaacggtcacctgacctaatcatatgagcccagaagcttgttgtggaaaatagaacatgttctatcatgtctcctcctcacaggtacatcctcctcagcctcaaactcactattcaagctctccacatcctagtcggccacaagcacctctgcttggccaacctctggctctttgcctcctcaactacactaactatacccgtagttgatatcctgacaatgtgagggtcaaaaggtggtgccctgcaacatgtttgtttgatccttgcaataatgggctactacaaacctctagatcactcgagaagctactagaggaattcactggatactagtccacaaagggaagacgaacagaatctttgtcaacgcggttgtcacctcccccaactgtcacccgagatcacctaaacaaaagagataaggggaagtgagaaactagaaaaagtgatgaggtgcagataaagttctgtccaattgtacccaagggtacttgcagacaatctcatcgtacaaggttgagtattagtgaagtatcatcccaagtataacaacatggacaaatgtttagtcttaagtttaacattaaactataatagactcaccattaagtgtcatagacatttttgaaggaaaccatatatgagactaaggttgtacatgcctacaaaacgttcacaaatgcttgccaaggtcaaaagaggacaaaaaattggttgctcgcttagaacctaggcttagattagctagggttcccaagctactagatggtcagccagggtcccatgacccaaccaagaaccgttcaaggtcccatgacccaggcatggaccggccagccctcttgggtgaacccctatggtcgtccaattcccatgaaaagaccctatggatggccaggtcttaagaaagactcctatggtcggtgagggttggtgatgaatcaaaatgtgtgtttttgaaaaactcaaacaagttctttatgttcttcatgactcaaagcatcaagaatcataacaaaggttaaaattgaatctttttttgtcaagaaatcacacattatgaattctaaaattaacatacagataaaaataccaaaatgactacaatataacatgagaataaaaaaaatgtttgaattgaagaaaagcttcaaagaaaccaataaaaatccaaataaacaagtgaagaacaggattcgaaagcttactagtagaaatagttgaggaagatggtggaaagcttggatcgtcgaaataacgcaaaaaatcttaggaattggaagacaagggggcgtcgacctcaagggaagtgaagagcttttctaactttctttttgaagagagagaatgaaatgtgggaaatgagaagtgagttactcacataagcttatattgcttctgtgggaccctctctcacttgccatgcaacatacataaaaaaaaatatctagatatgtaatattatcaattttctgcaaaggaatgcgatcatacaagcaagagaaagtatttcaaaggccaaatatactgcaagatctgcctggttaaggcta

SEQ ID NO: 228551 - DNA, 1728 bp, Cannabis indica
aatatgtttcatttacaagactttagaacattattcagtttaaaaaattaacccactaaccaaaatccacaaattgagtttcagatgaacattaacagaaacaacctccattaaacagaaaaattacaaataagcagcataaattctaaattccaaatcaaacacattctaaggtgctgcccaaggaaggggcaagaaacactctaaacactttattctaaaatatatcccataacccctgttacagttccattccttattataattagaaaaatgattcactaagcaacaacaaattatgtaacaaaaatacaaaaactaacaattttaaaaattcaatattttatatatatgggaaatgtcgtaacaattttatacaacgacattgttctcgatctgaagtgaagcaaaactaaactgaaaatctaggttcgtacaaacactcaaatcaatttcaagctgaaaattgaagtttatggcaaaatccgtgcgtgggaggaataagtgagaacgaatgaaattacgtgattcaaaacatattcccttaccatgttttccaagctagaagagtgagagtgactgagtgaggaagctggggtttcaactctcgaagctcgagtagtcccctgcagaaaaccctagagaagaagagggcactgaaagactagaaataagacatgtttgctgatatgatgtaacgtaattgggaatggcaattggttatggtaaattatttagtatcgcaatcaattaaattaacggagaaatgtaataaattaacggagaaatattagagaacaaataaagaataatcagaatcaatatttataatatgttatttattaaaattgtttagaaatggaatgatattaatttatcttgtttactttatcagaaaacgtaatttcagtatttaaattgattaaattacgcttttgagttaaactttttaatatatagtagttattttgtaaggcatgttttaaagaataaaattattattataaatttagtattaaaaaaataaaataaaaatcattacttttatggtattttttaaaaaattagtgggggaaattctctattttttctcttttatttaaccaaattcttcattttttaaatttaataaattaaataaacaaatgtaatataaataataataatataatggaataagaattttaataaaaatgtatcatgatttttgattaaacactctaattaaataaaataagttgtatattgacaaaaatacctttaattttattatttttaatatttaaaatttaaataaaagtaacataaaagggcaaaagatatattttttaacaatgtaagcatctttacattagttttataatatagtggggattacaatacatagtctaataaccattacaatgtaaagtcattacaaaactttaaaaatgaaagcaaacaaatgtaatggtaataataattccattacaatttcaattacactaaatcaatcatgctcatcaaaccaccacttcgcacaaactgctcgcactaacgcacaaaaaaaatgaagtttgaaattctttgtgttgcagttgcggtttgtatttttgtcaaaccgtacgctgagatgcaatttgcaattttaaatttaataatagcgattcaaaccgcattgtattatatattacaaaaaatactaatttttacattatgatttctcttttttatatataaataattcat

SEQ ID NO: 228552 - DNA, 2133 bp, Cannabis indica
ttggcaccttgcatctgtgttctgcacaaaagatcttgcaagtactttgtttgagagagatggagccctgtagaggtgtgagtgatctgaattcccagaaagtagttgagatcaccaagatcttttagagcaaagtgagtgttgagtttggaaatgagattagacacttctaaatcattgctaccaatgacaataatgtcatctacatatacaagaatataagtagtgtgatgaggatgaattctgagaaataaagaagtatctgatttagtatgctgaaatccgaggttaataagagctgtagataacttgtcaaaccaggcccgaggggcttgcttcaacccatacaacgctttttgtagtttgcataccaaatccggatgttgaggatccacaaatccaggaggttgacacatgtaaacctcttcttctaaatctccatttaaaaaggcattattgaagtccaattgtctcaatttccaacctttggaaataacaatggtgagtaaaactcgaatggtttctggtttaacaacggggctgaatgtctcattaaaatcaaaaccactttgttgatggaatccttttgcaacaagtcgggctttgtattgtgtggtacttccatcagcattttctttaacacgcaacacccacttgcagcctatacactgttggcgaggtggtaatctcactaaaacctaggtattgtttttctttaatgcataatactcagtgtccatagccttgtgccacttaggatcttgtaaagctgtcttgacagtagctggaacaaaagaggcagtgaggacttttggttttcgaattccatcttttgctctggtttgcatggggtgttggttaataacagctggggtgatacaaggttgatttggggcaggtgaattagaagagtcaggaggtgttgatgatgtgagaggtgatgtggtgagggctggtgtaggtgaagatgaggatgatgtggagatgggtaatgatgaaggctactgtagggatgaagaaggaggagtagcagtagtagaaaaggaaggatgaacaacatgaggaataacagtagtgaagttatgaaatgggaagacattttcattgaataaaacatcacgagacatgtaaattcgaccatccttagctaaacacttatagcctttctgagttagactatagccaataaacgtgcaaggggtggatctataatccattttatgcctattgtaaggtctaagattgggaaaacatagacacccgaatgttttaagagctgaataatctggttttgagtgaaacaaagtttcatggggagtaaaatcattgagaacttttgttggcattcgatttatgagatacacagaggttctatatgcctcatcccagtatttaagaggcatagatgcatgagctaacaaggtgagacccgactctacaatatgtctatgttttcgttctacaacaccattttgttcatgggaatgaggacatgacactctatgtactatgccacatgactcaactagtgaagtgaaagctctgaactcccctccccaatcagattgtaaggatttgataggaagatttagttgcagttcaatttgggttttgaacttaataaaagtgggtaaagcctcatctttggttctaagcaagtagatccaagtatacctagaatacgcatcaacaaagcttatgtaatatctatatccattagatgagaccatggaggcagggccccatagatctgtgtgtagcatttgtaatggagctgtgtaaactgtttgagagttgggatagggcagcttatgatgttttccaagacaacaagcattacacaaatcaaatgcatttttattaatggaagagatattacattttgtcattatagattgcacaacatgtttggaaggatgtcctaatctattatgccaaagattaaaactcgaaataggtacattggaagtagattgctaacattgaaaagcaattttagatgaggaaacaccagcagaagtgatgttgctgtgattgaagggagagttggatcgaagaggctgatcaaacttgtaaagccctttgtcaaccttcccaaccaataaagtcctcatagtagcctgatctttcaca

SEQ ID NO: 228553 - DNA, 1353 bp, Cannabis indica
gagtgaaagaagtttttcatcttatcttgagctttgtagaaaaggtaaggggcgaattgttcatgtggagtcaaagttttgaattgttctttctgtttttagtgttaattccagcggtgaatgcaattttgccaaaaaatttatcttagctatgtgatttatctatttttgtttctcgataaaccatcgcaaaacacttgaactaatttgtatgtatacaaaattagggattataagctgtattttagggattaatcagtattgaatgcttaagggagctagattttggctaatttagattatattttttttacttggttaatcaattggaggaaactttcagcgatgttggtccgattcggtagtgtttcatggttacacaagagggtaagctaaactctgctctgattgcattgaattaaaaattaatggtggtgtttatggtgaatgaatcttcattgtatatttttattccaaattcttagctaatgtggttttaaccaatgtactgtatcattgttgtgtatctgctattggtttttgtatagaagagtttgtgatacttgtgttcaattatgcagaattttataaatctctctctctctctctctctctctgtctctctcactctctgttttttgttttttgttcaatctgctatcttatttgttttccattcataaaaatacaaagttgttacgtttctaagaaaacaaagtcctagattgtatcgccgctctttgtttttcttttggttttgtatgcaaatactcttatctggtgtatgcagttctatttttccttgatggtgttctaaggtttctttctaaattttagaacaatggatttctgggcagagtctttggaatcattggttttagaattcgactgcctcttggtctccttattgggttcttcttctttatttactccaagcccaagaaagttgaggtaatgtatataaatgtgtatatgtatatgccatatatcttcttagaggagttcatatgagtcgtgaatatgtttgaaatggtaaactggttactttacgttttagtctttcaacatctatatctaaagttctgcttttttcttaaggcacagttattattgaaaatttgttagagcagaaatggattggtatgagtagtattcaatattctcaccctcttataaaaattgtcttttataattttgtgctcttgagaaacctttcatgtaaaaattctgtatcatgtgttctttataaagaattattctccgtgagcattccctctcttgtgtatgtttaataatttctgaattgtgtatgaatttatattgaaccatgttaatttctgttattaaattgta

SEQ ID NO: 228554 - DNA, 1928 bp, Cannabis indica
cacaataaatcaattaactagttaggatttttgctaatctattttcttaattccaatgtattacactaaggcgatgttcaatggcttgctaatggcccaagatctcaatttgtgtttgaatttcattgaaacagattctttgttacatgcaaatgctgtgaataatcaaacatcttctaggtcctattttagcgatttagtcatagatattaaacaacatttatccaatctctctcaagcttgtgttcttcatgttagacgaactgctaatcaagcggctcatggattaacaaaacaggctttagtgcaggataatgtttgtatctggcatgaggatatttcctctgctattttctctgttgttctaaatgactcattaaaaaaaaaaaaaataagcactttatattaatatccataatactcttttttttcttataactttaccatacatattcttcattctcatctacgtcgatagtggtctaatactactattttttatgtttttgtacataaaaaaatagtatcaggccaccatcgaaccatattctacatttataaattttaagctccatttattaaactagtcagaaaggtatcagactaccattagaccatattctatatttataggtggcgtcgggctaccgtcagaccaccatcagatcttcgacttcaacttttactcattttaataataggaagactttgagccatcattagactaccatcgagcctaataaaataaccaattttctgtccaaaactcaaattcgactgtttttgaccctaaatctaacattaactcacagataacaaacattaattatacaatttattcctaaatcaacaaacctataaataaaatcatacatttcaaccctaaatcacatagaatacaataaaatgaaatgaaaaacttacattcatggcgcggtggtgtggttcgtagatcctggatcttgggtgggtagtcgtcaatggattggtgtcttcggttgaaggcacggtggttcgaagctgtgggtttgctagggtctttgtatgcgcgagaagaagagtgtgagagagacagagagaatagaggacgagagagagaggatgtgtgagttatgataggggtatttttggacttaatgaaaaaatagtctatctaactaattttgatatatttaagtttagtgtaccaattttgctcaaatgcatgaatattaattcaaattttcctagtgtgttagtttcaattgtaactgttttttctttcctttatattttgctagtgttagctaatagtgtagctaactatattaagctctctaggtttattgttagttagaactgcaggttgtaattagagagagagagggagattcgtgttgtgtgagagagatgattctctgaagactgttcaaagaagaagatcgagaagccgatgaaggattgctcttagtttgtaaacactaaatttggtttcttattgcatgaattgaacccaatgatcaagggagttcacataaggggattaggctctcccaacacattgttaaattaaggaagtttgaacctcttgaaatcggttgtgttcattttaatgcttttgtgttcttgtactatttgattaataattgttcaagttgaatctgtgtagtgttatatttgtgtgtgtgcagattggagttggtttgatccgaaacaaacaattttcaatatgaattgttgattttacgaactagaggaagatgcaacatgaaagtgaagtgagtgatcgagtttattaaatgattacacacacgacctaattatcatgtcatcttctttcttaatccacaaaaatgacaaaggtgagcttatttgaaagcatattaatctactttatttaagatattgtttggctttaattggaaggaaagtgatgtgatcaaaccgat

SEQ ID NO: 228555 - DNA, 1596 bp, Cannabis indica
cgtccataaggttctgacaaaaatcaggttccaatcaaagttttgaacttctagaaattccatttctagaaattccatttctagaagttccaatcaggcctagttggcacatacaatttgttttcattcgttatcctgaccaactcttattctcttgtctcccaccttttgtagatgaaccctagtgatttctaaggaggcaagcatcatattgaccaagacttgctccaaattctgtatgaagatcatcctcgtgctagtccatcttcgtccagtgacaatctttcaaattctagtttcgatgattggaaagtaaccagtgaacacacatcttccctagaacccgaggtgcaacatcattcgtaatcccgaccaaatctgtggcgaaggatacagttgtttcatctgggaacttaagaatggttggagacgctatcttcctgccagctagacgtatagggtccatccgagcatagttgacactttgcccaagggctgcccaatcctagctactatagaaaattctattgttgaatttattgtgactattgcaaggcactcttctgataaaacttcgtccagtcctaaaatgatggcacgaactaagcagattttcaaaaaacctttatctgctgaccctcatatcgcctgtcctgtaattgaggaggaggagactactggagatgttgaagtccaggaggtggaggaccagggcgaggttcatcccacaaacttttccgaggtcaaaggtgatgaggcagagggggtccaaggggagctcgatggatttctctaccatccctcttgaccatgaagagattgactgatctttttcaaagatggtctcctggggaaggtcgaatgcttccttccctttcccagtcaactggctaccaaccctggagagggttattgtgcttggttggggccttatgccaaacaggggcaatgatgcctttacatccgtacttcaaggagatggccaactcttaccacatcagtccgacccaattcacacccaagggccttaagtacctatctgccttgttcgtgttgtacgcctcttaaggatagggtcagctatctgtccatgacactaactagttgttcgacctgaagtcgagccctaagcaaaacatgtttgtgtatttctacttctcttagatagaggagtcgtggctcactggtaccacaaacaccgaggtgaccaagatctgtggctttgtagaggactactactttgtcaagggagtggacaccaattataccagtttccaacatattccctcttacctgtcgacctccgttcacgctggaactcaggaagagggctcaagaaattctttaacttcctttaaatgattgaaatatctctcttcgggccactgaagccaattttatcaattacaagctttatctgtttgactatgtacaaaggaccgagtagacagtagggggttgtaatcgaatgagaggctccgagcaagaagaagaagaagaaaaggctcctccaagtgaccaagtacctattgagcgagccattaggattagagatggtctcaagaaggttgctcaatcttctgccccagtggttgg

SEQ ID NO: 228556 - DNA, 2008 bp, Cannabis indica
cataaaacccaacacatctaactcaagctccaattttgttgaaacttgtggagggggaagatttgtatttctacctggcagtgttcgatcatgctattagtgccacacttgtgcgggaggaagaaaaggtctagttccagttctattacgtatgtaaaagattgctgggtgcagaatccagatgccctatgatcaagaagttgacatactacttactaaccacgtcttgaaaactaagaccatacttccaagcctacaccataaatgtactgacaaattatcctctccgccaggtgcttcacaagctggagtcctctgacaggctgctaaaataggctatggaacttagccaatttgacatccagtaccagctgcaggtgcctattaaaggtcaaggcctcgccaacttcatagtagagtgttccagcctgaacaacctcctagaagagccaatcctggaactgcacttctgtaaggtctacgttcacggagcctcaaactagaagggagccagaaccgggatcattctgatccctccataagggcaccaacttcagagtgcctacgttttagctgccgtgcctccaacaatgaggaagaacacaaagctatgctgttaggcttaaaatttgctaaaaatgtgggagcccaacaaatagaaatacatcatgagtcctagctggtggtgaatcaaatttttggtaagtattaaacaaaaggtgaaaagatgcctgcgtacatcatgatgtctcaagagttactgtaagggctcaaaggctacaatattcgccaggttttgagggaacaaaattcatttgtagacatgctcgccaaacttgcaacagatcctaagatcgtccaacacagagtagtcctaatctttcacttagaaagaccaagcattgaagtctaggggtaaatgccatagtcgacaactcacattctcggatggccatctataactttctaagttcaggagagcttcttgcagataaggccgactctagaaaagttcagtaccaggctcctcgtcatgtaatcgtggatggaaagctttatcgtcgaggaattttaatgccatacttgaggtgcatttccagaacaaaaatcaacaccatgatccacgagattcatcgtggcttttgcaaaaatatacattcgggcctagtctatcaaagaaaatccttcattagggtatttttggcctacaatgaagaaggattgcatagagtatgcccagaaatatgaacaatgccagagatatgataaggttccacttgcaccaaatcacactcatgagtagcccatggccttttgcagtttggggtattgatttagtgggatccctccccacgggaaaagggagagtcaaatacacgatatttgcaattgattatttcactaagtgggttgaggtgaagtcaatgaatactatcacctcaaaaaaggccttggactttgttatcaggaaaattctgtgtcgttagggacttccattcaagattatctctgaaaacgggaagtagtttgacgtaaacacttccctgaattctgtgcctagcatggaaccgtgaaaagcttatcagctgtagcctagcctcaagccaacgaacaagtggaagccgtaaacaaaattttgaaaacaacttcaaagaagaagctccaagaatgtaaagctcattggcaagaggaacttcttctagttctttgggcctacaggaccacggagagaactttaacaagacacatgccatacatggatatcttttattttatctagtaattagggtttaagctctcctatataaagagccttaactcaaccctaaaaggctaagtctcattttaagccataaagctctaagtctgaaaccctaatcctgttctctatctcttctacacgcccaaagggtttttctctccctctctctcacacaccttcaaggatctatctctctctcattagagacctacctactgattcatacattgtaaccttaagagagct

SEQ ID NO: 228557 - DNA, 1067 bp, Cannabis indica
agatcctggtaaaataatatccaacatcaatctcctccatcttaaggaggatatccacttccaattgggcattttccggagagataggttgcatttgaatgtcaagcaaaaacttataaagcaacttcactttttccttgcgaaatctaaaatgtttttttattccaaaccgccaactgcttcctggtgtgagcaagacgagacatgaacagaaaacttctagccctagagacaacaagcttccaagtataacgaacaacttccatacaacctaaatctcgcatccagacattcaaaaaacaaaaaggtttatggtagtgaccttgctcatataacaaatcaggcaatagaggggcgttgtcagaatcttgtattgttaaagagttaacacccgctttcgggtaagccatcaaccattcgggatcaccaatcactcgatgaagacattctttgatcagatcaaagccttttcttttgttagaccaagtgaagaaatttcccaaacttcccatatgcactccacctgtggactcaagaaaatcattgagcagcgaggtatcataaggagtagcacgacgaccactaatcttatctcccttgtaagtaatgcaatttagatcccccaaaacaaatccaaggaagagaaaaggcagcaactaacgataaaaggtcccaaaaatcctttctattacctcgaatatgaggagcataaataaacacccccgttacacgggattgctgagaacattagagaattgaccaactatatgagaggcagtggagttaacgatttacacctctatactagccttccaacacaagcataaaccaccagccaagccattcgcttccacaatctcttcattaaaaaaaccccagcctttgctagataccattcattgccgtagcatttaattttgtctcgatgagaaaaagaatgacaaggtcttccaaacaaaccaaacccaagagggccttgactgaacgagattgtcccaaaccccgacagttctaggataagaccttcatgaggttttgggggtatgatacgacacgcatccttggcc

SEQ ID NO: 228558 - DNA, 2572 bp, Cannabis indica
gagaatgggaaaacaatttttataatggcagcatgtggctctgttttgtctcttttaatcccgtcctggggcagttttggatagtgtttttgtctcaagtacttttcgttttgttgtttattaggaaacaagggtttccttcgccacaagtgaggttttttaatataatggggaggatccaggacttgtggatctcttctctttttcaaaattgtttaccaaacacttttttatcacaaattttttaaaaagcagcttttagcttttctaacatccatttcattatttcttgttttttgtatagttcagacccctgcataaattaatccttttttttgtgagtatttttcttagtatttttcagtcacaagtaaatgccttagtgaattttatatttgtcatattgggtttgaagaattgaagttgatgtgtgttgtttaccacaacaaatttaataattttttctttaattttgccctttacttcagcataacgacaaatacaggttcagtataacgtcaaatacaggttgatctcacgaagactattattaatttattaatcaagaattagaactgaaaattagaaaatggagtttttaatataaacattaaataacataaactagaaagctaataaagatagataatgatagtgagtaatgtggggggcagtaaaagaagcacgtgtttatggagaacggcagtcttggcagttctatgggtggtttggttagaacgaaataatagaatctttgaaggtttggagagcttagaagcggccctatgggataaaatttaattctggactgcttcttgggtttacaagactaagctctttgaaaatgtttcttttttagacttgattagagaatggagagcattgttgtaaaatttttaatactgccttgtggtctcttccgctgtgtgggatctggtttttaatgcgcgtcctagggggtgggtgggggggatggggattgttgatatcaaatttttgagactttgttttggttctagggtgacttgagttttgtataagtcttggagtttggtgtaatttgtaaccacgattttcctctgccacaagtgagggtttttattatctcggggttgggggcaaaaaaaaaaataaagatagataatacactataaagaaataggtaagaatcaatgtccaccctcaacaatcattcaagatcaataataataagaattatttcaatttcttaattaaactattaacctcgcagaaaatgctgaagcagtcaatttttccaatctccctattacaattaatcaaggtgaaatgctgaataattaaatatttttactaagcaatagatccacgaagcatgcaatttatttaacataagaaaaatattaatttctatggagataaattaatcaaggtaacaaatcaatgaagcatataattcatttaacctaaggtctgttttttatcacaattaataatatttttgacattactattaattgaaaattattactctacttagagtcctaaactattaggtgagaagtaattctaagatacaaaaccttaattattgtgtacctaacaagaattcacaatttttatagcattcaaataggaaaatataaacagtttaaaatgagagaaatcaagaacaacatttattatcactaattaagaattcatgttttagagtttggaaataacccttaactaaaaagaaacttctccatactaatcatcataataaaaatcataattcaaaagtaaagagataggaaaagaaaagaactagaatgataaacaattggtgatgcaatcttcttctccactttctataagtttctctttcaaaaacgcaatctgaaagtgataaaaacgaaccctaaaagtcttatttatttaatcctaaaagcccatttaaatttagcttgaaaattgattttttgcgaattgtacggacgtattttcgcctctggccgccctagcggcgcttaaatgcctccggggaggtggttcctgggaaattgcgtcacgtgctcagatcagtattttggtcgtaaatctttcaatacaactcgaaattgaatgattcaagatgtttcgaaaagttgagaacgagatatacaaatttcatgttgagctctaagtccagttttgcttctaaaatcgtcaaaatctttaattacgttcagtttagtcaaaccgagctctccgacttccactatttttcactaaaatgtactaaaatccctccaaatgactccaaatgcatgattagtcttccaatacccaacaaataaaaatcacactaatcaataatttaaagaatcaatttaggaatattgatacatagattggtcatatttataagacaaaatatcgacttatcagaaggatagaagttaacttctttaaacaattttgtgaagagaattgaacatgacattcctagatatatatataaatatatatatattcttttttgaaaatgtgacattcctagatatgttgcttactctaaatgcatttttgttaggccttagaaagtatctccttgcccctttgaatataa

SEQ ID NO: 228559 - DNA, 1301 bp, Cannabis indica
gtaatcttaaaaggttgtgaagatggaagctgatatactaaagacacttaagtttgaaatgggaaatcctactgtccgagcatttttaaggtaaggattggaatagggattttgttaataatgctcatttaatcaattaatgatttttcataaccattactacttactattatacttactcattgtttgtctctttccctattatgttatgcagaagagttactaatatagctcaagaaagatgcaaactagttacaaataagaccaaaacacaaaccatcaatttgcaattggaattcttggggtactatcttgctgagttgagtctcttggattacagctgccttaaattcttgccttcaatggtggctgcatctgttacttttcttgcaaatttcattctccatccagagattaatccttgggtaagattttcataccaaaatgtacttcatcagctatatctttacagttatatcattagcagtcaataagatgttttgtgcattttcagtgcccaaaactgcagaagtgttctggatataaaccagttgatttgaaggaatgtgtacttgtaatccatgatctttactttggtagaagaggaggagctcttctttcaattagagataaatacaagcagcataaggtaaacttcattttcatgtcttattgaaattgattttgtttcgtttgatgtttaaagtgataatcagattcagaacccaatttacttatcctgatttttatgcttggttggaatatacagttcaaatgcgtggccactttgccttctccaccagagataccagtttcttattttgaagatgtatgttgaagtagttgccactgattttgattgagatcaattgatctctttatagtgtaaccaattgaagagaattgtacatgatattgtagtttgtagtcaattgaaatgaaaacatgtttgtcatattagttttatatataatcatgttatatataaaggagaaataaacccaaatgataaagaacacaagagagcaacaattgaaacagagaaaagaaagaattaacacaactgttttatccaatcttcctccatgagattcaatttctcattagtgttcaaatgttaaataactttgagattaatttaaccttgattctttgttaaagaaatgactaagtttatgtattgccaattttcattggccattgattcgatgatcttgtgagtgaacctctcaaaataatcatccatgcaacttctcctaaatgtttttctaaaaataaggctccataactgctctcatgta

SEQ ID NO: 228560 - DNA, 2350 bp, Cannabis indica
tgccatggcacggattcagctttagcagaagatcgagtgacaactttgtagttttcttagatttccatgatataagtgatttgccaagaaaatatacattaacctgagactgatctttttgtgtcttgggagctgaccctagtcaaacatacagcaaacaataaaagctgaacattagctgaagagagacttgtttctgcaaaggcagtgatggtgggggcaggtgttggaggaggagaagaagatgccttggtccgggggtcttttctagatattgtaagaccttattggcagcttgtagatgaggaacccttggacaggctaaaagttggctgagatgattgactgcatatgttatgtctggcctagtgatggttaagtagattaacttaccaatgaggctttgataagcagttggatcagctagtaaagttcctttgtctttgctgagttttaagtttggtttcataggtgtagaagtagccttggcaccaatgtaatcggtgtcattgagtaatttaagtgtgaagggtcgttgggagatggatatgccctctttggttcgacaaatttcaaggccaaggcaaaaatgaagttttccaaggtctttaagtttgaacttttggccaagagattttataaattgagtgatgtgcaaggtattattacttgcaacaactgtatcatccacatagatgaggatagttatgaaatctgactgtgttcgtttgatgaacaaggaattgtcagacttagattgttggaagctatattgaatgagggtggtactaagtttggagtatcattgtctagaagccttttttaggctgtatatactcttttgcaatttgcaaactgagtttggaggtgccttgtatccaagaggaattttcatgtaggcctcttcatggagatctccatgaagaaatgcattgttgatgtctaattggtgaatatgccaattgtagatagctgcaagtgccaagaaaattttgagagtatcaaactggcaactggagcgtaagtttgtgaaaatttatgccttgcctttggttgaaacctttggcgacaaggcgagctttaaatctgtcaacatctccatgttcgttgtactttactttgtaaacccatttacaaccaatgactgtttttccagaaggaagtttagtgataatccaagtcttattcttttctagagcttgggtttcattgtccatggcttggagccagtgctgaaagagagatgcttcagtataattcttaggttcaatgtgggagtaggctacaagaacagcagcccgaaactgggaatttaattttatataggataaaaatgtgtcaataggatgagaagtagatgttgcgtgacaaatgtaatcctataaatagactggttttttactggtgcggcctgaaaaagaaggtgcaggcagatgttggttctgagttggaagaatagctacgagtggttttttattacaaatagatgcatgatcagcttcgtgagctgaaggagtgatattgggagaagatacatcaagtggtgcttgttggaaatggaaccaatatcagcttgtgtggctgttggtgtggggaatttttgagttgcagcagtgatgttatggtgctgcactggtttagcagtgggaagcacaacatgagggaaaaaattgtcaacctaagatggagatgtgggggaaaaagtggaaatgtgtgttcataaaaaacaacatctcttgatatatagatgtgtttagtttcaatatccataagcatatatgccttcatgccatgtggataaccaatgaagatagatgctctacttcttggtgtgaatttatgccttttggaaggtagagtgaggccataagctagacatccaaagcttcttaaatgatcataacgagggggagtttgattcaataactcataggaggtgaggccattggataactttgaaggggtttggtttatgagataggtggcattttgtactagtaggggccaataaaccagaggcaaattagattggaatcctagtgctcgggccacatttagaatatgttggtgttttctttcaactaccgaattttgttgtagtctttccacgcaagaatgatagtgtattatgcctttggaggcataaaaggcttgaagattcaattccttagcgttgtctaaacgaattgccttaatgtaagatgagaatcatatacgttgaacatcaaattaagatttaagcatatatatccaagtaaaccgagttttgtcgtctactatggtgagaaagtatttaaaaccttctatgctaatgatatgaaaaggatcccatatgtccatatggactaaa

SEQ ID NO: 228561 - DNA, 1863 bp, Cannabis indica
ccaaacctagcgaagaacataccagaatagtactctgaaaaactcattgggaatctaaccatcgaagcttccctcataactttgttaatccactcaagtttcaagggtttcgaagtgagaattttaataacaagagaaaaagattcaataggaggttcatggtttaaggaaacatgatcaaaggtatgaatcaatgacttttccacagttaaagcaaaactagtggtaatcggttgactagatgttgccataataacgtaagagctaaaagactagaaatggaaaataataaaacaagtgataaatgctaaactaccataaaacccccaaaatcttaaatagaaaaacctacgcaaggagaggaaatacttggagcacagatgaagttagaggagttgaagagatgtcgagtcaatcctatcattaagcttccgtaggccatatcttctgagtatagcttgcatgagggcaaaatcttttgggaaaactggaagcgacagcaaattaataaagaagagattggcaaaagaacgagtactaaaggaaattagcaggcctaattaaatgcttgtacttacaaatcataatcagtaagagaaataaatgcaaactagtaattaagggtaaaatgggaagaaaaattgaacatgtaaccaaccaaaatgacaagaaaagaaaaggaagaaaatagaaagaaagatcaaggagaagaagaaaagcaaaaaggaacgaagaagacacaaaaagaactggagaaaatccagagccctggagacacccctagagaattctagatccaaagcatttttataaacacatttgttatgttgatcagccagacctaacaaccaatgtcatgccacatataacactttttttttgaaaccaaagcgctatatataaataagactagacatcgcagtcattacaaatgatagttctaggtatcgaggatagctccacgaaacctgtaatgttctcggtgaaggcccatttagccacattgtgggcagtaaaattacacattctagaaataaacgaaaaattacaagataaaaaacacacagagagttgattacagacataaacataattatcaatattccaatcataatgaatttctttcagcgctttgataaccgtttctgaatcactctccaccaaaacatagcaatgctttcttaaacgagaagaccctaaagcaagatggcacgcagccgcctctccaatcaacgggtcacagaagttgagtctggaggtaacagcccacactactgtcccagtatgatctctcgccaaggccgcaatgaacatggagtctccaccaaccttgacatcacatttgattttgatccagtcatccggcggaggggtccaaatcggagaagccgtagtaatcgtcggagggaataagcaggatgcataatctgtataacaatgagagatagaattaatagcagtcacaatgttattcggttgagaattatgtaccttgttattacgggtagtccatatagtgtccacaacgatacacgcatacaagaataatttttctaattccaccccattcaacctaaggttccacaaaaatttaacccagtcccaaacccgacctctagagccatggatcgggaacaccccccaaggggaggatctccagaggtaataagcaaaattacaataaaggaacaggtgttccatcgactccgtagcctccccacacaaagggcacgtgtcatcatcaatagggattctcctcgtgaggagaccacggattggaatagcattagaaaggatgccccactagaggtatttgtgcctttctagaattttggagttccaaagtttattccataaggccgg

SEQ ID NO: 228562 - DNA, 1213 bp, Cannabis indica
gataaaaatatcttctaacttcacgtgttgatatatttctaccacgaggaacacatgctaaagtcatgttgttaggtcacgagaagaacgcggggtactcctcatttagatcgagatgacaagcacactaaggctcatcttaggctgaggtgatgagagtgagtggcctctatttgggttgagatgatgatgaggccgagaccagtatttgttcgaggtcatggaggcgtgaagatcctcatttggtctgagatgatggaggtgtgaggacccccgtatggtcgaagatgatggaggtgtgaggactcccattcagtctgagatggtgagggcgtggggaccccattgggtcgagatggtgagggcgcaaggacaccattgggccgagatgatgacacataattccttaagtaaggtccccaaaatggtgtttagatgttatgacctttcctgtttccaaagagaaattaataccagttgccttcaatttttttgagggataacaagaagcttaataaattcatttagattatcactaataccttcatccattctaaaatcatagaatttttgttttaaataaaaccttccaggcaaggtctttgccatgaaagtctgttcaagcttctcccacattgcaacagttgtttcctctcttattatttttctcaaaatctcatcttcaaggctagtgtttcttgatttctttaggatctctttctttttgaatttctccaatattgaagacattttgtcttccctcttaagagcttcatccaaccctattttttcaagatgagctttcatcttttcccttcatagatagaaatcattcttgccatttaacttctcaatgtccatctttgttgtagatatccttgttgatcacttccaatctaaatcttgaagttcttccaactgtgattcaggatagtagttaaacaccttttcctctctgtcaagttttgattcttgctagctaatctctttcaattgaaaccgagctctgatagtatttgttgtaatttcaataacaacctcagcaagcataaaacacaaataaccacaccaaaaatcaacaattgaaatgcaagaaatgtaaaaggacaaaatttaaataacacacataaatttattagggaggtttgaacttccgtcacaattgtggagagcctaatgccctttgaacttattggaattgaaaatggctgag

SEQ ID NO: 228563 - DNA, 1101 bp, Cannabis indica
atctgtcaggtccacaatgacagcagacgccgcttccatactcagagccttaggaacaacttttaaatttggtattgggggtgctaacttctaacatctgcttccagaggcctggctctttctgccatcattaccgctttgagtgatcccctaatttcgtcaaatcgagcctggacactgccaaaacttatttagaagccccatttggagaggggttagttgattgtcataaagcacatagagcagtcattaaaagaaattacatcaaagggcattaattttacaatatgtaagcatgcaagacatcaggaaggtccaaaccattaatcctagcataatagatgtttcccctagtaaacagagcgatgtctgctcaacctaaattggttttgtattggagaatctagggaagtgatttttctaagtggatccacttgggcatgatggtgcataggagagataaagtggttaggactatagacaatgcagtctaccctatctacgtatctactaaaagaatacttatgacgatctaaattcaagatgtatggatcaaatccacactgattgaccatatcaaaatcagacacagagggagccttaattatacgaaaaggcttctcaccactactagaagtgctcgctcctgaagcaccttcattgggcatcacatccttgaaatggacggaaagttcttcaacctcactcaagcttgctgggaattgtcttctcaagtcttctagccattgttcatcgaccttcactgcctttaaagcctcctcggcagtcatgaccacaatggcttctctaacatctttcgagtccctcctagaatgactccttcacagataggtgttatatcctggtgtggggcaatgagacccacttcccaaagattttccatggttaccaaactcttcaccgacaactccttgggcgagaaggatttgtaaaaattgactctctcttcaagctccagattcaaggtggattgaggaaggtagtgtaacatacaaaaaatagtggtgaatcagaatacaatgagtacaaagaaaaaatagaactttgtgagccaaacaggaaacaagacttacttgcaag

SEQ ID NO: 228564 - DNA, 1154 bp, Cannabis indica
taaattataagtacttacaagaatagcaccgaggggatcgatccaccaatagaattttatagccaaaacagcagcaccaaggccaattgagttggtaataacatcaaagaaatggtcttgagcatatgctctcactatttcattactgaatcttcgacaatataccattagcacaaatttcaccactgtcactgataccattatccctatcatccatttctctttcactgagtctctttctggttgtgtctacaaatttatcattaataataattaataactttctgattttctttaataaaaagaattataatcaaaattaagtttaatgtatgtgacacataatattaatgtacctttgttaaaagttctcgacctgattcaaacagtatttgtagcccaagagtagccattactgatgcaaaaacaacaattccctatatacatttggtactatatcatcagtaagaaaataaaaagtagtgaaaaaagagaaggtaaaacaatagtagattagaaaataaaagtgacaaaataaatgacaaaaggtaaataatatttagggaaaccaaaatatatgtttttcttttgagcattgctattagacattagtggtgctcagtaccttttataggtggctatatgattagttagtgatattctttaaaagatattttattaagttatatgaaattttatttttaattacactaattaaaaagagtgttagacactaataatatactttttagctgttctgttttctttttctttgaacaaaccaaaatatatattctggataaacaagaagaattattattaatattattatttttgaaacccaaacaagaattattttaaaacattatgtaattttgtaaaatgaataaatgaaataaatttctcaagccagggtgttctccctatcccgaaaaagggactcttcaaaaagtagtatcgtagcaagagtggttctgactaagcatatgatatgatgaaggatcggctgaagctagagctaagtggccggtagttgggtaagggtaaggatggaaagcataggtccacttaatctaattgtattgaaggaaaaattttatttagcactcccaaaatttttaaaccacaccccatttttataatttttattttat

SEQ ID NO: 228565 - DNA, 2674 bp, Cannabis indica
ttggaacacatgccttacatggagtaccactgtctcaagcgccctggtcaactcttcctcattttgttgagagtaggacacatctaagctcattcatgaatctcattgtgatattaatagggcccttcaccttcgtttgacattttgacaattcattcacatgagtgcacttattccacttgtaggggacactatgaatctcaacattgtttgcattcctaacaatcctctccttgaacaatgtacaacaatattcctgttgatttgagcattgttcatgttgctatatgatatatcaagtctattcatcattaccgtgtcgaagtgcatgctttacatagaaccctagagtctacctcaagagactaccctactcaagtcaacaacaccgcctacccaatcaagctaaaccactgaaccaccgtacgcttaccaaggctctctgccattgttccgcgtggagaattccacccaatgactgataattgttgttgttgggattcccatggacaccacgaatctccacagtggtatggaattgtccattcaagcccgtctattcttatttacccattttcttccctacttctaacccatgtgaaacttagtttgtatagctaaccgtagagcatggacaattctattgcaaaagtttaactttggaaggattaaattggtcactattgaggatttgaaatctattgtctactctcgtctctctaaaatggtcttaataccaaacaactaatttaccccgaaagtaatccaatcatttcaatcaatcacttgtttttacaaataatgaatgaatccttaactagtttacttgactttacaccaaaatacaggtgatcttaattccagtagtctcactaatttttcctcctttccacttctctgttctgctaaacacactataagagtctcctctgctattgctccttgttggatatatcattggattgtggcaactggcaactggcaacttatatctatttgttaactttttatgacaaaaataaaattaaatctggttattatctcttattctcctaaatctatttgttctctcgttagcttttatcctaaatgctaattattaataggtgcttctaacttgtttttgtttccctgggtaatgagaattaaccattttgtttaaatttttatcttttggctgtactaggccttgacatcaacagcagtgaagaaaggaggactctcagctggggatgttgcagcactatacaagtacaagaacactgttattgatgtcaaagttgacactgattcgaatgtatgtatgttttcttcttttttcttggggttgaaaatgctacaattaaaagcagctgttcacttgtttgtttttgatagctaactcttttttaccttttaacaggtctctacaattcttactataactgaagttctgccttccacaaaggccattgcttccttcaaattgcctaactataattcgggcaaggtacaagatttggaatcttaacatatttttcttttactagatatgtggcctggccttgacatttgtagttactataagtgctctttatttttattatagcttgaggttcaatacttccatgatcatgtggccttagcaacagccgtggctttgaatcaatccccattggttgatttctcagccacctttggtaccccaagcattgcttttggtgcagaagctggttatgacaccacttctggcaatttcactaagtacactgctggtattagcatgaccaagccagattcatcagcctcgatacttctgtaagatcttatgttctttgattcatcatttaaaattgatttcaacttgataatttccgtgacagaactcggtacatctatatcaagtcctcttattccattctttcttactgaaggggtgacaagggagatagtttaaaagcatcctatgtgcattactttgataactcaaagagaactgcagcagttggagaggtgactagaagattttcatcaaacgagaacacttttacagtgggaggatcctacgctgtggaccatttgacagtggttaaagcgaaattgaatgatcacgggaagctagcagctaccctccagcacgaagttattccaaagtcggtgatgacagtcactggtgagattgacacgaggggcttggaaaagaaccccaagttcggtttggcaattgcactcaagccttgatggttcacacactggtggattcttggaaccttgttaaattttttttggtggctctcgaaagggagaacttgaaataagtagctccacagattatattcttttccagacaacaactgtggatggtttgacttgattatttctctttctattgttttcgtttctttatggaattgtaaggtagctgctatgtgctaggcattttgaaagttagcccattttatcttttaatggaaatttctgtttcacaattttttataatggaatttatacccgtcaaaaatcatacgctttaaagggaaaaatgtgtcactgactgccaagttttcctttcttaaaaaaaagggaacatttttattacaaaatttacgctaatatagatttaaagcactcagagattgtctgtggttatgggtatttttttctgtgttatgggtatagtttagtggtattatat

SEQ ID NO: 228566 - DNA, 1260 bp, Cannabis indica
ggttaggcggagatcttagtttcattaaagtgaccctttctctcatgattcatattttttttttcttgctttgctgaatttaatgtattttaaataccgtaatctattcttaggcttgaagagaaactctgtgacatggaaactgaagaccaaattttgcgtcagcaaacattgcttaattcatcttctaggagaatgtccgaacatttggcaatgtcatccgaggtagagatggtgcagtagaatatattatgcattttagtattttcttttcctcttatattatacttctgttatttctgaaaatgttttattgatctattttcctccttcattattgcagcctaaagagaatggtcatcacgtaagcgtttaaaactattatgcgcacctttgtatattgtgtactttttgtgagttttgtacctttttacgatcctaagggagtctacttttttcaggaaccactgaaacctatgccatcaaaaaagtttgggacatctgatagtaggctgagaagatctcaaattgaaaggcagcatgtatgttcttaaagggattcaataggttttttaatttatttatgtgtttttgtttattaacctgaaatttatacttctgtgttgcaggagaatgtagatgcccttatcaaatgtgtaacagaggacatcggtttctttgaaggaaagccagttgcagcatttactatatacaaatgccttcttcactggagatcatttgaagcagaaagaactaatgtgtttgatcgacttatacagatgattggttctgcaatagaggtaacaattggaaacttgaaaagaacaaactccttcaaagttaattagatgaagtgttgtatagttggactgtatgactaggtcaccttacctccaatgtcacttccttattttctaggataggatcgacttagatgcttttgatatggtttttggttcctaactcaaaaagagagaacacacttcgtgtttctggactgaactaactacattatgtctttgtacttgcaggaccaggataacaacaatcatatggcttactggctatcaaatacatcagctttgcttttcttactccagcggagtttgaaatctgcaggatctgtaccaagaaagccccctacgccaacatctttgttcgggaggatgacccaagtaactaaatgcttattatatttgaatcaatttaatcaaagttgctgcttgtgcattaagataaatttgttctttctcagggctt

SEQ ID NO: 228567 - DNA, 2904 bp, Cannabis indica
tgtaggttcctcggagggcggccgtaatgttggcagtttgtaaggccgagattgcggacaacatacatgttatgcccccgatagggtagactgtgaaagttgaagccttagagaagtagatggccttcaagctagggcgagaggctactcccttctgcccatggagacttgggcctcttccagcaacatggacgccttcgcgctggcccacactggcaaacaataggaaattggggtaaggcattgtacttttgctcactcttctttatcatttttttcgttgggaccctattttgatactttttgtccattctggcaggtggccttactggcggacgaccacgatctgcgtgccaccaatgagacccttttggccaagcttactgaggacaggtttgagattgggggatctatggcaagagaaccagtagttggagagggaaagtgtgcaacaggcctatctcatacggagtctgagagctgttcaggatctctatagggagaccgtggaacggatgtctggggcgagctcttctactcaaccagacagtgccaaaacttaggcttcattaggcctcttctcattgtttgtttttgtttttgttttctttgtatatcccttcccttaactacactttttcagccgtggagacaattaaattttccctggccgcggggggttgtttagtagttgaataagatatttttttgttgttcctttctcagagacttgttatgttagattatttagggattaattgtattatctgaaaaatctggttctaacgaccattgtttcaaccttctttccatttagtcttaattgcctcttggtcaatccaggcaccactttttagtttgactcatcctttctaggggcctcaaggttctttgggtcgcttcccaaaaggttgtctatttggagctagccaggaggtggcccctatttgtgaaacaaggtcttccattgtcctccttcgggttttgtcttctcacaaggtgaagtcccgagggcattgcctgtgatttctatagactttaggctttcccttacttccgtccttgccagtttttcaatttagccttttatgcaacttgttggggtaaactctacgtgaagctcatggagatgtgtaagaagggattcaggcgcatcttttcaattttttgaaattttttggccgaatgtgcttcttatctttgggttcactcttgagcttagcttttgagggaagaactcaagcgtatccctctcggggaggctctggtagagtgcgttccctatttttgttgtatgttaggctgaatgatttgggcagatggaagtaggatgttgtagttgtcggcaatcagatatatcataactgaaaatgagctaagaactttggggctcaaattctcaatcatttactttgagtttgacttgtgtttctctccaatttcccaagaggagggtcgggcataccctccgacttccaggaagggaaaccaagacttctaggcgagaactcgattgtatgttccaacaacccttttcacggtgcaaaccccgtaagggagattctcggctatttatagcattggggggggcattagtttcccaggggaaagctaggcctacgcccttaaataatctttcttgtgtagaggtttgtttcaacaaaaatcatgtcgaaccttctggcagcaagcttttgggtttcactaagaaaggcggaaagcgcacacaagctgggatattgaattttcctgtgaacaccaaagggtaaagtattgctgatttttgggagttatgctaaatttttgtgaggcagacttcggcttccaagaaggaaggctaaagtcgtctataagctcaagcttaaactctgcctgagaaggccaataagaaagcattatgtggagtaggatagacttgaagcagtccatccaaatccgggaaggagggttgaagacgtatcatacccccagtaacctttcctgcacgaaaaatagcgtgcatacaagagtcatgttgaatttttctgtaacaagcttcgacttccagggaggaaggctgaagttgtataaaaattcaagcttagactttgcttgaaagagtcaaagggaaaagcatcacaaggagtaggatagacttcaagcagtcctttcaatccgggaaggagggttgaggactcatcgtacgcccagtgatctttcctgtacgaaaaaaacatgcatgcaagagtcatgttgaatttttatgtaacaaactttagcttctgggagggaaggctgaagttgtacaaaaatttaagcttagacttcgcttgaaagaatcaaagggaaaagcatcacgaggagtaagatagatttcaagtaacccttccaatccgtgaaaggggataaagacgtatcgtatccccagtgatctttcctgcatgaaaaacaacgtgcatgcaagagtgatgtttgatttttatgtaacaagcttcggcttccgggaaggaaggttgaagttgtataaaaattcaagcttagacttcgcttgaaaggatcaaagtaaaaagaatcacgaggagtaggatagacttcaagtagtccttccaatccaagaaagaaggagggttgaagacgtatcgtaccccagtgatcttttctccacaaaaaacaacgtgcatgcgagagtcatgttgaatttttatgtaacaagcttcgactttgagaagaaaagttgaacttgtttaattagactttgcttaaaaggaccagatggaaaagcatcacgaggagtaggatagactccaagcagtccttctaatcagagaaggagggtataagacatattgtacctccagtgaacattcctgcacaaaaacaaagtgcatgtgagagccatgttaaattttatgtaacaagcttcga

SEQ ID NO: 228568 - DNA, 1895 bp, Cannabis indica
  modified_base (1876)..(1876): a, c, t, g, unknown or other
ttttttctatttttattaaaaaaaaaatatattttgagaatacgtatctctacttctacttctaattatttaaatatcaaataaattattttttgctaataatcttaataggttactatcaggatctaaatttgttaaaaagataattattagtatataaataaaatattaaataagaagaaagtacaacaaaataattaattaaagtaggtataaattgattcaattcaataataatttaccgtcaaatattaaatatttaattgtgatagaattaaattagatgttattttgaatatctaattggatctaatcgaatgttggacagaatgtctaaaaatccaatacatccaatatacactaattagtattttcatttaattgagatgagtaattagattttatattattatacgtaataaaatatatgtatatgaaaattaacattataagtttatttttttttattagatggatccaatccatttcaatacactatacttaaaatattgaatagatttaattcgatataataaatactaagtctagaatattgaataaatctaaattaaactaataaatatatatatttatatgaaatacatctaacagatagaactgatccaatccaacatctaatagatgttagatcaattgaatgactaaaattaattggatcagttcagattgtaaaatctaacatctaatatataattagatctgatcataataggtctaaaaaagttgtatgtggtctaataaacacccttaataataatgtttagtatagcggtgaagaattaatttttactatttatttattattttttttatcatgcaatcaacattatcaaatcaacaaccaattaaggaaataccaagtcatttatacttttattgcaagtttggttcattttgaatagcctttggaaggacatattcattcctacccaaaagatcattccataatttaattgtttagttttgactctttgagatctatgcaactctaattctattgtccaaccacaaaattaaatcaataatctcctattccaaacaacatcaaacaataataaaaaatcacatataaataacaaaaaataaacaaaagtacaatataaaaatacattaaaaaatcatattttctgtaataaaataaaaaaatcgtaaaaatatttaaaatttcatacaactgtatttttataatttttttttattgtttttatgtatttacgaaataatccctaaaatctaacatctaatatataattagattgaatatctaaatccgatcgccgaaaaactcaacccatgtacactcttaaataaacataaaattattaaatgtgttccaataaatacccgaactttatatactaatgatgcaaatataccataacgggaccataaaaaatggtgtgtaattgtgtatacatttagtcaaaagagacaaaaaaagccaaacacgtgcccatgcaaatttctattccctcagctccaccacaccgaatcacacctccctctctcttaatacactcgtacttaaagtaccattttacccttatacttgactttatctcattgactttttcaaacgtccaatcattcaaaccgttatcatgtaccgcgtcgcagaagattccaacagtaaccataacaaaaaaaacacaaaaacaaaacagcgtattctttttgtaacacagtccgtacaacgctcggttcgtaagaatttccagacttagaagtagggaaaggactcattttcctctttcgtcttcattttctttcttctttttctctctacccaaacaaaacaactctcttgaagcaatggaaaaccaacaacttcaaaaacacggtctgtttttttttnttttttcgtatttttctta

SEQ ID NO: 228569 - DNA, 1979 bp, Cannabis indica
tgtcggctcacagtgctatctttgtgtgtaggtaagggcaaggctaaagctgaggagccatgagtacgagcaggtgaagattgtacatgtcggggtggttaggcctagagcgtacgatctttgagacattgaggcttttgctggatagtcgctgggcgacaaacttttgtttatgtgtatagcaaacttttaaaaaatattttgtaaacgggatcccggaattttatatatgtaatactttaagtatttaattaaataagcaaattttaattattcacaattttcaataacctcgttgattagcaacgagctgcacaatacgtttaaaatcacgctaatacgcctatgctagttagggtgttacagataccatgtaaactagtaaactagcagagaaatagagtaacatgaaggctaatagagattagcagcaaaagttaatctaaacaataagactgaatcctttatttataatatcagagagtttgttacaagaatacagaaaagccaagaaaagtaactaacaactaccctaacagacataataactaactataataacagaaaaacagttaggtgttaacaatcctgccgaaccaccccaatcccacaatcgcataaggaatcacacaaagaagcatcacaattaatcgaaatcacccgcggctaaagagctttctagctatgaattctaattgggccaggaaccttgataagagccttattgaaaaaggactacacccattccatcaaagttgaggctgggggccagtaaagatgatgctcaaatttgtttcgtcgagctaagcaacccaagtgaccaccatgaatcaaagacctggcttggaggttatttttgcatatgaattccaaaaaatattgggtctttactcaagaaggaaacgcatggtacaagttgcacaactttcaaacttctcgaacgttaggagaataccaaagggcatgcatcacttcttcccattctttgttgcaacgcagtccaacagaacaatcataccatgggaggccaaactaacttgaacatggttccatttaaggctaagcttccaccaaaaattcttgacttttggaagaactttagccttctaaaccgtacgccaccaggacttcaccaaatatttttcctaacagtcagctccttgcttgaaccaatagttgatcatatatccacaattaatggagtaaagacaatccctagaaaacccccagctttggacatatgcactctggtgtgctcccaacacaacaccaaacacccaatcttggtcatcaggatggaaaactgtccttattttctcctcactctagatcccatctttatcctcgagggaccccactacagcaccatcttgaaacttagcttttgtttgcaaagagaatgtcacaggttgactgatccacttgtcttgattaatacaaatcgtatcaccagtacccataatccagcacagacctttttcaagcaccttttgaccttccaaatacttctccaaataaaggagcaatatgaaccatgctaagcctccataaagttgttgttgacttagaatttgatcaactaacaacggagccttatgaattgttaattatcaccatgtgtaaataagaataataaatagtaaaaataacaaacaaatttatagaggtttcgccaccttgatgaatggataatgacctacttttcttttagttgtattcactcttgaaatatataccatacagattacaggtctaatccttataatttctagctatgactcttttcagtattataattgtgagaataatgtgttacagataaaaaaattggtaggattctatgaagaacgtatgaagaaaatagacttagagtctacgaagcgttaggtgcatatggagctttaaagggagagagaactttgggcatgtggcttagcttgagtctgtttttcatgtgatctagtgctctttatacagtg

SEQ ID NO: 228570 - DNA, 1061 bp, Cannabis indica
ttgatcaaaattcatccaaccttaggagaacattcagtaaattgtgtactactttaacaagtcatcagaagcaatattagaattcaagtaccattcttctagttagcagaaacataaaaatgaacaaagagtaattcacagactaagtataatgatcggccataccgaatagaaagaaatcaagacttttattgggtacatattcgtagaccagaattttttcttgtccttccaagcaaaatcctattagcctagctagatttctgtgttgaagcttggtcatcaaaagggcttcattcttaaactgttcatctgctccttttcccatatttcagtaagtcttttcacggcaatttcatgaccattagggagggtaccctgaaaataaaatccggtgggataagaactacaaatatataaggcttataaattatacaattgagaaattaatcataatatttcaaccttgtaaactgcaccaaatccacctcttcctatcttattttcatccaagaagttattagtggcagtcctaatttcctccaaagaaaattgaaaagtgtcgctttctgaaatttcttcccgaactacattccagatataaaactataaaagctctagcctctagctattacacttttttttctttgaatatgaaacattcctcaatcaatggtcaaaataaaatgaacaaagcactcaaatgataaaatagttttaattcgaaaaaatgaattctttttaccactgtcttgccgaacagagaggtatttctttatcttcgtggttttcctattacagaggtagaaaaagccaatcaacaaggccacaatagccacactaattgggagaacaatagcaataattgtaattgtttaacctttttctttttcttttgctgctggacaaaatataatcttatggattttgttagtatttcttttagtttttaagataacaaaacgtattaccaaataaattaaaaatgactacctggtggtggaattggagtggcagaaattgaattgtagaaggggtagagctcgaatctaatgatgcag

SEQ ID NO: 228571 - DNA, 982 bp, Cannabis indica
aaacagaaactgtcaaattcctaggatgccctcccatcccattccaatgcacacaacacaaccttcccttttcccaagtttttctcttttttttcttctattttatattttgcttagtctaccattatttgtttgcttattgttgtcctatcatgaaataaaaatacttttacaggggtgaatgggtaattctgatgctatacgttaccacaaaaaaggaaaattaaagtagacaataaaaaagcagcctttgcatatattgagttcaatcatcggtcgctcgcttgcttgatctcccagggtttaatccagtctaaggcatttcatgtatttttgtagttcatattataatttctaattttttttatattgaattatatttgcaataataataattaaatctttttaattgttacattagtactgttttctttaccatatatatttttgaaagaattttttgccatatatttaactatgaaattataaagtgcggttgtattttgttcaacaataattaaattataaaattatattatatttttaattttcttatattttatgcatttttttttagtatgagtaacttttttgtttaattttttttaattgattagagatccttacacaaaatagagatttttttaagagtaatttgcagcataaatatttaagtttaatatataactgtgaataaatatttaaatttaacttttagcagtaataatatttaagttataattctagaatatctgtaggtacctgactgttaagtgttaagtaaactaacacgtgacaattcttgattggtccgagtcattaattttttttaaaagaaaattagtttaaatataccaataaaaatgacacgtggataatgacttgacatttaacagtcaggaacccacggagttccagaattatataacttaggtattattattgcaaaaaattaaacttagatatttatttgcaactggga

SEQ ID NO: 228572 - DNA, 833 bp, Cannabis indica
gatctcttctttgatctctcaatgcagtcaggcccgtcggcccctcttgggcttaagtgtggttttggttgggttttttattggtactttggggtgggcttcacggatctattctcctctcgttgtctttctttctctcatagttttcctttagtttgtcagtggttgggtttaagtcattcatcaataggtgtcttcactccaatttagtgttatggaggtggtgcaatggctgtgggttggactggttatggatttcgatagggggtttggttggtattaggccttgggttgttagggtctaaggatgtgtcgggtcatgtggtgttgggctttgggcacaaatctgtggcaaaagtttatcatcatcttctcggtttaggagtttggtggagaatggttattgttttgggtctgattcgttcttagtttgtccttttttgtgcccatagttttaattattttaattttaatgctattttatgttaattttatttttatattatatggtaatttgtcaccgatctactttattattagagtttttttattgttctggcgattggagcgggtcatgttctcaattggtgtttcaatatttcattgtatggatcaattttctttggcgagggtgatatttgtctctttctcggccagttctgtctattggccttgtgtttagtggtatccaattctcttatttttgggtgtctcgtcatagttggttgtttgattatttcccttattttttgtgtgaaaatggggttgtgttctaatttttattagaagatcatagattgatagccatcaatagggtggactctgtcagatgt

SEQ ID NO: 228573 - DNA, 1686 bp, Cannabis indica
tgaggttgctttgttttttggggtagcttgactttgtttttctgactctggtttagttttttaagtaactgactccttataaaaaaaaaagaatggacgagtttagccattttttttaaatatacattcaacttattttactttttactttttaaatatttgaataaaaaaactaaataattaaatgtaataatttaaattaaagttataagtataataaaattttaattataaaattatatgtgtataattttaaattataaagaattttgctatacaaattttaataatttaagggcaaaaaaattgctaaaagatctttatttaataataaattacaaaaaattaattaataattataattaatttaattttaaaatataattaatcctcataaaaattttataaagaaataaattattaggttactattaggttataagtgaattattatttatttttatttaatttccaaattaatcacaactattaaatagtaatctaatggctaaaaaaaatataaccatgatggttacacatttaatgtaaccattgaaaccttttcctatatattcatgatggaaattaacaaaataaacatattaatcctaaagtagtgggtgagagaaagattacatgtcaatgcaacctatgatctccattattattagtcaacaccgaaggagtatatactggaattgcaacgactttgttattgtccccctaaggaaggtatttatctgtactgttgtttaaggttgatctcttgaataagataggaagaagtgatgtatttcagctggatattgaccctaaggcgatgttactaagttaagtcatggaatctgaaataatgggtgacctcaagtcattgagcctatgagacaattctcatctttattattttgaaatctaaatatctcatatttccatttcaaaataaaagtaccactgaccaagttaataacaaaccgaacaaagcttagttgcactttgtgagtgtaaccaattgtttcagatttcatgacaactgaaaatgccgccttaagggtcagtatcacactaaaatacatcacttccgcttatcttattcaagagatcaatcttgaacaacagtatagacacataccttccttaggggacgaaatctaagtcgtctcgaggccagtctatactcctttgatgttgaccaataatggaggtcgtaggttacattgacctgtactccttctcctaatcactattttaggttgatgtgtttgttttattaattctcataattaatacatgttaaccactttaataattataattaatctatttataataaaaacctcaaagtataaataaatttcctgtcataatcattaaatctgaattaattctttattcataatttaaaactattttaaattaccaatttaattctaaactaatctagccagtttacatgctttcattttcaaaacggtaaacacataaacataaaagacgatcataatatatcatgtttctaatatgagatgcatgataatatggttgtgtgggatttctatgtatgacatgttactcactaatacattagtattttattaattaactattaaggaatatttatttaaaaacaataaataaataatgatgataaagtaggtaataattgggtatttttaattttacaacctt

SEQ ID NO: 228574 - DNA, 717 bp, Cannabis indica
tttttgatggcgtgctttctagcgtcgaaaaaagtctttttgccggtgtaacaaatctagcataaatagcaaaacaaaaaaaaaatgaaagagaaaacttttagcatgagctaaatttgacacactttaaacactatttgaatattatttttcataaatatatatgagagttaggtttgtgtcttgggcccactgagctcaagggtcaaaaaaatttctcctttaataaatatatatatattttttactaattttaaaaatattatattttttcttcttctatgacccactaaagtttatggtcggccctacttctttctctctatgttaattaatattcggatttaacttattaaaagttaaaaaattaatacagattgattacttttctatttcagttacatgaattgataaaggtgatgataaaggtaattgttgttaggctatttagaattttgcccctcaaattatgatttatttattagtgtgctcattgaacttttcagtctgttaaaaatggttcatgaactatttaaagtgttataaataggtctttttgccaagttttgtcacacgtagcaaacaaaataatgacatagctacttagctagttgccacgtcagttccatgtcaacgccacatatgtaattaatttttaaaagtaatttatttttttgattaagttttacttaattttcctaatcattaattaatttt

SEQ ID NO: 228575 - DNA, 938 bp, Cannabis indica
tggaagaagagacaatacattgattgaaaaaagaatcccaaggagcacaagctcaaactagaccaaactaaggaaggggtctgtctaagaggaactctaagagaagtgaccctaaggaagaatttcccgagaaaagagagtctgatgcatatgaccccacaaggtacgtccccattgtggagttagaaaattgacaactcagtcaaaggctcgcagaatccagctgaagaaatgaggagttaaaatgggcaatggctggagcgagattgactcaaaactttgttaggtctgctgtgttaaggggaagttctttgagttcctcggtcagaccaactcccaagttagtttccccaaaacaagggtcaatgtcaactttttcttgggcgtacgttcaagtggctttaggtgccgtcttgtcttctctatagtttggactctggaagtcttcattgtctctttgtcttttacgagagaggccttgctcgtccccctaattccatagatgtagatgagctcttgttcgtcccctctaaaacaatagtaacagatgaggtcttcttggagagtgatacaaagtgttataacacttgtaggtagttccgtgattaccaagaagacaaccgataccagctaccattgggaacttgacagataagtggtacactgatgagatagcttgaaggtcgtatagtgtaatgccctaatctatagggacgccacgtgtgtgattttataaactagtttaatactaatagattaattaactattaaaaaatcgtgataatattaagaactggactaaaataaaatactaaaaatggacattataacgacataaaaagcgtgttccggggatccctgttataaaaaattttagtaaagaaatatgtacaacaaccatttaaacaaaaaatcaaaatacacagcagatggagcca

SEQ ID NO: 228576 - DNA, 2589 bp, Cannabis indica
ttttgttacagttacaacttgaaaatatttctccaacttcaattgagtgatctagtttgaatttggctgattatttttccggtgacacaactcctttctctattaaggttaaaggtaaaggcaatcgtgatagcgattctaaatcagtgtccaagtcttctctggaaagtgatcgtgctggtccatcctcatgtaagatgcatgagcatgtcactcgtattgagtataaggatttgaatttgaaagtatttcttcaacttcaattgagagatctagtttgaatttggttgattatttttccactaacacgactccttcctctattaaggttaaaggtaaaggcaatcgtgatggcgattctaaatcagtgtctaagttttctctagaaagtgatcatgctggtccatcctcatctaaggcgcatgagcatgtcactcatattaagtatgaggatttgaagaaagatgtgtctcttgttcttagccagcagcggattattatgtctgcttttgctgatttgaacaaaaaaatggatatacttatcgagataattcttttttggtttttaatgtagttattttgtagttttgtatagtttttttttaatattatttaagtttatattcaaatttccattcttttttttagtccttacatgctacttctaggcatcatgggagccaattagatgatgtgcttcgctcatcagaaaatgacaatgatgttgttggtgatgtcgataataaggatgatgaagaatccgattccaaggaagatgatcaggtcgaagatgatgacagtgaagaagaagatgatgttgatgatgatgatgatgatgatggggatgacaattgtggggacggttatccagataatgacgaggatggtggtggcggagatgatcgtggacaggttgtgttcaatgttgaaaatgttaaaattgatgaggtgtgtgttgttgttgatgttggtgcaaaggttgatgaaggtgtagaagatgcatctactgctcaagagtgcacaaaaattgatgataaattgtttgttgtttcagaaattcttgctgatatgaaaaatgtttgttttgaattgttttattattgttttacgagtaatttgcggcatatatacctaagtttaacttccagttacaaataaataactaagtttaatttttagcggtaatagtacctaagttatatttctagaacactataggtacctaaacattaaatgtcaagtcaatatctacgtgttattttcttattagtatatttaaattaatttttttaaaataaaaaattcataacctagactaattagggattgtcacatgacaatttacttaacatttaacaactaggtacctacagagttccaaaaatataacttaagtattgttactaccaaaactaaaacttagatatttatttgtaaataggagttaaacttaagtatttatgtcacaaattactcttattttagtattatttttgccatgctttgaatttttattagttggttgtttttatttctttcttttttagtctatcgaagtaggatttgatttcaaaggaggatgatgattttgttgatgctggtgctactaaaacttgtggtattcaagctcttgagaagatgatatttaattttaaaatgttgttttataaatgtttttgttctgttttatgatttttgtttttttgttgttttgttatgtttgacattacttattttattctagatagagtattatttaactagataaatctaacacttatgaggtcgtttggttgggaggaatgaaaatataggaataagaatgtgaataggaatggaataaaatttaaaatgcataaaaaaaattgataaaaaaatgattaaattttttcaaatcttgcattggaatgatctttctttccatttcaaaatggaatagtcattccaccaaaatgatggaaaagaccaattctatcggaattgtattccaatagttttaaatacaaccaaacaaaataatcaatgagaaaattatttcctttccatttcattctatttcattacttgcaaccaaacgccacctaagagcaattcatattagaaccgtaaattgatagggggtaaaacccaatcttattcaggcattttgacaaacaggtgaaggtcataaaactaaaccataagaaaaagaagagcatttgctaggaaatggagaaatttggatggttaccttgctagtgtgccaaatgcaagacttatcaacttaggctgtatagacgaaagaagagtagaaaagacataatcaatccaagtataatcaataacaagcaaaaagaagagtagaaaagataaaggaaaacgatgatcatacctaacctcaatttcttatagatttttattaggtaccttaaaccttaattttttttttatatagttatgacttattatattttattttttaataaaaggtaaccaaacatattaaaaaacataaaatattatttaataacataaagaagaaaaaaaaaagaaatttaggtgtaatagtgtaaaatttttcattacattatgttattattacgtgcattg

SEQ ID NO: 228577 - DNA, 1549 bp, Cannabis indica
tatatatatacatttatatatagtgtgttatgcatgatgttaaatgtatggaatattattttaccctaaaaaaatgattttaatgttctaagacagaaagggtacaatcttaccatgagaacagccttagtacagtctctagtgaattgaaaatctgcatactcagattcacttctctctgtgcatagcaaccaatcaacaatgtcttcctttccttcttctggagctcttttcagatgctcatcaatgacttgattgaagaagtcatccaactcatggaagcttctctcaaatcttgcatgaacaccactcaaccgatcaataatccaacccaagtaaggaaaaatatcagaagccgtgaagctccctaatacatttattgctcgatgaataatatcttcaaactcatcattgtctagcccacactcctgaaacctctttccaaaggcagtccttagagtcacacttgccgtgagactatacatcttttcactgagatttacaacactatttgtactgtctttgagggaacaaatcagagaacctatctcttcttctctaacaaacttaaatgattcaacacttttgacactaaatagcttgagaacacagatttttcgaacctgcctccagtgctgaccatacggtgagaaagatatgtcatggttgttataagaaagttttgccaaaccaactaagggtggtctgctgcaacactccaagtcatgaacttttaacacctcttttgcagcctctgctgaagagaccactatggtttgtagccttccgaatcggaggagcataacatcaccatatgttttggagagtttccatagagattggtgggatgtggaaccaagttggtgtatgttgcctatgataggaagctttgaagggcctggaggaagttgtgatgatgtgttgtattgttttgctttgagctttttttggattagaaataagagaggaagaataagaaaaagaagaagaaacgacattgtgtagagagaataatgttaggaaagtaccaccactctagaaattatttatttctagttatatcgatctacatattaccaagaatatataagaggtggctattagttgagtttattttttaattataatatctctaatgattctctcaagagaaaaatgtctagctcttgttggcatttctgttttggacaatgacttctttggctaaaattttacatatacttgattagtggttgtcaattagtgatatgaaggaatggagaaatttgctttcttttgtattcagttgcatgtgtcaatacagattgtgtttgaatcgttctgtttcatatgcacgtatgataaaaaaggaaatctaaatgcatgcattatatatattgacaaacttcttgaaatgtatgctcaagtctatctgatattttgtcttatttggtatgtgttaaactgttgataattcacgcaactgacagcaactaataacgacaatatattagaatattttgcattttaataataaaattaataaattaatttaaaataaataaatatt

SEQ ID NO: 228578 - DNA, 2243 bp, Cannabis indica
taacaaaccatatttaacttggataacaaacctacaccctcactaaacctacagctttgaaaattttcaaaaaataacaaaacctagcttgaaaacttaagaaaacaccaagactagaagggtgaacttacctagggtgcaaggtcaacttggagatggagtttagctctgaaaattggtgttggctgaagcaaaccaatccctcttgaggctggttcagctgctcgaaggaaaaaggagaagaagatggagaaaagagattgcttctcttggaaggaaactccttcttcctttttaaaaaattttctttctttcttttctttttttttatttttatttattttttatcttcttctctctcctcctttttatttatttatttattttcattttttttttctgtgaataaacttttactttatctcaaagtgggacagaaaaggtgtagcagttcccattaattaagaaaacaaaaattatatatgggtgttgctagaatgacagctgagtgtacgaaattcttcttatttacaaggcatgtgtcatgttggtgttgatgacgttgagtaaatctcctcatacaaataaataatatatgacaaaattataaatctctcaaactacaaatgcgtatatgcatatatgtataaactttttcatgatcaatagaaataaatttctcttaattttattgaaaaaagaaatttacaaaaataactcaaaataagttgtgtgcatgctctattcagctataaaggtaataaataaactagctagctataaggtttttttaataagaatagtatcttcgttttcactctttgttataatatcataaatgtttctacattgctgtttcaaccaaattaatgtgctaattaatattattatgtgaaactaagtgagattataattagccgtatatatatttgttaaaatcatgagagggacatatataaataaatatatataaataatttttctagctacttttgtgaggagggctaagaaatgcatattttcatcatcagatcattcatcgtgcaccgtcaacattgtcttgctttaaagggaagtctttgtaaaaatcaattaacgtatatataaattatgaaatgtacacagaaaaattatcacaagaatatattatatatattgagattataatattatttacaattgaatcctttttagtaatcatttttttttattattatagatgattaattaatgcattccaaaaatatatatatttataataagatttttatctgttattcagttttatattgaggccgggtttttgttataatccttttattttgggacagcaagctgaccattaattttgtaagatgaaattcatacgtactatattttcttatgtatgtaattaattttaatttataaaaacttgcgatattgtggcttgcaaacccacgtaagtttaccatatatggtctcaattttcctttctttaattcccatcttctttaaagtttccttgtaaagaatattgacggaactcccattatctacaagaactatttttactctcttattagtcgagttgcactgttatcacaagaggatttgcatgagggtatcgtacatgtaatccgtcttcatcagtaaagacaatgggcagttcatctgattttgctctttttcacctacttaatgtactttttttgtgcactattgctattacctgcgaggtgtggccctcttaaaataactaggatatcctcgccccctgcaggttgaggttgtcatcttagaatattcaggttgttgggctgattatgtttgtttttttgtgtcctcacatattgcctaaaatatcctcgcgagattaggttctcgatttcatctttcaactgatgacactctttgattgtatgtcaaacatctctatggaaacgataatacttattaggatctcatttatttcttgcatgtctcattggatctggtgtgcgaaatacgacccaatttttgttggcgatgtagatatttttgctagtctcatttaattcagtatacactgaataaataggaacatacttttcatgtttcttttgcttctttttgtctttggatgagtctctcgactcatccttcctcttggtattcgaactatatatttggattttctactttagtagtcatggtgctcgctgttgctgtacttgtgctaggtttatctcctaagtcagactttaacaacttaatttcatttc

SEQ ID NO: 228579 - DNA, 1525 bp, Cannabis indica
tgcaacataaaatgttatttctgatctttattaataagtaaatctgattataatgaaatgagttttatttagggcataaaacccaacagtttcattgtcgtgaaataggacccgggatcgtggagcatggttccattcaggtcagcccccacacttgatattgaattaaggtaagaaaaattatttgcactactaagcatgttaagtgagaacgattatcattgtttgtgactccattatgatcgaggtaaagatacggtcattaccatttattatgaaagagtaattactcgcttgaaactgtagataggtttcttacttatcgtttgctttatcgagcaacgatagtgtcatatgtatctcgtggatgatgagtggtaaggatgctttataaggcatcaatgtcggttcgtcttataagacgcataattgttacgtattgtttgattacatattggataaatgtttgtattggatgataaacttgttgattatgctatgttgtgaattcttgaaataagcattgtttgtattttaattgcttttcttgctgagtctttgtgactcacgggtgcttcatggtgcaggtaaaggaaagggaaaagtggatcagccatgagtcaaaggtctcccagtgatgtacatatcaatagcggtgtctcgacttctagtggataggatccatccttttgattacattttggagtgtaaccctattttgcaataccgattatgaaaactagttgtaaaaagtttgtaaacaggggatccccgtactcagtagcattttgtataaaagttatgtttttaatttaatccaaaagttttaaattaaccacactttttcttaaactaatcttttaacaattatagattaatttataaaacaacacatgtggcgtccttgtgggacaaggcgtcacatcagcactcaactctctacccttaatcctgattggcatagaccaaacctaacttttggagataactaattctctgccaggcagtagggttctaaaccctttatcaaaactatcaaacggtctacctaatttatcaataattatagccgccacatacgagtgagtggccccagagtcaaataaaataaaaaaatataagttgttgaccgagagctgaactgtaacaactgaggggctagcttctgcttcagcctgagtaagagcaaacacccttgttggagcgggttatgcttctgacatatattcttctttctttagttgcgggtagtctcttttgtaatgtccagctactccacactggaagcatccccaacctttacactttcccaaatgatgtttcttacagttgggacattctagataagtgtatcggattagaaaactaccctgacggttgcctcgaccttggttccctcagaacctcccattctgactcaagccactggatgtagatggtgcctttctcttttgatcagtggttaagtcactaccacccctatcataactagaggtgggagcagcagtggctccaccaacaacct

SEQ ID NO: 228580 - DNA, 1234 bp, Cannabis indica
aaattttggttataatatagagtttctaggatgcatccataaaaaaaggtgcaccgatgtatcttttattttttcggcatctagtaaaagattttagtttaattattttaagattgtatacggttgtaattatttaaattttttttttgtaaaattttgagaaaatcaaaataatttataatataaaaacagtatttaaataatctattttacaaacaatataacataaaaaaaaaaacattagaaaattagttagttatttaaccaacttgtaacaatttcatctttgtaaggctgagtttctcttcttagttgtatcaatctgcttataaataaaactacttttttaattgtgttagacaataaaaaaattagatttaaaaattcttttaaatgccaaaattgataatggatatacttgtgcatctattttggagagtccactataaaattttccaatatattatacaatgttattaaaaacatatatggatcagtttcataaacatttaatttattttgtatatatctttaaatacgtataatcaataaaatagtatgaagaaaaagatcttttataatttctaattgatgagaatcatagggttctatctcaaaactaattagtgatgagtgaagtagctcatgttcttatatatggtttaatacttttacattgaatccatgtgtgggacaatattctctaacatcccccctcaagatggtggctatttttgctcaccaatcttgaatcaccttatcacaggtcatgccatttgctcgcttatttttattcgaatcttaagcatttttagcaccacctgaatctcgtgcggcttgcttaaccatgtggataggtgtggattgaaatactcgctagggatatggctctgataccatgatgagaattatggggtacccatctcaaaaccaattagtgatgagtggagtagctcatgttcttatatatgactaaatttatatttaatccatatgggacaatgttctctaatactactcttacattgcattaactaattttgataggactattatgtgtgagctatatgcgttgagattggtgcctaaaagtgcgaaaaaaaataccacaagttagccctatctcaattgtctattttgtgattgtttgtacttttcatttttttttattaagaatctaattttttttttaaaaaaattacttttaaatttttttaaacaaatttttaattaa

SEQ ID NO: 228581 - DNA, 2963 bp, Cannabis indica
gtatttacacacatatatagaataatacttacagctgacactaataaataaccttattagctctcatccattaaagcacattacccaaactcatcttaaaatataaatcaaactcttaaataataaataataataataataataataattatgaagttaaacattgttatacttattttctcattgttcagtgtttttatttggtttgatgatgagattatagtctctgcttcaagtgcaggtactcgtggaccattccaacctccaataagggtaacaagtactcctcaaggcccaggcccaaaagtaccaaaccatgaaaacccagaaagagcagaccatagatgtgggccagattttggagatattccatgtaacccaggaaggtgttgtagtgtatttcaattttgtggtgacacagctgaatattgtgaaacaaaatgtaagtctcaatgttggggaattagtaactaattaaggtttttgccctaataatatgataataatgttaatttatgctataattaagcaaacataaaagagagaataaaaatattgtttgtagtgttatgtaatctagtcaagagagctttatgattgcaatgtaacctactataaacatgatgaaataaataagctacttttttttttgtctttttttttctggaaaaaactttgcttcgttgaaaatatcaatagagaaaataagtagcaaggatatgtcattgatgaataataatagccatcacaaaatattttttattattattcacctaaagcaagttttgttaaggagtgaacaatcccgttaactatactaaagcatatcgtgtagctcaatatgttgttagaagtttttgattcaattcaaatcgtagcatttttgaacacactactcttaataagagatttattggattcagaatattttaattaatgaatgttttacccctaaaaaaactattaaggcattaacaatagaaagactatcgaattcaatcataacttagctaaactcttgcattgcattaattgatcattatatgaaccgacttaaacatttcttaaacattttataaatataaagcaaaagaaaaaaaaataaatccttaacattcttttcaagcggcctattaattataattttttattattagtaagttgattcggtcatcaagttttattcctattggttcatgttggtccaagttaactagggtgcgctaatcaattttgttttggtagttagtagtcaatcttctataaattgaaacctctaaccctgagccggctaagcaatgatttcatgtaaattcttttctttgtaaatcaagtgattgaattctcttagatatcgtttggttggagaaaataaaaatgaaatagaatggagtagaaataaaataatcttcattccattcatttgtttgattgcatgttaaaatattagaatgtcattccaatggaatgatctttctactattttggtgaaatgactattctattttaaaatagaagtaaagaccatttcaatgcatgctgagaaaaatttaataatttttcatcaattttttttatgtattttaaattttcttcaattcaattcctattcctattcctattctcattctcatttttattcttatatttcattcttcctaaccaaatgctaccttaactatgttagaacggtaaagaaatgaataatgagagaattgtaatactctaagatgaatttcatgaaatgaaataaagtggcggttgtagttgaatatgtatgtgtttaagtttcatctgtgttctttgtttgtagtactcaaatggtttattttcctgatattatcactggaacaagatagtgattttgtttgtgttttggggcaaatttctgaatcgattccacaacacttattacaacttcttaattaatctccacgtttgaaattatatgttagaatgtttttttaaattttttttcatagcaatgttcgttatagttgtaatatcatccatgtaaatttttaaaaactttgaacagtttacagtttcgaaaacacagttcattgtactccagattaccacgcttgttcaaaaaatttcaaatctatttttgacattctaaactatttgaaatttttcaaaatttttttaaaaatttataggaataatgttgtaactataataaatattatcgtgaaagaagaaataatttaaaaaaaaaatatttcaaggttatctaaaaaattataatagaaaagattcatattttttaatttaccaattatgatgagtagtcttttacatttctcaaaattgcattcaagtacttataagtttcattgttttgccttgcacaatgttttaatgaactttttataataatatatccacgtggtaatttgttttataacattaaatatcaaccaaacaaatttgtgatatattaagttttttttgttgagaaaatgtgatatattaagttaaatatcagtttttttactattgttgttcaaattctatttgtaaattgttaaatgctgaatacattattatttttttaaaaaaatttaaatctccaattagtttattttaaaagtttcctaaatgattaataatttttaaaaataattataaaatgaatagacccaagaaccaataattttttttataactggttgtttagacggttaaataaagccaattctaaactataattatttataatgtatttaaatttgtttaaaggaacactaattcaggttggttttttgtggtacaagtgatcttttaaatttaccgcgaaagctttaactttttaaatgatattgaattaagcttgtatttttggactctatgaaagttcatttttagatttattgtctttggttttagcattgagtaatttttatttactagaaggagttaggagttatattttccgatatttgagtgatattgtctaa

SEQ ID NO: 228582 - DNA, 1099 bp, Cannabis indica
aaatataagataaaatactaaacagagtctccgtcggggcggagagtgtgattcccgtccccgccatgttgatccccatttagacagggaatccccgctccagagcaggtccctggaaggccatccccgtagaagaaatatgcatccctaatactaattactacgtgcctcttactcttagcatttctgataatattaatacgataattaataaaatttaatggtgcacaatttcaaatattcgacttttagggataaattgtgatctttatgtaatactttttaatataaacctttgaaataataaagttcaatattcattcactttgaattattaattcttacgtagatacatatgtgtttattttattgaagaatatgtaatacgtaacaaattaagattatttcaacagttgcgttgcgtagaaaatataccatacatttaaaatggaaattaaatgttgaaaaaatgattccccttaatttgaaaattattcatgtatctatatataatattctatctatttgtattagttcatgagttttgaccgaaatacaaacaaaaataaaattacaagaaagaaatatgaaataagggtaactaattatgttttcggcatttaaaaaaaattataacctaattttttataggctaataaagaattttttctcccgaactttgacatgtaccaaatcatgcccttgaatttttttggtcgttaaaaactctctctgaactattgagattgttagatttaaggacttttgtctaatcatacaaagcttgtccacttcttttaccatcttttgaggcaatatgaatatactcatccaataacttaagatactaataactatcgagttaataagctgagttttttcagcataggagagaggtttacttgcccatgtactcaatttttgccttattttacttagagaaatgttaaagggcaccagtgcttagcagcagtggcggacccaggatttaagttgagggggcgatatttttttttataagtgaggggtacgtctttttttttttatacattgcatgcataacatgttaaaaattaaatgtaaatttatattttagtat

SEQ ID NO: 228583 - DNA, 787 bp, Cannabis indica
cacccattctcatcttcaaatcctaaacacaaagcccgacatcaacaaatagacaaacctcactcaataatgtcaactccccaacggtaacagaagtagatctcaaccccaaacaagcaggtgacttaccagtgcttgaagaaccaccacttcgagcatcctaagacctccaaagataattaatggcccaaaaactaaccacatatgctaaatacgccaacaaagagcaatacactcatctgattaatccaacaaaagttaataaaagcaagaagcatcttctaaagaatcaagatctttattagcaacctattttgaacgaattaacttaagtgaagaacataaccaaagtacacgaatggtagtctcattattctgaaaataaataggacaaaccttaaaaatatgaaaaccatgacaggtcaaattggcataggtcgacaaaaatttgaacttatttaatttttttattttgggggaagattgaaccctcaaaagaagcttccaccaacgggaagaaccaaaagatatgattcttggccccactccagactcgaaacagagccccaataaccactcttaatagtatacatcccattatcttgtctttcaaacaaagaggagtagacaaaatagctctagtcgccacagtgtcaaacatgttctgaataagagaaaaatttcatccacaccagagtcaagtttaagtatcactaattaaacagttcgaaaaattaggccccccttaaaaacgagtaagctcgacccacatggtcctttggtgtcc

SEQ ID NO: 228584 - DNA, 945 bp, Cannabis indica
taatttggttctcttttaggaaaatctacgatagtgttcaaaatgaaagagagaagaagaagaaattgttaagtaaagtaagccttacttgtcaattctatttctgattctcgtcaagagctggagattatcgttctcaacgtgtttgataattttctcaatgaaacaatgtcgttcttgagctccaagcttggcaacatcaccaccataatgatgaactgtttctttatcaccattatcgtccttctggtctccattatcatcctctttcgatcttaacctttcaaacttcagagccattctctctgtttcgtcgtcattggctgaagatcccaagctccttattccaacctcggccaactcgattctcagtgactctgactcattgtcgtctgtccctaccattgacgccatttttggctactcaacaaagctaatcaaatctaaaagctatagttgctgtagttacagttactacagaaacacaaacaccatatatatatatatatatatgtgtgtatatatataagagttggaccattttaatataagtaaagcttattaagattttgaaataagtgattatatgttaattgaagccatatcaaaatgaatcttttgaacatttttattaattattccacactattttcacatgaactataattaatattaatggatttaaattgatgaattgtgagaatattctttctcataatcacaatattgtttggaatttaattaaaacacatatttatgtaaattaactaatatatagttaagtagtatgtactatgcttgagatcgatgacagaagcatgcatgacttaaattaccatgatgcaccaaaaattaaattataattaataaatgggcatataaatgtatacattttttttaaataattacaaatgggcattttagataaatgtatacatttttttt

SEQ ID NO: 228585 - DNA, 1081 bp, Cannabis indica
attttgacttgtttccacctaaaatttcctcttcgtagtttctagactcttcaatttcagtttgttgcactgttgccagtgcaaaagctattaagtctacttcaacgaatcttgccagagggtgaaaatctcttatggttctatcacgccccaactaataatcttctagacctgtttgtccgaatccttctggaacctctatttggtctttgttatcttctagctcagaatcagcttccgtcagcgcactatcttctggttccataatagcttccatctatgaactttcttctagatgtttcattctgtattccatttccatgtgtgtagggttcttgtttcctacttttcctgcatcacacggagacacactacatttctcggatgttaagtgagaatattccaactcattaaaaataacatttttagcaatcacaacctttggtctacctttcttgaaaatatagattctatacccactggtacctaagaaataacctggaaaagttcccttaactgatctaggttccaacttatcaatagataggtgtacataagttgtacacctaaaggttcttaaatatgttaggtttggagttctgttgtaccacattttataaggggtttttaagcttataactcggtttgagcttctgtttataaggtagatcaattgctagagattccccccaaaatggtttgtctaatcttgaactaaacaactaacatctaactttgttcaatagggttcggttcatcctttcagcaacactattttatttcggggtctttactacaattttatgcctagtgatcccataattttgacacaacatgtcaaattcaaagttaacaaactctaacccattgttcgtcctaaagttcttaacttttagatcggtttggttctccacctgagttttctaaattctaaactgtttcagacaatcatccttagttgctagaaaataggtccaaacacacctactataatcatcaactatataaataaaatattgcttaccagaatgagtagacactttgtatgactcctaaatatcaacatgcacatattcaagta

SEQ ID NO: 228586 - DNA, 2050 bp, Cannabis indica
gctttttgtagtaatgacccttcaatccctctcatcttttaaaattctaaatgtgctcttcatagtgtaaccaccacttttatcaaaagaccagaaccaatgatcttccaaaactaaattacacaaaagaatatcaagaatagcagatacatctctttctgaaatgatatctttgcctatattactatcccaaatgtgttccctaacaacaaaatactactcaccttctcattaaccaagtcaagataaacactagaaagtcacgttaattcccacaggaagccaaagatttttgaaaatataagtacttgcaccaccactaattttcttcttagtcccttgacgaattaaatcatgagttttcaaaagactccaccaaataaaacttggattgttcccaattaagttgagcatagagaaaattctcattcttaaaatagcgagccttataaatttgagaaactaccgagtcatgcttagtaatagatctccatgcttgttttcttaacatggcaaaattgaaatcctgaagcgacaaaaagcccaaaccctcaacctttttactaaacgacatcctatcccaactcatccaaaaaaatataattatgagaattagtaaaagactgcttccaccaaaaattagccataaattgctcaagatcatgaaaatttctactagcaaaagaaacacactcatggcaactctggacaacacttcgaaccaaaacctctttgcctacacgagataaaagcttttcgtcccaacactttctcatcttctctttcaagaactcctaacatagttaaccttttcctcccaatcgtacttggcaaatctaaatacatactattagcatctgtttctgtaattaatattcaatatattataaagagactaacgaacatattaataacattgcgactaaagaaagcaaaagacttattcaaattaatcttctggcccaacactcattcaaaactttgtaacatctcagtcacattttcagctccaccagtattagcttgattaaataaataactatcatcgacaaacaaaatatgagaggcaaatggagcccccctaaacacacaacacaccctaataagttaataatgttcataatgtcaaacaaagttgaaaacctctcaacacaaattaacaacaaataaggtgacaacatatcacaccttgcctaatctcgcgagtaggaataatgggactcacttgatgatcgacatgcacaatctgataccgaactgaggaaaaactattagttttatggtactaaatcatgtatatagcgagaaatttcgtatatttgattatcattgtaccatatcccaaggatctctagatgtataaaaattaaattaaaaataaaatacatttaagaaatatatatatatttatatataccttgatgactatcagggtatcttcgaaacctttggtaagttggattgaataattctcacacactgtagtcttccaaatcgatccaccaaaaataaagaataagtgtataattttttcttgttgagattttcaatacacgagcaagaatagtttgagagagagaaacaatttttcttttctccttgtatttcaaaaattacagtgtgaaaaactccttctgattactcaaatcagacttctatttacagtagttaattctcaattaattaaatgatatttaattatttaaataaatatctgttaaccgaggttttcggcaaccaataaaataatgtaagattagagaactgtaagaaattaagagaaggatttttacgtggttggggcgttaatgagccttagtccacgagtctgtgtatttatgagtgtattaaatacagagaatgttcttggtgagtatttactcttcttgcacttgtgcaacccaaaattcccgaccccatttaatgagctttgagggggtatttatagtatttttggtggggtgattcccaggattattgtacatgtatttttgtaaatatccataaagttgggtattcccaaggaatataccatgggtaatgcatggtc

SEQ ID NO: 228587 - DNA, 2718 bp, Cannabis indica
ataaaatagattacattgaaatggagttttatttagggcataaaacccaacacgatcttcattggccaaaagtgcccctatcagagtatctttttggataagctttgccttccagcatggttgccgcagaagcatccatgcacttttatcattagtcgttcagcttcagctttggtagcacacctcaaaagaggtatggagaagcttcgtctgtacattatcccgtctaggattaggtacctagcagcttttattcttagtttgcttgcttcatttttgtcttctggcaaggctctagattggaggtaagctgcgataggtgtcatccatgttggacggttattcaacatgttgaattcttcaaggacaacaatgtggggttcctataggaactgtaaaggcaccaagtttgctttattaataatggtgctgcttgccagacgggcaagtgcatctactgtggcattctgttctctaaggatctgcttaatcacgtagcctttgagctgacttagcaagtctttgatcttgctcaagtaggccaccattattttacctcgagttgtgtattcacctaggacttgattcaaaactagttcagaatcgctgaatatgtccaggtggttagcccatacttcatgtgtcagcttgaggccggctattaaggatttgtactcagcctcattatttgaggctttgaagccgaatttgattgctccgtccagttgctaccccccaagtgttgtaagggaaattcttgcaccagaaaattggttagtgcagcttccatcaacatggaatttccatgttagttcttcgggattttgttgttgttgttgctcttgctctcgcttcttctctagctcttgctttcctcttgagtcttgagggatcttaagagttgagttggtgcactcaaccacgaagtctacaaggacttgacccctcatggttgttcttggctggtatgtgatcttgaacttaccaagctcaatggccaatttgagtaatcgacctgatgctttaggtttttgcaaaacctaccacagtggttgatcggtgtacacctttatggggtgtgcatggaagtagggcctcagctttctagaagccaagagcaagctttgctcagcttctccatgagtgggtattgactttctgcatcaattagccttttactaatgtaatatacatgttgttgtacattgtcttcttctcttatgaggacagcactcatagcatgctctgtgattgctaggtatatgcctagctcttcattgtctaggggtttagacaacacatgtggtttggccaattgtttcttcagcttcaggactgcatttttgcattcctttgtccactcaaattttttattgcctttgagaatgttgaagaagggtacgcatttgtctgtatactttaacacaaattttcttagtccatcaatccgtctagttaggcttagtacttccttaacaattgtgggagactttatgtccaaaagggcttggatcttgtcggatttacttctatttccctggcattgactatgaagccaaggaatattctcaagcctataccaaaagagctttaagggggttgagcttcatgttgtagctacgatggattttgaagcactcgcctaggtccttcacatgcccttagcctttttagacttgacaagcatgtcgtccatatacacctccatattgtggctgatgagatctacaaacatcatgttcaccagcctttgatacgtgaccccagtgtttttcagccgaaagggcattactttgtagcagtaaaggcctaggtctgtatgaagctagtgtgctcctgatctggtggatgcatctttatctgattgtagcctggatatgtgtccatgaaacttaggatttcatggccatctctggcatctactagctagtcaatcctgggcagctgaaagcagtcttttggacatactttgttcaagttggtgaagtcgatgcagactttccacttcttgttaggtttagccacaagcactgggttggatacccactgagggtagaattcttctgctatgaagtcattagccctcagcctttcgactttgtctttgagcactagggtgcgattcttgtctagcaactgtcttttttattgaataggccaaatacttggatcaatgttgagtgcatgggtcatcacagagggatccattccgaccatgtctccatgtgaccatgtgaaaaggtccaggtttgcctttagaaattttttcaacattgacttgaattctggagccaaacctttaccgatcttcaatcttcttgttgagaaagtgggatcaacttccacttctttcaattcttgtataggtgtaaagcttcctgcaggatctccaaagcaaggatctatatatgtgtccccaccttgggctagacttcattgccccttgctgggatcatcttcttgacttttggcgggcatcttctcctttttggcattggatagggccactttttagcagtgatgggcagactgttggtctcccctcatgcatgccattccatgccttattggaaatttgagccataagtgatagatagacgtcactgccttcaaatcgttaaggggcggccggccaatcatggtgttgaaagctgagggaacgtcaatcacgacgatctatgccatcagtgttttggtggttggattttttccaaccgt

SEQ ID NO: 228588 - DNA, 1560 bp, Cannabis indica
ccgcattcgtaacaaaaatctggcaaccgttcgtaacgatagtcaatccaaagttcatcacgcatccatgggagagaaaccatttgacctcttaaaagtggttttgatacatttaagccaacccgaatccttaaaaaaggaccccacccctcattaagagaatcgttatgaacctctagaaattctccaatgagattgccaattatttttgctagagcctcggatttactaagaaaaggcaatctatagacttgaacccaaaatggagtagtagtgtaagaagatatcgaatccgaaagaagaacactcggaggacataagattaaatgctgattatggaaatgccaaggttctttagacaatacccttctcaaatcccctgcacaaccgaaagtgaccatgtatgagtcagagtcataatctgaaatgataacatcaaaacgtcccaaccaatgtttgtgtaagaagtttttgagttggttaggattgaaaccccgttttgagtaaacacgacagagaatacgagtgtttgtaaggccaagtggtggggcagaaacattatcaattgaaaccataaccctttccctttcagtaagagcagtagaaacatcatggaggaaagattccatagtggaaagggtgatgaaagtaatagaaaggaaggaaatgaaaacccagaaaaaagatgaacaagatcaagaatttaaaagggacaggggcgggaacagttaagttcaaaagaaacaagaataaactgacaaaatatggttaaaaagaaaaataactactaactgccacagagcactcgtaaagggcagacaatgctcaaatagatcaaaattttaatcaatttcatggttgaaatttggtgttttgccaaaaaaaaaaaaattaataatattatccattcccattaaaaaaaaaattatttttataaaccaaagcagttatattttattaattaatattttaaagtctttgatttttctaattattttaaacttaataaataataattattaattaatttaataaatatatatttctataaagtgagttttaaaaatatatatctttttacataaattaaattggaatataaaattttagtaattgtatgtggttaaacttatataaaaaaattgaaaaaaaaaaacaacaattgataaatctataagaaactcattaaatttaaaattgttgtcattattatatctcacttgtcactatatttaattgtcattactgtatctcacttgtaatcatcactatcttgaaaaaaaaaaatataacgattgataaatttatatataaaaacataggttattgttggtttcgattgtagtgggtggtgtttatagtggctatgaatagtgatggtggtgaagaagaatgaatgaatgaataaaaaaaaatgatatgttaggaaaaagaaatcaattttttttattttaattttttaaattaattattatgtgatcataaatgtgccacgtgtacactatattcacgtggacaatacgtcatggcatttaacagtcaattttggataaaaattat

SEQ ID NO: 228589 - DNA, 1272 bp, Cannabis indica
ttttttattgtttttatgtttttgtgaaataatctcaatatttaaccttcccacggagttgtagttgcaaactttattccataattcagagttaccactagaactatagtaaaggtccaaacccatgagttgctatttagtaaaggtccaaacccaactaaactggtcttgtactatttgtaaagtggtcttttacaaatataccaatacagcatgaaaatggcattagttcaatgttaattttcaatgttctatatcatttagtgaggaagatctgataatggaattattgttttcttagagatttttttcattaaataaataatattatttaggtttctttattttagttttatttaaaaagttttttattaaaaacatgtagtggataataatttgttgatacgtgtcaatattaatgagtctagttagtatttaaaaaatcatagtaatagaagtgaaaaaaaaatatataatattaaatatttaatttgtcaaaaagaaatataatatagtatataagtttatgaagttgaaaacattaagtatgtcgcaaataacttaattgcatattttaagagtttttttttttataaaatttgtttaataacatgattttcttttttaaaaaaatatattttatgggaaaaaataataaaaataaagtttaaaaaaatataagaaaaatgatataaggtatctgattttcctaagtaggtaactagttaccttaaattgtttttttttctccatatatatttattttttaaaattttcccaaaaaaattatttttcaaaaaagaagaagaagctactcttgtaaattttgccaaaaaataaccataaccaccttttaagtaattagaaaaaagaaagcaataagaaattagatattagtttcttcttttggaaccctattaattaatttaatgacttctatagtatatatttgaggagtacttataagctctatcacctaataagtgatgttgataaagaagaaaactacaaatgaaaatcacaagaaaattttctgattatatatttctcaacttataattaattatcagttgacatatataagaaactcaccaaagtattataattgatttgtattggtcttaagtcaattttaaaagtcttataaaatgagaaaactaatttctatttaaatactttaaatttgtccctctcatataagtgtttgatgaattttgtttctatattagtaagtaaaaacagggtttatggttgtgtaattaattaattgac

SEQ ID NO: 228590 - DNA, 1074 bp, Cannabis indica
ttttgggttaggacctgtaaaatatcactattacctaatacctaccataagtatcaaccccaaatagtacaatagatcttaaggcctatgaattgcttacctcactgtagataatctaaggcaatcatatgatttgggccttggaacaaattaaaattaatgcatctttaaattaggaattttcatttttatgttttttagggaaatttttccaaaaatatggtttttgtttttaaaaaaattatgagaaaagttcaaatatatatattggaaagggtacttaaaggtaattagttacctccttatacagctaatcagttaccattaaattaaaggtaactagttaccttatactttttttcttatatattttaattattgttggattttttttcataaaataattttttttttgaaaaaatattttaaaaaaaaaaatacacactttgaaaaattatgaaatatgtaattttcactctttaataatattcacattaaaggaaactttacataattatatactattataaactttattatgaaaacaacttataaaacatattataacatgtaagtgtatctgtagatgaatgcagttatatcaaagcttatattaggtacatacttgagatttataatcttcttcgtagtaataattcataaagaagacttgaatgattatttaagagggtttatgaaaacgtacgttttaattattatttgtttatttcttctgtcagattaattaattatgatatgtttaagagtctttttaatttttgatctacctcattctttctaacagtggcatatatagagggacgaaagcatagacggctgctggtcttgccgccttgggctccatatcagttaaatcttaaatttaccaattacttcttataatttttatttattttaattcatgagatagggatctatatgtatactaattaattcttataatttgttgcactcattctatatgaaggaaaaaaaagtctctcctacctacaagctatcaactctcattaaaatacaataaataaaagagtatatatacataagagtaagagt

SEQ ID NO: 228591 - DNA, 1227 bp, Cannabis indica
tttgttcttgatttgtttgttttgatttaacttttgtttatttaagtgtgatcttgaatctggaattacagagattaattcctatgtatcaaagctaaattttctacacttgctttgctagagaagaatattttcagcagataagagttttttttttgtactttcagtctcattagaaatagtttttagtaatttttatgaattgctaattatgtttgtattttatgtagttcgaaacatcttatttttaattgaaatatttaaaaaaaagtggaacaaacatcgacagttaacttaaaactagaagacaagagatttccaatatttcaagcataatattgttcggaaacataaataaagttggataggttattcctttaaattttttttttttttttggaagaacaacaaagttcattaaactaggaaaagaacataggaatcacaggggggattccttccccttgaacaatgctagctgataggctagaaattctagcactctttgccagcgagtctacacagactaaaaacttcctaggcacaaaataaaaattacaacactgaaaagaaaaaagcgcatccaacactaagaaagaagaatgataacatttccaatcggaagggcatttcctcacatcaaaagcttctacagcgagaagcgcatctgagatcacagctagattttcccagcattcattcttggcccaattgagagcgcacagcatggcctgaatctctgcgtccaaggctgaaaccgcggtaatatgagcagagttcgaagcccacaaaccagtagcaggctgaatcatgatcacccctttaaaatttgttgtactagttgattctcaccccttaaaaattatgtatgattttgctaaaacacattttttttcttcaataatctaggatcattgtttgaagatgttattcaattttccaaaaatatccctaatctatgtacattagtcaattaatatagctgcatatgaattaacttaacatactcttcccataaataaacaattttttttaactaaatgtctatccacaatgatattcctcattacttaaaaaaaaaactactctaaaataataaaattatatattttttcttataataataataataataagagggtgagattgaaggtggtgtggccacgtattattattattaatataaaaaagaaataaaaaaaatgatgagatgagaggcgaagcaag

SEQ ID NO: 228592 - DNA, 1282 bp, Cannabis indica
tagtaatcatgatactcaccccgaactaaatctagcaaagacacaaatctggacgttcctgtattcgaagatgatgaatcaagagagaatagttctgatgatgttgaagatgatcctcaagacacatcgaaagatgatcctcaagacacaccgaaggatgatcaccaagacaaatctactaatggtggtgttggagaaaaagataatctcgacgagtcagatcccatggtgatcattatggccaaaaagtttcaattaactgaaaaataagttatctcgacatgactaatttaatgtcataatgcttgagaaaatgacaagaatggaagttgtgatgacatccctgactaaaggaaaccaaaagcgcaaatgtctccaacaaatccaactaaacagtccctatttctactcaattcaaactcaaaaaagcataaaaacaatcctagaaacttaccctaaccataatttaacgtcacagcccctacaaacctaaaaccctaaccaaaaccttgtctagaccttaaagaaaacaagaacaacatgataaaaagcttacctcaagaattggataccactaggattggttttctagctaaaattggtgctaaactatgctggaaaaattgaatcccccttggtttccttctaggccgaatgagaggtgcgagaaagcttagagattttccttctaacttcttcttgtattttaatcctttagtaaaaattaaattccctttttctttatttttttttaaatagcagccagctcataattaaataaaacaaaccacttttccaagcaaaatgaccaatatacccttctccccaaaaactaaactaaacacaccctaggggcaatttggtaattttagctaatccaccaaaacccacgttctaaaattctaaactaatccggaatattcccaaaataatccatccctaaatgtcgtgacatttctgaccactctgtccagtttccacggtcgtcaggcccaaaaatattttatttcaaaaagtgtatccacgatacccacatattccaataaaatcttcgtaattaataacttatattttatttgatcatttaataaatccacgctaattaatctaagtaagatcataatcttacttcattaccaaaataattacatatttaataaaatatgtccaattaaataccaaattatttttcgggatattacatgaacaattttataaaacttttagaacaacttatttggtcaagttaggcatgttgaaactttgaactaacattttcata

SEQ ID NO: 228593 - DNA, 828 bp, Cannabis indica
ggtgagtgagcacgtgtccaaaatcctacagtggtatcaaagccaacatccttggcagaaattcaactcacaaacacaacaagaagataatcaacacagtgaaaaggaaaaaaagatcaagatcaccaaatcttgattgctgaaaactgtccaaacattcataaggatgatttcttgaaaactcttgaacctagattaatttttttaaaaaaatttgatatcatgaatactatcaaggctgacattgacaaatttaatggctcaggagattataggatatggaggaggaaaatttgatccctgctagctcaacagaaattactaagggtgcttgatgaccctatagaatgggcagaaggaactaccaaaacccagcaagaggaactccttgaaacaacaacaggcatcattatattcaacttgtctgattcaataatcatactagttgataaaaaggaaacccgtgctaagatctggaagaagttagaagaccagttccaacaaaaatctttgaccaataagatctttctaaaagaaagaatctttggttataagatgagccactcaaagaccctggatcagaaccttgatgaattcctaaggttgcacatagagctagcaaactcagggcagaatgaggctttgagtgatgaaaatcaagccatcattatcttgaattcattaccagtcttatagagaagtcaaaactgctattaaatatggtaaaacctccattactctggaagaagtgatttctgcactaaagtcaaaagacttggagatgaggaatgaaaaattgggaaatcacaatggggaattgaatctaag

SEQ ID NO: 228594 - DNA, 1834 bp, Cannabis indica
ttatgaacaatgatgattaatgttaaatgtgtgtttggatagctcataatctatgtgataattttaacaactcctagtggatgatgattcaatattaatatttcttattatttttaaagtgatggaaatatttgtgtagagaataatattatgcaattaagggattatacttttatattattaatttttaagccatggtcattatttatagaaatagaagagatgcatgcatgcatgcatataattcttccaaattaattatccatgtcatgctttaattaatttcttgatctcatacacattttttcaaagtattattattattgtttcaatttcaaattcaatatcatatattaaagacaagaaaggagtcaattatcaagattttttcttcttttttttcttttcgaaaaagagtactcaagaatcaagaattcaagattgccggctattttctttcttattcttttttataaaattaataattaagtctatttatttattttcaacttagtactaaactatataatatgcattaattgggggtgattcaaattatatatatagctttataattattcccctaaggtaaaagaagaaattttttcattttttttaaatagatattttatataaatagtgaaattagaagaatttttttcattttttttaaatagatattttatataaatagtgaaatagtaattggcggtttgggattattattttaccaataattttacagctaattaatgaccttgacatcacttccaattcccactaattaaaatggcatgaagcatatacctcaatcgttatatttattttattttattttataaaaaattataattaattgggtcccaacaaaatttcaaaggaatattttcaaaatatagtcaaattttgcgatttaatattgaatttatactttgaatatagtaagaggttccatcaacctaacattgctaaaagaatatttaatttgtattattaattgtaaaatagtcaaacgctatctataataatataatttggtctttcatagagacctatatatatatagaaatggaccctcttatattttcattgaataaaataaattaatgattataagattgaacttgatcaattaagtcatcatatgaaaaattatttttgcaatattgggcaggtaagtaataagaactacaagttgggatattattattgtgtgaatagtgaagtccaaatttgaaaagtaaaatgcatattatatataattaataaaggtaataagtattgtctaacgatgattatttatttttgtaatgcatgcacataaaaatggattaagacccaattcattgttgaatagtaataatttttattgattttgagtttattgcagttcgatttttactattgcaattatttttttctttgtaatataatttttagtattttagttttatttctgtgatatgtttttagtttttttacgtgtaacattattttgttttgttttgttttgttgtttattttttttttattattcgatggctcgccatcaaattactattagtagttgagaattgatagtaagttcttaagtttttttttttttgtaaaataagttctcaagttaggttgagtgaacttactacaataatttttactgttgtatctttttaacaataaattaaactgaatataggtgggaaaatatctcgattagattgattgcaagctattatttatttattgctattaatagaattacatgattaaaaaagaagaatggatttagaactttctaaataaataaatgatataaatactataacaataatct

SEQ ID NO: 228595 - DNA, 1467 bp, Cannabis indica
taaaaatattttaatactaaatatatataattaattagtttttccccttaaaagtattatttaattattaaaaacattttttaaaaaaataatatagtctacagtgccctatttaatttggtgagacactgcaaataaagtcattataagtataattttaatattgtattagaataaatatagttttaaagaccaattggagatgaccttaaaaaaaaaaaaaaaaggagaggaaagttaattgaaatttatatatttattgcaaattaaatattgaagtacaagaaaatattgtcctttacctcacgctcacttggctctttctaactagtggacaacatgcaaaaactatcaattcgatagcttttgtaagttgttgaccagtttttattaaaaccatggtaaaattttaaaaaaatagatcatttattttttttaaaaaaaaattaagtaattttttaaacattttttctagtaagaaaataaaagattaaaagtcttaatggactgatatgttaaataaaattcttaaaagaaaagaatgtgaggcctctcgaatcgaggggccttaggctacggtcttaaccgcttcaaactaaagatgaagctctattgttcacttattatttaaattatcttaccaaaattttatttttaaaaatttatctagaacttttacgttatattatgcattaacttttttttttaacattcatttaaatatttttttaatgtacatataacgcataataataaagtatgaataaaatattatttgaagaatgaatagtgtctctctacatgtagacactgttgatattaaacacagattatgagcattgaaacacaaaagattgtacactaatcatcatcactcataatcatcaaatcaagatccaagtatttatttaaagcatccaaaatatataataagcagtgccggccctgaaacaaagtgagccacaagaaaaaaaaaattgggcccccatgtatgataaaaaaaatggaagaattttgaaaattagtaaaaaaaatatatataattttaaaagggaaaaaaaaatttgggcccctgagctaggtgggccttagggcctagcctgcctatgtccagggtcgggcctgataataagcatacatacctcccattgatgcatccatataagccatctaagtccaaaaatctccaacaagaatcaatccaatctcaagactagagaggagcacaatgtggagctatcccctcttctctacctattaccattaacctctctaaaccacttcttcacacataagacatatatatataaatataaatatatatatatatctcaaacccttataaccttaaagggttattcactaattgggcttaagtagttcaataatggtatactataatttaataagccaattatagttttaagggtgctctcatgtgcccctaacataacatataattattaa

SEQ ID NO: 228596 - DNA, 617 bp, Cannabis indica
tgatatgaaactttgtaaagtcaaattatttgttttttgggcattacaattaggaaacatattgagttgtaaaattaaaattatgtttttgattctgctaaagaattggtatttatttatatgtaaaaccaaattgtttgttttctgtcttactgatttagcatctccattttcatcttatcaatatatcagttcaaagaaagaattacaccaataacagtgtgttggcacaaaggtggtcataagtaattttttttaatttttaaatttgtttgtttgattttattttattttctaaaattttagttttgtgtttgaaaaatggtcaattagtttttttgcttgatgagaaagaacagtgtaagctaaaaattagtttatgagaaagtgggtgattagaacaactttcagttacacaacaattcgtattgccaagtgtcaacgactaagaaagattaaagagaaacgttattaatgaaagatcattttttttataggacaaatcccattgattaagatattagatagattaattctacaacaacaaatggtattgtatttcttgataaatgcatgttacaagatcataaatttactaaagctaaaatcttgccact

SEQ ID NO: 228597 - DNA, 1394 bp, Cannabis indica
aatatttaaaattccgtgaaaccgtatttttataattttttttattgatttggtgtatttgtaaaacaatcccaaaaaaaatagttgtagaatttgtaaaataggcccatagttaagctagcccatttacccaacccaactccaagtagataaaacacacaaaaagtattattaaaatgtgtaaaaaaaactaaaagacaattttagttttattaaaatattttatggaaaaaaagaaatatattattaggccatctaattttgagagccagccaagtgtgtagctcatatttacaacactctgatatttgtatcaaagatattaatttgtttttttccatataaaatagagtacatcctctcaaaaagaatgtattgatatactttttatttattttgccatataaaaaaaaaattagtctaataatttttttatattataaaaaacagtgtttaaatagtctatttcacacacgtaaaatataaaatagtcactatatttaaatcttatttttgacatattaaatttttctaaaattttgcaaaatatcataaataattataacgtacatgaccatacaaaaaagtttgactaaaaaattattttggataccaaaacagataggactacatcagtgcatcccttttaaggaagtgcattgtagaatttttcctataaacaatatgtggataccacactcctacataaatgggtattataaccccctgagataaatgttcaaaaattttcttcctctctgcttcttttagagggagacagaatattatcgaaagtatccaagacaaaaatggaacttggctccacgctaggaacctgcttggtaaagaattcttggagttcttcaatgggtgttaggttatatttagcctatgtttcgggtctaataagtaagcattttctcggttatcggtgtcttttggagcggttttacgcttgattttccttgtttcaggttcccggggcattaaagttcaaattcagtcaattgatgaaaagacggggcaaactagtgaaaattcggccaaaactgccaaaaagggagtcagtagtcgcgaccagtgtagagccaagtcgcgacccttttatctagtcgcgaccatggtcgcgacttggaagatttggcagaaactcggttttacgagatttgcctgtagtcgcgaccagcctttaaggtggtcgcgaccaggtacggaaaacgtgatttttgacctaattcagatttttttccaattggaggcacacctttcattcctatataaggaacacgattcagaaggtcaaagcaagcaagaacagacctgaaaagtgaatgaaagagaagaggaagcgatcttgaagacccagagcgatatcaccatctagtttctttctt

SEQ ID NO: 228598 - DNA, 1092 bp, Cannabis indica
aattctctactcccttaccctccctactcactcatatatatagcatcaatccctcccattacaattacccaattacccccttatttagtaccctaaggcctaacagattttgaactattcgatgtcgtataaaagattgatgtgtggaaattgtaaaggtgaatcgagtcttgtaaatagcttcaacattggaagagagttctcttcatttggtataaggccttattggatgcagattttgttcaagtccttgcctttttttaaccttaagcaagggctttgtacatctcaatataacatatatgagttgtttataatttctttaatctatatgtatatatttttctactaatttgagtctaggttttttgtttttttggttcctctagctagcttcatcatgtttttttcgtctagtaatggttttagatttttttattgtcgcaagaatgtttcatacactatgtgccagagttatctgtatgttataaatatatatgaatgtatatcataagatgttaattaagcatttatatatatatatatattacattatatttatatatatttatatgtttagatctacgtatatacaaaagctctctctttctcgagtttgactggatcaatataatatagacattagaaaaattgtttattatcattatttattttaataaataaaaaagtgacatttccttgtctcatataggctttgtttacataaattttgtcaactttcttaatacaaagccctctctagccccacaaattaaagagttgttagctgttataaaattttatgttaggcacatggttatcataattgtgcatatattaattaattatagctttgatatagcttccaaaaagtgtgtaaataaaataaaataaaagggtattcaatatatattactaattattagctagcgacgtcacgtaacttcagtacatttgtgtgaaaagtttaggtgaagcagaagtgtgggcttttctagttaactgaagtctttgatgagcaagctcagtctaactagggttatgtggctaagttccctcgctaactctataaatacatattgtctcatcaca

SEQ ID NO: 228599 - DNA, 1401 bp, Cannabis indica
aaaaaaaaaagatataactttattaataatagttaaaataaaagtttgtaactcaaagatatatttttttatcaaaaatatgacgataattagaatcagaaaaacgagtcaattaattaaccacttagttctcaaatcgtaatacaaaagaaattaagataaaattagatgaaaaaatattgtagtttcacttaagaacacttatatttaattttttccatcgttcaaaaaacacaatagtagaaactgttggaacaagttcattcaaccccttcacttgagcactcaactattgtacaaaatacgtaagtgcactactaacaacttcttccgtcatagagaacttgttattctcaaccactaacaatgatttaatagcgagccattaaaaatcaaagaagacgaactaataacgaaacaaaacaaaacaaaacaaaacaaaataaaacaaaataaaaatatgtcatagagatatagtcaataacgaaacaaaacaaaacaaaacaaaactagctatatcatagaaataagactaattgcagtaacctaaataaaagacactcaaaattatgttagattaacaagattaatcataatagtaaaaatctaatagcattagcaaaattacaaaccccaaccaaagcacgcctaagcccaacaggcattgctgaagaaaaaagacaatatcaaggaattaaaaacaaaaaaccctaacaatttatataaattgcataaattggaagttctaaaaaaggtaacaatgaaaaaagtagacaatataaccaaaaaaaaaaaaaaaaagtaagcaatgggaattgcataaattgtagacgatatatattctttctattattaccaatgaaaaatgtagtacacgttataacaaaaagaatacatgtgtttgtggtggctaattcccattaccacaagttatttacaactcaatgctagtatgactcattttagtcatcattatatatagaatgttcatcatatttcaaataaactctttcgtgtacattaagttggacattataagtctttgttgttcattttgtgttgaaaatgatattcagagacatgagaatgatattattcatattcaaggagagttggacataaaaaaaaaatatatcatgtccagtattgctagatgtaatgtgcgtgtcaagatggcacgttacaagctaagtgatgcccacaagttggccaagtggtggtcaagtggtgatgcatgtagaggtggatgctggtggcatgctgatgtttagtttgtatgacagtgacatttttttgtaaatatcttcaatattgttcggattgggacgggatttagtattcgctatttatttgggtctacgactacaatggtgcaatcggattagagaaactctgtgattt

SEQ ID NO: 228600 - DNA, 2103 bp, Cannabis indica
tagggcataaaacctaacatctagatcctggtaaaatatttccaacatacttctatttcctattctattactgaggatggtctttgggacctaaataaactcaccacccattttgacagtgattttgttaagctaatccttagtgtacctatcaattccaattctaaggactgtctcatttgggggcatgatccgtcgggttctctcactgtcaactttgcttaccaccttgccgacacgactcactccagccctagttcctctaatgcagacacttacaagaagtggtggaaatcagtttggtccttaaatattcctcccaaaattaaacactttatttggaaagcttttcaccatcttctcccctctaagcttaacctcttcactaggaagattctctaggactcccacggccccttttgtttcagtcgagttgattccaattcccattccctcttagagtgttctagagttggtaaatacttgaagcacactactttctcctcctattctactgataaatactgtgatattaaagaattcctcttacgtggttatgaaactttcaacaaagatcacttggcagctttatttggtattttatgggctatttggaatcatcaaaataagtctctctttcagaatgggaagtccgattataaagagatagagcctgttactatttctttcttgcaggattataaggaagcccaatcaaagttcctgccccaacctcacaaaaatctccaagctcacactgcaagcgagtcgattgaagaaagccttcttccacaaccaggtttttacaaactgagtgtggatgctccagtaagaagcgaggatacccttcatggttatagagctgttattcaagattcttctgatatagttattgctggtttccaatcttctgccatctcaggactgccacctatttttgctgaagctgtagcacttcaccatgctcttgcttggtgccaggcagtccatttccctatcaggttggtggttaccgactgtcaagtcctagcttctaaaataaacaagaaagctaaagatcgatcgaccttgacggatttggtgaggcagatcatagactctttatccactttcctagtgcctccgttcactttatcccaagggaaaaaacaagctagcacataacttggcccaggctgctttagaaactgataaagagtgtctgtgaaaccattgtgttccttagcctctgtagaccttgtaacctgtgttgtttgcttttcttcattgttacaggtcttgttgtttaaaaaaaaattatcatttaactaattgaacttatttttattcaggtgccaactttttttcaatttatcttcctaatctccatctatcaaatagctatctatatatcagtaaggaacaatacttctctcccttttctctatttatatgtattttcattttgttcaaatcttcaaaacaaatttacacattttttagtcttatttttgtactcgatattctttgcttgatgtgttatagtatttttgaaacattgcattatcctttcctattagattattgctcctgaaattttcgcataagcattcaagacatataatatatatatatagaacacttcttaataggtactacccattgatgggtacaaaattaatttaactataaatgttaattttaaaaatattaagccattagattttgatccgatggcaaataataaaagagaaatttaaatttctatgcttaaattagctacttaattaaagaaaatatatatatatatataaaatacatctttttatactacatcaaaataagtttatatgaaaaatatttaaataaaactcaatatttttttttaaatttttttgctgaattttttttactattatttttatttcagtcgatggaacaacctcagcccatataatgaaaaaaaaagagagatttttctaattaaatcgaaaaattaagcataaaagctcaattttttttaatattacccattcatgagtaatacccattaagagcgcacccatataagacatatatatatatgggcatgctcttaatgggtatttgttggaaattatttta

SEQ ID NO: 228601 - DNA, 795 bp, Cannabis indica
atttttgtaaataacaacttttaatttctattttgtttattttcttttttaggtcataaatgtaaatttgttccatttttagtttattatagaaaatatcccttaaattttaaatattattattatggatattactatatgctaattcacctttatttattttataggaaggctcacagttactaaagcttgctatgatgatggtgttggattagtctttgatgcatgattttcctccactctttttcaagattgacagtttatgtcacaaaaaattgacagtttggatttagttctttgtctctctacgcaatcttttatttgtattaaattaattaagatctttaatagagatttttacacgtttacttaccaattttcttgaggcatccttaatgcatgttcgtattcatgaattagcagagcatgcactcagaatgatagtaaactagtttggatgaattatttatctttttttcataatgtactactcttttataatttttcaataaaatgtttgttcattatttaaaaaaaatatatatcatatattttacttcagaaaattaactcaaacaatttaaatatttaataatcaaaatctaactatattagaatatttaaaattaattaacaaataattaattatatattctaaattaaatcaaataatacatttcatttactttatataaaatattcttatagttattctcttttattctagtcggtataagttgtttttaatttttatttgattaataatcaattgtcacatatttatttaaattgaaa

SEQ ID NO: 228602 - DNA, 525 bp, Cannabis indica
aactttttcctttcttatttttcatacttcaaaaaattacattctaatttttttatatcgtaactataataagtatgttgttgaaaaattatatatactttactgtgtcaaaattaaagttcgaaataacttgttatacacatagaaaataaaataagcatttatataattaaatatttgaattttatttttgaaacttaaaataatttagaattttttaaagtataattataatatacatcatttctctatataacaagaacaaaaaagttcctaattgatactctcacccaaaaatttattaaaaaaaacaaagacgtcattgttccttacaattcactcatatattacaaaaaccatatatgtatttttttctattttattctttttcattacactataaattagttactttatctttatattatttattcatgttaaatataaaaatatatataaaaaaaagttcaaattattacttttacttttacgtgtgagagcattttttttttaacttttgattgg

SEQ ID NO: 228603 - DNA, 1030 bp, Cannabis indica
atagtgagtgaccaaaagcaaagaaaagaagtaaataaggtgagtttgaagagttcacatgcactgtgttgtttgtcctgtgctcctccaaatatatgaaagattaaataaggatttgaccaacacataacgacaaaaccatttcattcccaatatttgattatctttgtttgttccctttaaatcataagaaaatattcttgacttttctactttttttcaaattcaaaacgatagctacaccacacacacacatatatattcctctccctctctctcttcccacctcaatatatatatatataagtttatatatttatttttctcatgtcagagtgataaaatttgtcacatatatatatacaaacacacacatcagttttgaaatgctctgtgtaagaggcgcatccacacctacatatatcctattagaggaaaaacaaaaacaaaaaacaaatggggaatcgaaacagatcacaaaatccagaaatctgaaatggggttttgattactaaagtcacctaaattggcaatgacatgattaaatcgactataaaaattaataaggaacacagtacaaagaaattcgtatcatacttactattcaaagaaaattggagacttgttggagatgaagattgaaaatgaagggttgagtcttgcagctcatcacagattatggtgctgggcaatcataatagaaaatcacaaaaacaatgtcacaaataagctagctgcattggctcatcacagattcataatagaaaatcaaaccgacaaaccataggaaaaacacgaaccttcaaagactcaatagcttatctctcggccaacacccctttcctctccaaccagctgtcaaagagagtaactgaagggtcgccgtcgtcgtcgaagagagaaactgaaggtcgtccttgccgtcgtactcgtcgggggtggctgtagtgatcggagagagctatagatggtcgtgggttttgagggtttgagcaagagggttgtgggttttgagggtcgtgcgtaagtc

SEQ ID NO: 228604 - DNA, 1993 bp, Cannabis indica
ataaggcagttcaatgagagaataggcttcaagggcaaggccctaataagatatcccttgctagagagatccataaacaggacgaccaaggtctaccaacaggtagacaatgggcaaacaacccgtctaggtccctcgaatagggggccaaactctatcctccttgaggataaacatgtcttgcctgaaaaaccatatggcaggatgaccaacgggtcggacatcttataacctacataaggttgggcagtcagcctgtagaaggttggataacgtacaacctatagaaggctggatagcttacagcctgcagaaggctggacaacttacaacctgcacaacataagtgtaagacatctcatcatcaactggacaaggtatccctatacgattcttcaatccttaaagtgtcaaaatcgcaaggagtgaaataaggagaaatagtaggtctacaagacggaagatgtacaaagaagctatacgacaaagctatatggaaaagttgtacgaaaaaggtagatagacatgccgaacagaccctaaaaatagggttggccaggctagacaaccttcagtaaggctcgccagccaactcatgtagacaacctcaaaaaggcaggccgaaggtctgtccaagcaaggaggtttgtttgaccaaggaaggttagccgaccaaagaggtctatctgaccaaggaaggttggacgtccaaggagttttgtccgatcaaggaggtttttccgactaaggaaggctgtccagccaaggagagctgtccagacaagaggccaacagaacagatccatctgtacaaacatagttagataagcttagagacatgatcaaaggcccgtcctgccgaaagctgtccgacctagagctggataggtcaaggtgatcgccctttacaacatacattaatgcacttctccttcctaagattaaaatgacaacttggaagatgtacatgaggaaagaagatcccctagcgcacataaaatactttaagatctaaaaagatctttaaaatataattagagatgtgcgatgtcggatctttctggcaaccctatctgacatagcccaatagtggtatttcaagctggcccgaggaaggttcaactcttgggaggtattttctcgagaattctatactcagttctcttccttgaggaaaataccttcacaactggaggatcttgttaaaataaagcaaagacatggtgagcctttgaaagactacattcaaaggttcatggccaaggccaccaagatcaaaggcctgtcagaagaatgccgatatatgaccatacttaaaggtatcttaccgttaagtaaagatatcagaaggaactcgacgaacaacatgaaagagttacttgagcaagctgatggtttcataaagttggaagatgttgttcaacaagcccagataggaagaaaggccagtgtcagacagactcaaggtgtcatacaaccccaagttctatccaacatgccgatcagcacatgctatatcagatagcccaacaacaataagaataatggaggtaaatgcaacaacaatggctctggccaaaataatgggcaaaagataaattcaacgattcccctgtgccacaaaaccaaagggagaagcagtagaagtacacatgcttcactctcctaatagaaacctaaagcacctggctgactactcaagtaggccactgaactcaacctatatgtgatcacttaccagccaagaatggctataaaaggtcaagctctcgctgacttgtagctgaatgcacaagcacatctcctaaaatctctcaagattaaggaaaaaagcaagagctagagaagaagcgagagcaagagtgagaaaatttagcctagaagttgcatgttgatgggagttgtaccgactacctgtccattgcaggcatttccctcattacacttgggggtaaacagctggacgagccaataaagtgttgggttttatgcc

SEQ ID NO: 228605 - DNA, 886 bp, Cannabis indica
tacagacaaaattgtagtttaacgttagataaaagatgcattattttcataaaataattgggctttcgatgttgctctttcctgtacagaaatgtttaaaggtactggtgtacactaattataggttatatgtatctatatatagattaatggattttttaactagcaaaaaaaatattggattttttatgactcttaacgcaaactctcttgtaaaagaaagtgaaaagatagagttagactgaatatgcagacgaaaagagagagtgagcatatcatagtaagtttgagattacgtgatgggcaagcaaggttttatttagtataggtgtatatataacgttgtgttggcaagaagatggaaaatatatatgggccatttccatcttatcagtttcagtctcagtctcatcattaaaagtttcttatgttaattttcacattttgtcccatgtgtgaaacggtgcttcgaacaagttaatgtactttcagtactctttctactcctatgattatttgttttccatttaccttaaattcctttctaacttcaaccaaagggaaaaatgttactgttttgaaaacatgcagtctcatcatggtcaacttatacacgcacctcatcaaatatcactaggtcatagtatattgtagccgtattattaagcatattattaatgagtatcatggcttatatgagtatcagaaacaacttgtgacatagtactactgcaaaaaatacaattttcgtcggttttgtactgacatataagttaatagcgcgggttggacgaactgacgtatattctatagacatgtgaagtaaacttgttgaatcggtttttaagtgacaatagtactattttcttgcattagttgtcgctaa

SEQ ID NO: 228606 - DNA, 1986 bp, Cannabis indica
tttgtaagtttcccttaaataatggggttgtcgttataagaagcagtagtgattttgttgtgagactttgaaattaataattagggcttaggccaataggaatagctaggccccactcactcactcactcacaccttccttccttccttccttgatgataatattcatatataccgtactacgtacctaattacgtacgtacgtaggttacgtggttggttttcatcaacttattattaattttgtccctttcaaattataacatcttcacatgcatttgttttctactattacatttttcttatccctacgtaaattgtttgtagtaccaaatcaaactacacatatctatgggctggtttattattcgatatattggattgtttttaattttttttttaaaattatcctaaagcaatcgaattttcagttacttattgatcaaaatgtgccaattgtcatgcctgatcattctcttaagagaaaggttaaacggtattagtagtgtctagcacacttctatgtgttagtatcgcttggtccaactaagtatcgggtcccacatagtttaatataatagcttttaggaagtatcgttaaccaatcacaacgtgacatatcgagaaggtactaggcatcattgatgcctaatagcaatgcttttttctttatcctagttataaatggaactaaaacaaagagaaatgtgcctctctcatttctagagcggatttttttgggattagatgacttgatcgtgaccatcatagtaatgtattatttcatttttttcaaagtagatgcctataggctgcgttcagccgattgtggctgaggcaacatggcttgaaggaagcgctaagttggatgaaataataagaattctcacgcgttgtgattaagtcagactgcaagagtgttattaatgatcttcatagttcaactcatatggtctcgaatttgggtttaattatttttgattgtcgtttcctagtttttatgatcaacaatattttttgtgtttttattaaatgatttgcgaataaagttgttaattgtttagcgattgctgcttgttcttttgcttgttgtagttatagaggggggcttgtcctagttgcttttttagacaattatttcggacaatttgtctatttaatgaaactgcaattttcttgtcaaaaaaataaatataaaaaagaaaatgttaacctagaactctcctaagtattatgtcattatgtgcaattaagtatcaagttacatataatttaatataataataatttttaggtaatatcgctaaccaataattataagacggaaactttattaaaagatattaagtaccaacaatacttaataacaatactctaaaacaaatcatctttcacatgactaactatttaagttttatttgtgcatgtgaagattcatgaatataccacctacaaatattaatacacaatataatttagggagatagtgtacaaatggaaattctctaagattggtggagggatgtttttggttttgagagcacgataaattaaatctaatatttttatattattctggacattgtggttacaaaagataatattcttcaagtttttagaaaatttgaaatagtttacactgtccaaacaaaaattcaaaataaaataataataataataaaggcatttgtgtttaaaatttatttttgaaattataaattattttaaaaaattagaaaactattagaataataactgctttagctataatgtattaaattatcatataaaataaaatgaattgaattataattcctttatgtgcttcaaaaaaagaagagaaatctctcttagtaaaaaaaaaatatagtgtatgtatccacattccactagatataggaaaatattgtactacttttatatgtttttaggggtgttcataaaatagttgatctaattcaatcttcataattcaattcaatctaat

SEQ ID NO: 228607 - DNA, 1868 bp, Cannabis indica
tcgcgatacgtcaaaaaccagaaaaaaaaaatgcagaaaacaagcgaatgggtttcgccggaagtggtgcggtggtcgtgggttgtcgggtgcttctcgtgggtggtccggtggggttttgatgggaatgggtttggagagttagagaaagagagagaaacgagagagttagagggagagtgagggtttgaaatgatgaggtattgttgggattaaagatatttggagggtattatttttacaatttttttaagaagcatataaaaacaatttatgcttttttttaagtatataatgtcaaatttttcttttcaattggaaatttaactgcctgccactagtttaaacctcttaaaagagcctctgcttctgcataaatggcaagtcctgaaattgtaaaagagaaaaaacccgttgtaaaattattattgctatcttgaatcactacatatagtactaatcatgatctaatcatttaaactacatatataatactaaggtactttaagatttatgcgtaaaatacacatagccatatgttatgtataataatctcttaactgtgaggatagttgattgacttacatgatctacgtgaactattaaaaccaaattcagtcctaattggactaaacgagttgttcattagtctaagtgagtgaggttggtgtgaactcattttgactctgaaatggtgtgaatttgatctgaatgaagtcaaaacttggactgaataagttatgaacctatagtgtgatttgtgaactgtgaagctctccaaactaggttcgaatgaggtctaaattgtttgacaaaaaaaaaataaaaataaaataacatgaaaaagattgtagcatcaacagttaattttaagagcacttatattcaattttatctaccactcagaagacacaacagtaaaaactgttgcagtaggttcattcaatctcctagtttgagcactcaactattgtgcaagatcagtcgcagaaaactttttatttccaagcactaacagcaatttaatggtgaatcatcgaagaacaaaagaattagcaacgaaacaaaacaagatcgtgtcacagagacaagactaaaacacttaaaactatattatagagacaagactaataaaacactcaaaatcatgtcacatagacaagactaattgaaataataaaaaaaattgaattgcaatagtaaaatacaaccccaaccaagtagcacaacccaaggaaggtcagcgggcctagccgaagaaaaaagacaacctcttgtaattatagatttaagagcgagaaatcctaattcttttatataaagttagtttatagattgaataaaatttgaacattttattattaatttaaaaaaaaataaaaaataaaaaaatcaattgaaatactgctatgtgtagaagaaataactattctctggagatagtaggaaaatgattgccgccaattaaacataaatatcacaaaactaaaggaattcaatttcataaaacaaaatttataattaaaaatggtggcagtgtcataaaaaataacaaggtcgacctcttatttacatccaatagcaacttaatttgtagtaaagtctaaaataaataataatgtcgataaataatatttatctaattattaaaattttattatgagattaattataactttgtacctagtgtaatttaaatctcatgtctaaagcaggccggcccaggcctaaggcccccaaaatctagtttaagtgttggttgtttgggctaaatttagtatatatttttgaggaaattacattctatactctttttatattgtcctcttttatttttactttcttttttaaaatctatcatttttacc

SEQ ID NO: 228608 - DNA, 1825 bp, Cannabis indica
cctccagccgaattttgggtataacaacaagatcaaaaagttgtaagttttaattattaattatagtatttattataacaacaaataataataaatataaaaactaatataaatttttactttttttacagtttggagaaaagcaagcataaaatccataaaccgaattataactattatagcgacagtggatagaacggttgatggcggtgatcacgaaggcttggacgaatgatactgaaaggcctaagaattttttttccttagcttatttttttaggtcaacttgtaattagatttattaacttgtgaatacttggactaattttacaatatttatgtaatatataattgtagtttaattaattacttctatgaaataaaattaggtatattggctaatcataaaatatttaatttatctttaaaaaaataaatatttaagataaatttatattaaataatataatatataaattaataaataaataatataaataaattaaataaataactttttgagttagatttttaactgaaaataaataattgttcatttagcgtcggtttttaaggtatatagtgtcgattatatgggtatatagtgtcggttagtagtatataatcgatgccatatctacctatggcctcggttcttttataataactgacgccatagggtaacatttagtatcggttgttttagaccctacatcgtcgcttggatcaacgtcggtagtaaattttaccaaaatcgatgctgaaaggccttaaaaactgcctctaaagtccaaatttgtagtagtcctgggcgtagggcaagggacccatcctaggtcgactgctatgacttaggactactcaagtccaagatgtcatatatcttgccacatgttaaacattgatgttcaggtcactagaaaaaatttctggattaatagatggaatagtggaaagcaaaacggaaccaaagttcaaatagtttagcctctaaaattttagtaaagaggattcatcgtaccaagccttaaagtctagatagtttgcagccaataccctaaacaaccagaccaccaaaaaaagagaaagaagaaaaaaaaaagtaaaaatgtgataggtgatagatgatagatgataggtgacgtaagaaaaagagaaataaataaaagatagtacaataacagtatattgctatttgcataattaaaatgagatttcgttttttttattattatattagtaaaaaatattcattaaaaagaaaaaacaatcaccaataatttgttcacaaattaaaattaaaaaaaatcaccaataaaaatatttaaatattgtttaccatagtaaatattatatcaaactcactatatcataatgaattaaatcaagaggttaagaatttataaaaactgatttatatgttggcttagttttttcttttctacaaaaatatcattttaaaaatcatttattaacatattaagatttaaaccaatattagtcatatttttaataataatacacttattaacataaataagtggcatgtcaaacattaaaataacaggagagtaaaaaactttggtggcgtttaataataattttttcatcagttttttattttttcaattaaaaaagtgaaaatatttttcacaaacatgttttataaaattgttttccctttttaattttttaattgagaatcaatttttttcttaaaaaaaaataaaacacttttaatatttttttaaacagttttttattcttactcaatattttgaattccgaccagacccggacctaaatccctcccacgaccttggcg

SEQ ID NO: 228609 - DNA, 822 bp, Cannabis indica
ttgttagcctttgctgaagcttctgggcagcgtgttaattttgataaatccacagtcttcttcagtagcaacacccaaactccaatgcgtgaagctatttgccaaaggctcgggatccaggaagctaatgaacacagtaaatatttaggacttcctagtaccattggaagaaacaagaaggtggtcttcaatttccttactgataaagctcaaaaaagaatacaaagttgggataataagtttctgtcaaaagcagggaaagaagttctcattaagtctgtggttcaagcacttccaacatatagaatgaatgtctttcttattccaattggtatttttgccaagacatagagcgagcaataagtaagttctggtggcggtcaaatagcaataaaggaattcattgggtaagttgggataaactgtctaagcacaagagtgatggaggtatgggttttcgggactttcgagattttaatttagctcttctagctaagcaaggatggcgtttactcacttgtggtgatagtttggttgggcagatctttaaggcaagatattatgcaaatgggaatttcctttctgcaactttgggcaacaatccgagctacatttggcgaagcgttcttgagtctcaaggggtgattcgttcggcggctagaagacttgttggcaatggttcgcaagtgcgtattctcaaagacccgtggcttattgatgatgagaatccctttattgaatctcaacacccgggtttggttgggaaaatggtcacttcattaatgaaagtgggtgcacttgaatgggatgaggaagttttgg

SEQ ID NO: 228610 - DNA, 1026 bp, Cannabis indica
aagaaggattcacacaatcccttactgaatatactctcttcactcgtggcaaagaagacacattcattgcattgcttgtctatgttcacgacatagttataacaggccccaatattgcagctttacatcaaatacaagacactctgcatcagaaattcaaattgaaagctctcggccccttgagatactttcttggttttgagattgctcgaagataagatggcttatgtgtctcccaacgcaaatatacctttcaattacttgaagactcaaaggctacatcggctgtaaacctgctaaagcacccatggatccaagaacgaagctcgatgatcaacaaggggaactcctcaacaacccctcatcttatcgacaattggttggcaaattgctctacctcactctctcgaggccaaacattacatatgtcgttaattgcctcagccaattcatgtccagtcctagaactacacatatgcatgctctaaatcacctccttcgatacctgaagggacatccaggacagggacttttgtattccccaaactcatccttacacctgcgtggattctccgactcagattgggcttcatgccccatcactagacgttccacaacagggttttgcatctttttaggagattgtcttgtctcttggaagataaagaagcagcctaccatttcgaaaagttcagctgaagctgaatatagagccttggcaaccaccacaagcgaaatcacttggctccaatatcttctcaatgacttgcacataccacaaagactcatgctttcatttattgtgacaatcagtcggctatacacatcgccaacaatccaacttttcatgaacgcacagaacatatcgagctcgactgtcacttcatccgcgacaagattgccaactccaccattttgcctcattcctgtttccagtcaactccacttgctgacacattcactaaaccattgccctcacattactcaactcccatatatcaaagatgtctgtatatgatctataca

SEQ ID NO: 228611 - DNA, 5073 bp, Cannabis indica
cattgcttaaactatgaagagaagttttttcaaatgcacaggtgctagaaatcaacatctgagggcttaccttcaattttcaaaacggaattatgcagttcatcatttttcttcttcattgaattctccattacaccatttatcggttttgaaatgatagatgcaccatcaggtggtgcacttttcattatatcacaaacagatttgacccagttggaagtcacatgtgatttccatcctagtaaagaatgaattgtttcagaaagtttgtgaacaggttttctagactccatggtcttgtcttctgaactcagcatactattgaagggttatttgctcctttgtctatgtggaactataatctgcaactgactgtttacaaaaacaaatgaagaagtctatttcttttcctttatatgtagaaataataataatgaaaaaaaaaagagagttacatttccatgagatgctttaagtattgattttaaaacgattaagaagaaaggattcaactgattaataattcaaagtacaattcatcaatgcaatcatgcctttatatttcttgtagtgttttaccacgagttatcagtcttcatctcaacatttaaagaaaaaaaaaaaaaggctctcaaaaaatattaataagaaaaggggacactttacaccaccaaaatctagatagaaaatattgactattatgtaggcagagattgagcacaaagtttcaataacatttctccctacacggcatccagtcattgaaaggaaacaacttttctcaagtacatttctcccttaagactgcaaatggaagaaaaataaaatgaaaggccttctatattttagtcatgattttgttttatttttctttgcatctgtcttgtataattatctttaattaagacaagaatgacaagcaagcatttaatcagtaaggaaagcccaatattaaaagcttgaaaaccacaaggaaataataataaagggcaaaagaaacaccaatcaaaagacttaactttatgggcgaaagattaattaaggaaacaaaaatttatggaagtggagagtgaagaaatgcgaggagtgaaatccttaccaagaaaaaaaaaaaaaaaagatgatgaaaaacaacgtgataaatttatggagaatttggttaagtttgaaggaataagaaagttgggaagaggaattataaaaataccatgatttcaatgaaggaatatcagcagttcaggatgccattgtcttggtcgaagtgttcttgccacaacaaaaccatatccttggactaagacaaaggtcaaaagaattacaccaaggaactatatacttcagtcaaaccctttgaatgagcctatgccctttctcagaagaaatgtagtataataatataaacataaccacatatgaagcaaataatatgagagagagacaagagacagtgcgaattttggtttattgctcacaaatgacttaatggttgagcaagtatttctgttctattgaaattagcagaagtagaattaataataatagtaataatggtagcacaagcttttgtttttattaagatatcactaaaacccatgtgaaagcatcaggagaaacccacatttgtttcatatgttatgcagacaatgattgttggagtgttgcttattgacaaaaatacatctgatcaaatgagggagagagagagagttaagctgggctaggcttgactgaggacccataaaaataatgactatacaattaccaagatgatgccttcatttccatccacaaaagcaatacatcacattaaaaaataaggggaaaattcgtgtaaaagttttttaaaaatttagagctaagtcttcaaaatactttataagtccttttattattattttaatagatttgttaattgttctaaaaataccacctgttgatattaaattacgacataagtctttaaaaagttaatgtaaataagttcataatctcaaaaaattataataatagcccaaacttaagatttttgttagtccataaatactaaattgaatgctctgtttgttgcttctaaaaatactagcattaatattttattagtccaaatcataattttaatttaaaataacttaaaataaataaataaataattttcaaaactaattaattataattttttttttatctttcctatttattttttcattcttcttcttcttcttctcgtttacccccagcccaatctgcctagtctcaatctactctaccaaaactcaccaatttcccttaataagaggggccgctctagaaaaaaaaaatatgtgaactttaaactagaaaagccgaggtcaaataattggccaaccaaaaccctcctcccaccactacccatatttctttttctctaccggatactctatccatacctctcgttttcctagaaacataaagaagaaaaaaataaaaaagcttcatttctctccaagatcacgatcacggtcacgattccgattccgatcacaattacatctcttttttttttttttgcttaattagttttctgggatagtgaaatgaactgaggaagaaggtgaagaagaaggaatggtactgttcagcagtaagcttccaccaccgaaaagagtgggtagcaaatcgtaaaagtttataattttttatatataatgttttttaatcttcaagaaaatgaaataaaaaagttattaaattttttaatatttttttttatgatgtggaccaataaaattttgatacgtgacaatattaagaactacaaacagagctcttaaattgagcacccgtgaattaacgagaattttgagcttgaagacttttattataatttttcaattaagattaggaacttatctgcatcaaagtaaactttttgagaacttatactataatttaatatcatcaacaagtgatatttttagagcaaaagaatcaatacttataagagtctcgagtttgtagactattactgttattttttgagattgaagacttatttttcattaaagtgagttttctaagaattttcgccgcaatttctctaaaaataaaatggataccgaaagtaatattaccttttcagtaatttttctctaagaaaaatttaattttgtatttcataagagaaattctaaaagtaatattcttactataaaatgatttcttgtactcttttttttatttggcaaagtgatttcttgtacttgaataataataatgataataataataataataatataataataagttataatacaaaagatttgagtatgagaggtaaaagaatgcattacattagatatggaagtggaataaattatagttaatatattttatggttatgatattaccaaccaagatatgactacattctatatagaaataataaacattcatgtgttggatggggtcccacaatagtatacgatattttatgttttgaaacctacgccaacatagaccaactcatgggtcctcccgataattcaattccaacttacgatgatgacccagaaaaaaaatattattgaacaacttgctttctcttattgaaacacatactaatcaaatatggtacattaaatgttaaagagcactgtagtgtcaagcaccctcctacgtgtcaatatcgctattggtctaatttagtatcgggtctcatataatttaatataataatttttagggagtatcgctagtcaatcgtaaggcgacacgtcttaagggtgttaggcacagtaccaaatagcaatgctcatacgaaaatgctattgaaaattgtgttcaatgattattgagatgacaatttgatagaatttttccttttatttttgaaaaacactgaaattaatttagatttatatctcaaattaccaagtgatataaataagatttgctattatggacacattccctatgtgttttatgaataatgaagagcaaaaatcaattgactaagcacgaaaaagtttcttctccattataaatgacagtttgtacttgtatagtagaatcaatggaaagagagtttcaactgaatctggacatgactttatatgtatatagtaaacaaattctctataaagagctagtatacatgtaatgtctctataactggcacaaaaaaatgattacttcttttccccatgaccctcttttctaatgattgtcataaaagtgaagaaagttaaaagcaatgagatgttggaagaacttctattaaatgttggtataatatttgttttccagcaaaaaaaaatgttggtaaaatattttcttttttttatatatataaaaagatattacattttcacaaggagagagatgccaacttgaaagatgaccaactttctattctttttaactttttaaggaagaaagtcctatcataatccaaactataactcttgatctataatctacccaaataccaagttttggttgtctattagaaaaacaacaagaaaagtaagagtaggtgtgaatgaaaagaaaaataacaagtaaaatattaggtgcaacatggcccctactagtacttactaatagggcccaccagtaccacattacaaggcccaattgtacgtattaggcaataggccttacaggaatcatcttaaagcttcagtcattgcgattggattgaccattggcctaacaacaatagtctcctattcccctctacttatacaatcatcaaagtcctttatgcatatgtaatactagtaatcaccacttccatagttggtttggtgaatcatgttgctttctcatcaaactttaatttaatcttcctccaaatcagatgctttaataaactatttaacaacaaattagttgcttaatggtagagagaaatgcgaaagaaaagaagaatagtgaatgaaaagaattatgaaagcaaaactctatacagtattatatgataattgatagagattgtaacttgatagaaaaaaaggttaattaggagttttacccctccaatttcgacacgtaccaaatcatgccatttgaacttttaaggtcgttaaa

SEQ ID NO: 228612 - DNA, 2165 bp, Cannabis indica
agaggtagtcatcataaccagctcttttttctgcttcctcatccataaggagttctcctatgtactcgcaaataaaaccgcctaaaggaatgcattctcgagatctcaaaccccatccccttaacttggttttaaaaatttcaagtttaaatttgagaccgtgctgactcactctattgtggcaagaaggagggcatttgcaagaaggaccacactcataaagaaagagcttcccgtcaacagcagtcccatttgagctatatggcatttcacctccattcttgacagcacaagagcaggttatagaatctgagcatccatcaatacagtcacaacccttaggaggagtaatatggcaccaatccggatacaccaaattggttgcataattaaaagatggaggtttctcgtcatctatagtattcacagcacgtattggaattagctccttcccgtgagaaatatcatctaggcaaacacctttttttgattcagatcttttacgtctcttcacacctttctgtgcagcctttggttcaccaagaatactcttgatggctttgtatcttgaagatggaggtctctcatcaactttagtattcacaccacgcattggaatcacttcctcatctagacaaacaccctttcgtgatctaaatcttttacgctttacacctttctgcgcaacctctatttcaccaatactcttgacagtttcatcgtttgaaggtggaggtctttcaccatctttagtatccataccacatggcattaccacctccttccctagaaacatatcatctagagagacacctttatgaacattagatttgttggttagcttcacttcttgggcagcttcaggttgattaggaaatctctcagcttctggtctttcatctatagtatccacagaggatgttggaataaccttcccctgagaaacatcaccaagaacgacaccttttttagttttcaatcgtctagtcctctcagtttctttacacacaacctctggctgaccaggaattctctcgagccaaaacttataaacaagattaccatgtggtcccgtaacctgcttataacttttcaccaaataaagcccaatgtatacaaatttcctgaatctcctcttatatggatcacaaccacgtatcaccctaataggagtctttagaaccatactattcgtcaatgcaaggtttccaccttcaagcttctgatcttcaggctttttatctgagtttgtcgtactacctccttgaccagtataaaccaagacactcgagtcatctaaatcatcggtgtggtcttcagatgcaactatactcgctgcaacattcttaccaccatgctttgaacaacttattccactttgagtatgcctatggagaccaagaatactaagttccatcctacatttgaatgcatcgccaacttcaactccagggacatgtcccaaaagttttaagtctgtgtttagaatctttttctcgtcttcaagtctcttcgcaatttgataatcaacccttctgtggcaaggtctttcttcctttgcatcagcatcttcctgcaagagcttccgaaacaaaaacaaaaactcctttactttatgtcgaggtgaactttcatcatcaccatcatgattgtcataaaagttatctgaaacaacagaattcttccaccgataatgctttctctttgggactttcctttagtctttctcccacagaagtcttgctctcaagtacttccatagacccttcatcaagttgaacacacccttttgattgtttcccatcagtcttcattgtctccatcaagacttcatcatctaagtttttgttatctaaagaaacaaatgattccaaagacttcttccaaggttgggctgcatccttatcactactggtctttgtcttcaccacgaatccgttttccattctatattcacacttttcttctctaagctccttattaatatcagtcttcattgtctcaatcaaaatttcatcatctaaatttttgttattcaaagaaacaaatgattccaaagacttcttttctggttgagttgcatccttatggctggtctttgtcttcaccaagaatccattttccattccacattcacatttttcttcaccaagctccttattaac

SEQ ID NO: 228613 - DNA, 1882 bp, Cannabis indica
caagctgaaaaaagtgcaaaaaaatatcaaggaatggagtaagtcggtttatggaaacaacaaggtggccgaaaatgctttagaaagacgaatattggcattggataaaatagaagggattaattttctggatccatctcttgcagaggataggagaaatctcaaaagggagtggcagcggtatgtatttgaagaagaaagaagtctatggttgaaatcgaaatgtaaatgggcaaaagaaggggatgcaaactcacgaatgttccattaatttattgaatgcaaggaaggcaaggaacactatctcaagaattgaaaaaactgatggctcgacacttgacaaggaggaagaaatagtagctgaatgaattgatttcttttctaagttatatacatacgagaggagaccagggtggggagttgaaggcattgagtggcaacaaatctcagaatcattagctacagatttagaaagaccttttgaagaagatgaaataaaagaagccattttcaaatgtgaaggtaacaaagcacctagcttggatggtctcagtttggcttttttttttcagtcaaattgggaactcataaaggatgatcttgtggaagtcttcaaggctatttaaagagagggcagaattgagggaagcattaatagactttcatctgtcttataccagaaaaacttaatagttgtatggttaaagatttcaggcctatcagtcttacaacaagtgtctacaagatcatagctaaagttctagctgcaagacttcgaggtgtattgggggaaacgattttggtgacacaatcggcctttgtagaagggcggcaaattttggattttgttctggtggctaatgaggcagtggaagattatcgatgtcgcgataagagtgggttggtattcaagattgatttcgagaaagcttatgactgagtagaatgggttttcttagacctagttaggacaaaaaaggggtttggggaaacttggaggaaatggattagatgatgtatttcctcaacatcattctctttattcgtgaatggaagaataaggggaaacttcaaaggatctcggggccttagacaaggtgatccactttcaccttttctctttacgctagtggtagatgtacttggaaggatgattgaccaagctatgaattcaagaattttctcggagtttttagtgggcaaagataaggttcacgtcaaccatctacgattcgcgaatgatacgcttctttttgcaaatgatgaggcctgactccaaatactgacaagaattgtaggggcattttgtgctgtcttaggattaaaagtaaacatgaataaaagccaagtgctggggatctctatgtatgagagtgtggttgctttgtgcgctagtcagattggttgtgaagtggggaattggcctatgtcatatcttggaatccctttaggtggctcgcccaggaaaagttgttttgggcacttgtcttggaaaaatgtgataaaaagcttaatgggtggaaagcatcatttttatctaggggtggtagacttaccctggtttaatcgatactgtcatctcttcctatttactatctctctatgctcaaagctccaaaatcggttttattgtcgttagaaaaaatgatgagattttctatgcgaaggaggagatttaatgggtggggatcatttggtggcatgggaggaggtgtgtagacctaaacacgagggaggtctcgctattggtaggttagatatgaaaaataaagggttgcttatgaaatggctttggcaatattcattagaattaaattcactttggcataaagtgatcaaaagccgttatgggagagcagaaaattgttgggatactaaatca

SEQ ID NO: 228614 - DNA, 1380 bp, Cannabis indica
cagctcaatagtataatcatattttattagttgccgaaaacctcgatcaacaaaatcaattagtaaagtttcaaacaatttcaaaaatacaattgacttaaacaagattaggctccctctaaagctctgctacaatcttttgtaattactttgccaatttgatttctgaacatcaccaaacactgaactcctttcgtctttgatgtgtttcctcccaaagtaattcttaaacaagacttctcttgaagacctttctcgtgttcaatgaagttcttcaacttattctaagaacagaataataacaaaatcacaatgaccaaaaccttgttgaacacaccaagattttacaaaagaaaatatctcctcacaaacgaggaattgtgaggaattgttgaaaccttggctgcagaagaaaaacgaggaattgttgttgtagatttgggcagtgacacttcaagagatagatcatctagttctttctcaacagttgggatgattcagcatcatcatctacaatagcatctttgccataaacattagctgggattagttaaataacaattttgctaaatttttgtaccattaattgcttattcatgatggagcgtaaagtttttttcttaatgctctgttttatgggatagtggaatagttaaataacttatctttctgagtttatatatatatatatatgttgattgggtcttctaggttgagtatggtttgattttgcaattttattcttatttttgtgtttagtttttctatgtttaaagtgttttttttggatctatttttacttccattaaagaaagtcaataatgacaccatgaatattaggtttttacattacaggtttttagatgaaaagaaaggatttgtgctaggtcatggtaatgatgatatattgatgatgacacaatcgatttgtagtagtatttatttttattttagttgagaaaattatacttatgtagttatgttggtatcttaaatatatgtttatttattaacttttggacaattataactatattatgcatttataattagaacaatttaaaattatattttattgtgtaattatttataattaagctttcttattttaatttaaaaaataattaataaaatttttaaattaaataaaaaataaattacaaagcacctggcaaaagtcaaacatccatctatcaaaagtaatttttaccagggcattaatgccctggcaaaaataagacctttcccggtgcacatttgcactgacaaaagttagacttttcccagtgtacatttgtgctgacaaaagtaagatttttccctacgtacatttgtgatggcaaaagttagacttttaggaaaagttatttttgccaacgc

SEQ ID NO: 228615 - DNA, 662 bp, Cannabis indica
atgtaaattttccattataaatggggaactggagatgggcccatgtgggccgctattcattcctcacctcatctcctctgctctgctgacccaccaactattcaaaccccattttagttgagaattagagtgagttcattttttaatcaaaatatatagaacacccatatttctacactcaaattatacaactatatataaagactgaagtttatctctatattttcaaaaaaaaaaaaaaagaaaaagttacacaactgtaatttttttaaaagacacttttatcatataataacgtgtatttaattttgactagatataggactataatattttcaattgtgtcattaaaattagttatatatcatgaaaagtcagcatataaattaagagtatatttttctttacaattatattaagaataattatataagatacaatgtttttttgtaaaatatttacgttcaacgaatattttttatatatttttatgattttttaaaaaataacacgaaaataatataaaatcaacaagaaatttacataaaagtaacatgaaaataacatcaaaataaaaaaaaaatagcatacagataacaaaaaatcaacaagattacaacaaaaagaccgtattttctgtaaataaaataaaaaaaaatcgt

SEQ ID NO: 228616 - DNA, 3096 bp, Cannabis indica
ttttgccagaccaagattcataaatcttaatactgtccaacagagcttcagccatcttcgtgttatcacgtgcaaacaggatcgtttcatcagcaaacataagatgactaatagtcggggccgatctagaaatagatatgccatgtagaatgcttctattctgctgcataaggatcaactttgaaaacacatcatgacaaaggagaaacaagaacggagaaaggggatctccttgtcggagaccccgcttgggaaagaatttttttatgaggaactccatttattaatactgaatacgggaccgtgcgaacacattctataatcaaactgcacacttgactatcaaacctgttacctctgaggacttcttcgaggaaattccattctattctatcataagtcttgagcatatcaagtttaatcgacataagccctccctttcctttcttcttctttattgtatggaccagttcttgagttaaaataaatgattctataatccatcttcctgggacgaaggccgattggaaaggggatatcaacttatcaataactgtcctcagtctagtagcaatgatctttgaaatgatcttgagagcaaagttacatagaaaaattggtctaaatttatcaacaatgcaagcattctcttctttggggatcaaacaaataaatgtgtaattacgccggtgctccagaaccccagaagaaaagaatgtttgcaccatttgagtcacctccatcccaacaatctcccaataacgcctgtagaaacaccccgacattctgtccggccctggggctttcaacatatgcatagctgccactgtatttaaaatttcttgttgcatagaaacccttttaatcatctcattctcagaatccaaaaccaacgggttaaggaattcatgaaaggtctcatcgatgatcgtagagtcgaagctatagagctttatgaaaaactcgttgaaaacatctccaatcttttttccctttatagcccaagctccattattatcctttatggctgaaatctcgtttcttcttctaatgattgttgaggcatgaaagaacttttctgtcccctaattcagccagacctctctcaatttttgtctccaaaggctttctttacaaatctaaagctccaacattttatgttgagtagcagcttcctcttgctgaagatgatccaaaataggctgactttgtatccaaccgagtctattctttgctgcttttatcaacttatcacagtcaccaaaatactccttttttccaaatttgaagagctcttctagtgtcacttaatcttactaaaattctatcacttctttttccctccaaatcccaagcctgcttgatagaatctacacacgatggctccctggcccacgcttcaaaaaaatgaaatggcttaaatcccctatgtctgtcactaccggtatccacaaggatatacccatggtccgaaaccgaaattggcgcattagtaaccttagcatttggaaaatgggccagccagtcacccaaaaccacgacacaatccaatctctctctctcgttaagccaccagaaaaagtattgttttgccaagtgaaatggcacccgtagaatcccaaatcaatcccccagtatggtgcatgaaattcaagagagtactcatatcacatggtgatactcttttcccctctctcttttcccaagagtgagcaataagattaaggtcgcctacaatcatccatggcatggagcacttattaatcctcagtgccaagctatcccaaaatgatattttctcacgatcgtacggtctaccataaaccgcaaataatctccacttaaaactagttaatggatcattgataacgacttcaaagataccatcagtagcttctgccactttcagattaatatcattattccaaatcaatacaaagcctccctccattccaacagcaggaatcatacaagaaaattgataccccagagctctttcaatcatttttctcccctccttgttggtcttagtctccatcaagaagatacactccgacttgcatcttcttacccaagcatgaagggcttgggttgccggggctctcagcacacctcgacaattccacgataagagcctcatggcgaaggagggagcttgataaggaccacctcctcacccagttgaaatttttgcacctcatgaatagtaatatcaaccaagttattttccaattcattgttactcgtacctggcccttgaacttcaagcgtatccaagctcctacgaatcattcgattactggacccctatcttgtggagcttcgtgtacctcccgagcccccaccacgttttctttttgtaattctttctcttagacgtagaaccctcaaaactaccactgctgcccggagtgaaagtgttgatttccaggggaggaagaagcgtagcaggcgtagaggacgttttatcccccaggtttatgatattgtcccatggagcaatgacagggatgatggtcatgctagccttaatcttcttggccctagaaagagttgggccaggtttggagaactcaatgttgtcgtgagtaactacaatgtgggctaggcatttgtcactttgggccgggtccatgccatggcctctttataattctcctttatagatttatatagatagatagattatatatattcaactaaaattaataatttaaataaaaaatctaattttttttgtttgttaaaaaacttaaaagatttttttatttaaatatttgacaaagattgaaaaatatatataaaaaaaaaactatatgtattttaagaataattttagtaatcacacatattaaataaataatattaatcacctgcatataaaatatataatactaattttggaagaaacaataataaaatatatatataacttataaatttaacattcacaatagtctcgtataacttaaaatatataaataaaatatccttaaagaatattattattctaataaaaatcttatattaataaattattatagttctaattattttatataaataataattttatgtatatctttatatattaaa

SEQ ID NO: 228617 - DNA, 1730 bp, Cannabis indica
taattatataataaattagcttaaatgtatttttttaatctacataatacttttaccaacagttataaacagtcatttaaagagatttttcccaacagttgtaaaccatcatttaaagtaactttttccaacagttataaactgtcttataaagttccgcatttttatgacacccacatagccaacggttttaggaaccgttgggaaatagtataaaagacagttataaaccgttagaaaaagctaattttgtagtagtgagtgcactagaaaacttagctaaccatttcttagaggcttgctttaagccgtatagagatttgtaattagatattgtggtaagactataaccttgatgtagagtcagaaactcttccttataaaaatttctatgagaaaggtattattaacatctagatgatgaagaagccatttttttttttgcagctagagctaggaccactttgatagtgactaattttaccactaatgtaaaagcttcattgtagttgatgccctctagttgagtgtgacccttagctaccaatctagaataatacctttcactagaagagccatatgaatatataatacttgattttatatacttattgtcatcccaaaacatgtttactaggggtaaactcataatagaatgtgcattgttctgttcaagagaagagagcttagcttgcatatcattttctacttaggaacactagctgcctgactagaaggaattggatcgggatgactagaaatagccagtatggaagctttgactagactcgtgagatggaaggcatagacagagaggaagtaggaggtgagggctgaatgtatcaaggaacaataataatttgagaggcaatgtagaggtttaatactaaaaagatatacttttggtgtcggtttgagttttgcttaatttaaaattttgactctatagagtaccctcaagttgaggtatcgatctaaaaccaacatttaaaaaatccaatggtgtcggttagtaaaccgatacaaaagccaaaaccaagacttaagaaaattagaagattttttttaaaacgagataatagaggatacaaaatgattttactcttgttcttccctcaaaacccaaccctgaaatcattttttattccacccaaagacccttgaagtgaaaatatggtaataatgtgaattgattttctcagcttaatgaatgttgagatttggttttctttatatagaaaaagatggccagtggccaattacaaaacgtgagcaaattgctcattacagctggcaaaattataggtaaaagagaatcttttcaaatacaatgattggcatataacggtaaaattcttccttgaattcagcagcagtaaatggcattgtgacacttgtgcattggctggaccactgctataacagaaaagattcaaaggatcttttcttgattcttaggatagcccagtagtgaattctctgcagtgcagagtacagtagtctcatgtgtactcctctgcttcattttctttaacatcccctctcaaacacagggggaattcatgactccaagtttttcgacaaggaaatgaaaccaagagcttgtcaaaccttttgtcaaacaatctgccacttgatctgaggatggtatgtatcttacctccagttcttttctaagcactttatctctaacatagtgaatgtcaatctcaatatgttttgttcttgca

SEQ ID NO: 228618 - DNA, 738 bp, Cannabis indica
atttttatattatagatctcattcttatatatttttttttttggtagaattagtagataatcttgaccactataaaccagctgtaagggtttgagctggatttccttaatataatttggccaaatcataatataatctaatactagtaatcattttctagtgagccgcgttactaatctattatttaagtaggaatttgagggaatttgaacccttgatgactccctaaacatgattttccttttctttttctaataaagaataaaagacaatactaatgtaatcagtaacatgtctaatgaaatcatgatataatattttaattttaaattaaaacataacgaaaaatttaaatttattgcataatcgtattggttgtttggtcatatattgccatcacattaataccattaaaacacagaataataaattaaatatttaaatgaaaaaaaaacattgttaataaagaaagaaatagataggaaaagttaagagagagattttttttttgtaaatggagagagagagattgagtgaataaaaaaggtgtgtactgtgtaattagtggggtaaaatttgtgagggattttcagttttagagattttgagttacagtcaaactgtatatcatatttatatgattgcagctggcaagagctggctctcataagactaaaccccaatccactccatttctctctgtctctcttaggtgtctccttctctctctctctctct

SEQ ID NO: 228619 - DNA, 813 bp, Cannabis indica
ttggatatccaattttttataattagattgaatttgattggttcatttcaattaaatcagattggatcttgtccaaccctagtttgtacacttacatgatggattatgctactatctactttttaatggaagattttggtaacggtgagatttatctcagcacgtgcttctcgcgacttacaaacacatgatcttaatgtgtattttttatcacatacatgtgcttttcgtgacgaaaataaactacatgtgtggattgaagatatactcaacaattattattttttaagatatttgtttaaaatattattttattgttattttgtattttaaacctaacatcactatatttaagggaaggtgcgtcttgagttgagagatttcaaacccaatagagttctagagaaaaacctatataaaagtgatattaattgtaaaggaaaactcattctcacgaattcctactatcttattttaaaagctcacttgaggattgaactctttgagaagataattctggagaactctcctcaagcattgagaccaataacaattcaataaccaccactgtaatgaccacatacttagaatatggattattaaggcaattagcattaattagttatattatgtgattatgttatatgtgggccctattttgaagaaataggcattagggttataattgttcaattccacaaattttattaaattctaagtgtattcagggtcgaccctgggcataggcgggataggcctatgcctagggcccacctagtccagggcccaaaaaaaatatttttccttttaaaa

SEQ ID NO: 228620 - DNA, 1845 bp, Cannabis indica
aaaataaaataaaataaaggttagaatgttaaaaaaaaatacactaaattagtgtagacttaaaatcaaataccattaataatgtaaaatttggtgtatattaatttggtacatacatcactcacatgagatgttctaaaatagaaaatttgtaaaatatttaaagaatcaaattacaaacatactacatcacatgtttttatttttttttattttaaagtttattgaaaatttactatatatgttttacatttctaaattatttattgctttaaatatattttattaattattttaggtttgaataatttttttattggaggatatgtatatattaatattatatattcaaaatgaataacatgtattaattttttttttttaaaaaaaaaagtggaatttcggtgattattttaaaatttgttatatatagtgtaacataaaattttgatgtaaaataaaaaatctaaaattttagagatatattttaagtagagaaagtgaggagagtgctctaatttggtgtttgcattgtagatctcttaaagctgcccaatccgcccacccccacttttgttcttcttcttcttcttcttctggtcctcagtgcgaaaccatttcctcgcttttgggaaaacctacgtgaaaaaccagttcagtaatgttcctctcttggtaatattataaatttattactgatatttttgtttattggataattgcatcttaaattttgttggtatggtttgcacaagatttactccttatttaaaattcttgaggtttattattataagctgattcaaatattttttacatctgagttttgttttagaagtgaaattttctgctcttaattgatggttgaccttatttctcatttaaattatctgatagtttttaaaaaccaggagaacgaactgggatagtttactttgtgacatgaatttgtaaaatattgcgggctctgcagttggatgggtgttagataatagtcctcttcaagactaaacaaatctccgaaatgcattcttcgtgacaatgtcaatctcctaattgaaccaaagttctattttctcaatccatatctaacaatagcttcacaattacatattgatagtctttcaccctctttatatattactaataagcccctacactatttcatagtgtaacacttttccatagtcccactcttaaaaatcaccttgtcctcaaggtggtaaaattaaaaatcaaatacaaaaaataagcataaatataagagataaaaaactaatttcagcccaaaatgtttttagcccaaatgataatagctctcttaatccatttgtgcgctaggcccaaatccatagtaaagcctacgccctagggtacctgatctgttgtcttcaaccttccagccacctgttttttttgttgaagccatgaacaaccagtgagatctccctcaattgaagcttcattcgtactcaccatttgaaccacatatttatttgcaaaaataaacagtaaaagatgcatatatgtatacatatattttatttttttctacaaactagtgaatacacagccaggatcgtcgtcgtctctatttgccattgcactctctgagatctggggcgaccaagcttctcgtcgtccgccagtgacctttccgcttcgttcatcttcgtcaaagttcgttcgtcgtcttcgatcaaagatccattgacgttcccgatcaaagatccttctccgatctttcaacgatgtgtgaatcgattcccatggtgaaccaccattaacaccagacacaatctctcgtagcaccattttacgatccacaaacactccactagcatc

SEQ ID NO: 228621 - DNA, 1467 bp, Cannabis indica
aaatatttaaatatatatgatgaaaaaaaaatatttattaatcaatttttgaaacaactaaaagatattatatatatattccactatcaaacatatattgaatggaatataaaagattgaaaataaataaataaatagtaaactaccataaattggaagagattctaggtataaagaggtgggtcattaattaaaaaaataaaaaaaaaataaactgaaaaggatttaaatttaaaaataataaatattttagcttttatttagttaggccttgtgcaaggttgggacctgtgcaattgggttaaagccggccatgtgtctttgtcataaaaatttggagttgtgtggagcaagaatgtgtaatctgaaggatttaaaacttgggtcacttctcatgtttatatctgctatttaatattattcatttgattccaatcaatgtggttttttttaatttctgtctatttatttggtcctgttttgaccagcttgttaatctaatttagagttttatcagccttttgttgaatgacattactaactatcattaagaacaaacctaaagtactgaggtcttgccagctggcatgcgtgagagtcttctctcaaagttcgaaggtttttctgttacactgtttcttgcggctgggttttacgatccgattattgcgtgttcattggtggagcatggttttgattgtgtagtttcttgttcgtatgatcactgatcttcagagtctcagggctgtgttttggcctgctttctctcaagttctgggtttcttatgtgcctgcggctggtgttcttgcgactgggttcgtcggtttttgcgtgttgcgactggtgttctgggttcgtcggttctgcgtgtcgtgtttgtaggttccctcgtcattcctcctaggtttccagcgggctcatggttgtgttctgggattgattggaatacgtcgactgcgtatactccctcggtgacgggttcctgcgggttgaacgaacgttgatttctgggcgtgcgtccgtttggaggtaatatttcattgacgttttggattgtttggattgttttgtgaagtggactgtgattgtttggattgcttggattgcttggattgttttgttgcgactgggatttttggattgtgttttgtatagtggactgtgggttgggtttgtttatttgggttcttgcggctgagattactgggtgtattttttctggtttatatggcttcgacgagtacagccatggatgacatggagtttcaatatgggcatataaaattggatgatgaggaagaatgtggttttgagattgaggatgacgttgaagaagcagttctggtggatgatcgttggtgtttggtggggaggtttttgaatgcgagatcgatagattttgaagctatgaaacacacgttggcgggggttatggaaaccgggcaaggctgttgtcaaggattggg

SEQ ID NO: 228622 - DNA, 1631 bp, Cannabis indica
caaggcacatatggcaaaatgacttttttgtcctcacaccataaaataacctaaaaggagtacaaagggtattttgggaaaactctaaattcccgactaatcccgacattcctaatgtctaagtaaaccgccccactatactaaaatattagattgtgattctactgagccctacaccgcgttccatgttgtcgggcaccgcaaatacaaaattatgaaattttactatatgacataaaaatgcattcagaattcaaatataacaacataaataattatttaaatatctataaataattttcataattaaatcttaattatctgctaattttcaaatttaaactaagtggtctttacatggtctgtcacttgaagtcccgtttgagtgctcagtccttattagctaaggtgctaacttgaccttcctcttggtgagttgtattgccacatggcgatgactttgcccatgtaagcaataccacgcaagtgaacaaaaatcaaaataacaatataaataattaatagttaataatactaataaaataataaaatgacataaaattaaataaaagaataatatatttatggagtttttactattttaggctaatactaactaaaataaatatttatacaatgataaagagaaataaacatttatactatcttataatttcaaaaatacaatttacatatttttttatttacaaaatattgttgtagataagggcaacatgcaaaaggagaaaattagatagacatgtggcctatgcgggcgagtgaaactcacacgcgagtaggggaccaaaccatcaaagttgcctgacgcgcccataatattacaccgtcagaacgcagcagtggatgccacgtggcaagtttggatgaagtgcacttggatgcgtgttgggcttcttttttaatacaactgtaatgcaacaactaattagcaacgaaacaacaacttgacaacaaccaaactttaaaatacaaatcaattaaatattgattttgctaaggcaaatgaaaattatgaaaaaaagcaacaacctccaaaaaaaaagtttataaattctttacaataaatataaaaaattatgaacacataagctaaaaaaatacttagttaataaaaactatactaaaatattactttaaaaaacctaatttgattaacaaaaatatgtttaattaaaaaatatatctatgaaaaaatatgcttaaacacaaaatcaactaaaatataaatgagatcaacttgataaatttactataatacaattctaaaaagttaaaaaatcatttaaaactaaacatatattcatttttctttaattaatgacaagctacaaaacaaaataaaaaatataaaagtagacgaaactacacatataaacccaaaatcaattttaaaaaaatcatcaactaaaaaaatatataaaaaaaataaatgaaaaagatacataataataaatgcacaaaaattgaaaaatcaattaaaaaataattaaataacaacttaagaatatgttaatatgaaaaattgagcttatgttttttaatcttttgaggcaactaaataacaacggaacaacaacaagatattatcatacttgtcgaaagcctcaaaa

SEQ ID NO: 228623 - DNA, 786 bp, Cannabis indica
gatgacagagattggcagtaatgaagtttggaagttaggcacgcaaagctataacataaacaaaagtagcaaaaacgattatggacacgaccaaaaaaagcagtgaactaaaagtgttgggtgtcttttctcatttgggtattatggtaaactcttcaaatggtaatttttcaaattttcttgcagtattggctggtgggcaccgtcctatatctttccaccattatcattttcagccctattttctcctagtgtttgttataattagaattcttgcttatttggaaaatgtacttgatgcgtaataggcaaataattggaaaatattccagatctcagtttaaggagttttagaaaataaatatatataaaccgtaatattagaaacaaacccaaattcaatgaaagcttgttttgttggcagaattcgagaccaaaaccagctaaatggagaactcaacacaaggtgcaaaagcaattcggaatgtataaattattataacataaaataaatcttgtgtaaaaaactacttaccaaaaaaatagtagttttatgtaaatttttctataattaattacatgtgtaacacattcactagcatctatatttatatataatggtcccttttgaaacatccgataaaattggaatgatacataaaaaattagcatgggccctacgcaagaatgacacgcacaaatggagaaatatttatatataaataaagtaaaaaaaaaaaaaaaaaaaaaaaaaaaaaaaaaataagcaggatgcgtttcaaattt

SEQ ID NO: 228624 - DNA, 1017 bp, Cannabis indica
aaactgatgattggtaaattaaatcaatttaactgatatatacaaatggacatgatgagcagtgaatattggagaaataaatataataaataaaaaaaatgaaactatacgagagagatgcatacgtacctgatgagggtggtagcagaagaccaatattggttgtggggtgatctggtagaaggggccaccgtggagtagactcggctgggtacgagttaggttgacaaagatgatcatgacgtttgcgctggctcacagccaacaagtgaaagtctgagtctaaattattggacccatcgtcgggcgagcctagtcttatatcctcagacatatccaattgcattaactcactaggctcagcagctgctacactgcttctgctgaactatcttgggtcctccatgcggcctatttcggcctcagagtctgattcaccgacctcctcatcctcttcttcatccatctcatcctcttgatcttcatctcctcgtcttctttgttggtttcctcgatagcagggccagcccccgccggccccgagtaaatggcggcggtcattggctgagaatgaaatcttgggttgtctgatgaagtggccgggtttgaagtggattgctctgaaagtgctggttttggcgggagagggtggtggtctatgaaaaaagtcttaacatgttggataaacccaaggtcttctttaacctacagtaataataaattattaattttaataaagtgatacatcaagtttaaatagtgggattagattggattaaaaaaattaaagtattttgtggctaaaccctctcaattattatttaatttgtatttaattttccaagctcaaattttggcgataaaacctttaaactacttaactagtggaaaatttaaggtgtcatccgattgactttcaccataaactgtttatgtgcatactcttgtacacgtgacatgtttatattggtatacggaatattattatttaaaaattattttcaaaattcatttaaa

SEQ ID NO: 228625 - DNA, 1271 bp, Cannabis indica
tcaatgcgatcatatgccttgcttaggtcgagctttagcatcatataacccgtcttacccttacacttacatttaaggtaatgcatcacctcaaatgcaatcataatattattcgagataagacgtccagggataaaagcagattgattctcaaaaataacaccaggcaacacctttttcaaacgattagcaagcacttttaaaataactttacacaagacattagacaatgaaataggttgtaagtcactcatagtagccacatgtttctttttcagtataagcacaatattggtttgatacatacctttaggtaaggagcaggaattaaaaaattcaataacttggtgcacaacatcgttgtcgacaatatcccaatattttttatagaaccccagagtcataccattcggtcccagagatttgtcagggtgcatttaaaacatatcttttttgacttcttccaccgtgacctgctgtaataaaccaacattctgagagctagaaacagatgacaatatgctagccacaacaccatgatagctagagcttgatgaagtaaaaaatattagtgaaatagtccacagttacaccagccagaacccctttccaatcaacccaagcactcaaattattcttaagtgaatgtatcaaattgtttttcttgcgagcagtagccttgcgcgtgaaaaaacttactgttttaattgccctctcggagctaaagttgtttagggcgttggtgccaaaacacttcctgctaattatggatttccccaagagtagcctgagcaatttcataccgagtaattgagtcttgatccctacatcttttcagctgctgaatttctttcttacatttagcaattcgctccttgaaattaccagtataatcacggccccaaatcaccaatttctcgccacaaatctaatcttctccataaccggccttccctcgcacaactcctagcaattttgaattacttggcgacataatggttcacagagccaagcatttttgaacttaaaatggacgaacgactgagaaaaattttgagctgaaagttgatgcaagataggacaatggtcagacacaataacttcaagattgaatagttgggcagacatgaatctttgaatccagtcctaattggccatagcacgatcaaggagaacctcaatccaaacattggttccccgacccctctcccaagtaaatggatacccaaaaagaactaaatcatgaagatgacaatcctccaaaacctttt

SEQ ID NO: 228626 - DNA, 1359 bp, Cannabis indica
ttccaaatttcttaaaattttgcaggatgtcttaaataactataacgtatatgatcgtgagaaaaaaattgactaaaaaattattttgagtactaaaacagataagggtgcattaatgtatctattttaaggaggtgcattgtaaaatttcccaaaatcttttaatctactgaattgttaataaatttaatgtgtcatttgattaactgttactataaattatatacttttatacaaatataaacatatcatgtgtacaaaagtatatatataagtagtgcatgatggcagttaatcagatgataccttaaatttactaataatttagcaatttagaaaattttaccaaaaagttaaatgcaagtgaaacgataattagcaggatttagttgccaaaaactcatatgattataaatagggtaaatagcatcataagtactcagtgtttgtaaaattataacttttctctaattttatcagtatagtttttttttcttatttcgtcagtatagattttttattcttatttcgtcagtatacattttttattcttatttcgtcagtatggattttttattcttatttcgttagtatagattttttttcttatttcgtcggtatatattttgttattgtcttaaataagacacatataaggcccaagttttaaattatcgggtctaaacagaaacatgtagtatccgttattttcaagtgttcttttaataaattcaaaacggagtttgaactaatgaaactagagaaaatttaaaattttacaaatattgtgtatttatgccactagcaataaatattaattaggtttatgtcgtttttaaacattattgttgatgtatcagtgtctcatgattcgatgagggaaattggaaattatatgcatacattttgtgcatattaaatgttttgaacacaagtttatcaaaatttaaaaaatagacacactttatattaatactcataatacccttctcccttctcttctcttctaacttcaccattcatattccccattcttatccatattgatgggtgttcgatggtggctcgatgctactaattttttttttttatgtttttaataataaaaaaaaaagtagcatcagcctaccatcagaccatattctaaatttataaatgttaagctctattcatcaaactcgccaagaagacatcaagccacccatcagaccactaacaaactaccatcaaaccactatcctacatttataggtaggatcgggtcaccactggactttcgtcttcaacctttactcattttaacaattagaagacatcagactaccatcagacctggcaaagacactacgttttttgctc

SEQ ID NO: 228627 - DNA, 699 bp, Cannabis indica
aaaaaaaattatatgtattctctacattttttttccacactaaaattaaacattacaaacatagcataaataatatatgataattttagaattctaacatgctacaagcttaacagttttgtttttgagcatttatattcagtgatatttagtacaatctaaataattagagatattcaataataattgttatattaaattatgtgagacataattatttatactaataggacacttttataaaatattaagtactattgatatttttttgtcacttcaaataatttattgaatttttagaacatacaaagaaggtttgagtgtgtgataataattttttaataaaaaaagtaaaatcactcttattttttttcttaatcaatattttggacttcgatttctacctggaccttgagatctagacttggacaccagacttgaacccgacccgactccgaacatggacacagtcacagatctagactcaaacccgaactcgaacctagatccagatctagtcctagacccgacccgaaacctgaactcaaactcgacttaaataaaatataatttattaaacacaattttattttctgtttttaaaattaaaaaacaaaactaattatagaatacttacttttatttaggggaattaccccatatactattttttttttcaaatttacggtttgggtttct

SEQ ID NO: 228628 - DNA, 1812 bp, Cannabis indica
taacataatataacctaaaaatataaaaaagaaataaaaaagtttcttttaatattagtcgttctttttttataccgaaaaatatatgtttctcacatattaaaatggttattttattatttatatatgtgtaaaattctgaaatacattttttaattgaaaagtaactaattgatatcttattcacatcaaaagcaactaaatggttgctttttttcaaaactcccaaaaaacgaaaaatttctggaaacgagatttttccattttttttattttcggtaattgttttgaatttcggtatgtatgctgacgtggcacaacggtatttgtgcaaataattttcttaaaggtatttttataaataaaatcaattttaggtataatattaaaaaaccccctaaacttaaatatttataccagatactctttattttatattctttaaaaaaagaagaagaagaagtacatttataagatgtaattgtaatgtgaacaaggcaaccacttgaattaattaaatacaacatatattgatgaagtgaatgccaagcaatgcaattaaagtgaaaaatagattttaaaaaaaggattattctcacctaaatttgatgaagattttgattataatttaatcaactaattattataccttaaattatctatgttgggaaagctacccaaatgacttgttgtgaattacttagtacaaggacaatagatcattctggttaactaatctaaagacattttgaacaacaaattatatttgcaatgagctaaaagtcaaatgtatcatattcataattcttagattgattatggtaaactaaccataacatctattttgacataaataaaaaaaaatagatacttgtacaattcatatatatacttttaagaattatttttacttcagaaattttaaacagcagtaattgtgtttagcaccatataaaaatattgtattattattgatagaattaagtatcatctctcacataattacatttaatttaataattattatgaaatattaattatttacaaaatactatatataaatggtactgagcacagtaaatgtctaatattaataaaaatatatattttttttaaagatgcttgttgggttttaatttttcttttacaagtaattagaatttttgaggtggtggtgaatagagtcacatttgtttatacatggtttgacttttaaatggatggagattagtactaattgatgaagtcaaagataccttgatgcaaaatgaatagtatgcaataaaaagggtatatttgttaattgaaagaatttgcaaaataataataataataatcaaaaggctaaattccataaaggcaatatttaagaaaaacaaaaacaaaaataaaaaattaataaaaaaaataagataagataagaaaaatctattgatcccatctcaaattgaccaaccttttcaatagatttccttttttatttgtttttttgaaagagaaatagagttttcaataagtacattcatgttagctttgacattaccatcaagggagaggaccatcaagacataggaaaagtggatgccactacattgcccatattggagtgattctacacatcatgaaagaagtgttttgctatatttttttttttatatgtgtaataaataattatttaaaatttatttttacattataaattatttaatattttttttaaatatttacagataatcgtacataaatatcacacataagaaaaattaaacttaaaaaaaattattaatgccaaaatagattgaaatatactaa

SEQ ID NO: 228629 - DNA, 1617 bp, Cannabis indica
tgagtctttggcattatttatgttcttttcaaattttctttgtaaatactaatttgaagacagttgagaaaacaaacattttatgttggttaaaagttccatgaattttatatattgaaaacatggaatggcactctaaaattttgttcaagtaaactataacaaatcagtgcctcattcttacatcatcttgaatgcttgtttttaattgcagtacctctaatttgttacggcctgcagcactatttatcattggctggctctcttatattcattcctttgattattgttccagctatgggtggcacggatgtaagtatcttgtctgtagtatttggtgtctgatgcaatgtaagaaggaagttcaagtcttttgttgttgttgaaattttaacttgtctcagttcataatgatgacagaaagatacggccacagtgatttcaacgatgattctggtttctggagttacaacaatactgcactcatactttggcacaagactcccactagttcagggaagctcatttgtatatttggcaccagcattggttattataaatgctcaggaatatagaaatcttacagaccatgtaagtttatttcaattatcaatgttaattcagacaatataaaagatctattagttgcctactatttctgtaggcctgtcaaaattctaggaatttgataaccttttctgcagggttgtaacgcatactccacgcacgagatatttttttggtcaaattacatcttagagtcattcctattcatattgtatttcatgtataatttcctgcataaggtctgaggaatgttgaaatatgcaggaatttctaaaattttattgtggtttgctccctcaagatttgaggttcgagttcctcccaagtacctccatagcaaatgctatagtttcctgttccttagtccaatttcaaattaaaaaaagaaaaatattgtatcccatgaatctcttttgcacattaatctatcagaattacttgtgttctgctccatgaatcactttttagaatttgttgaagttttaccattgctcaacatttatcagtggtaatttgactgcagaaatttcgacatatcatgagagaactccaaggggctataatcattggatcaatatttcaaagcctcctgggatttactggtttaatgtctcttgtattgaggtaagtgaaagtaatacctattagaattttatataattgaaatagaatagtaattaagaattaattggtttttgaatctgattgctctcaaaggtttttttgcatatataggcatggttgctaatatattggtttttcttccatatgatttcttgcagattgataaaccctatagtggttgcaccaactgttgctgcagtaggtttagcattttttagttatggctttccgcaagctggtagctgtgtggaaattagtgttccactgatactgttggttcttatatttaccctggtgagtggtttaagaaaactaagtgagatgaattgtgattttagagatttgattccatagtactttttcaagattcacagttttttttttattttatttagagtaatttgcggcataaatacctaagtttta

SEQ ID NO: 228630 - DNA, 1106 bp, Cannabis indica
aactttgacccacacatctgagtacaaaacaatcaaaaatcagcaatcagatcaactacggcagacgtaaatctcatacacaaagaaacaaatataaattacttgtaataaaaaaaattatttatgcttttttgtttaatcagaacatggccatagatttttccattttaataaaaaaaaaactgaagaaaaaattagctatttgtcaacgatacatagatatctataataataataggtcacttaaatattacacctactataaaagctctatatatctatacattaaactaactaataaatatttaaaaactacaaacatgcataactaaaattctaaacttttttttttttttgaatgaaaattctaaacttttaaaatgatatatgagttctattttcataaaaggcttaacattgcttgattaagtattaacatcctatactagtgtgaattaagttttattttttttgttatacttataaatagtcaatttactttttccaaaattattgcttgcactgaaaaaatgcacaaaatattatatcctatgaatgcttataaactcaactttgttataattaatcacaaatcatagaatcgtcattagtttttttctctcctttatccttaagcttagcaataaacttgagcaatccaagtcaccatattttaatttaaaatttgaatccttatgctatcgatatatatttttttttttctttaagtttgttcaattttcttgtatttctatactcaaggttaattttttttttgataaattagtaaaatattactgcaccaataaaaaaaaaagaaaaaaaagaactgtttaacaaccgaaacatgagctcaattaagcgattgaactcaatctcccatcaatgttacttgttttctcttttttaaaatgagaaaaccttacactaatatctttctttatgtactttacaaatttttgtagtatagaaaattccataatgaattgttccttgattcccaaatgtaatagctatatgctacttcactacttgaatttggagtgagaatgtaatgtatcgtttaactttatttaagtatagtcaaatataagtacttatattag

SEQ ID NO: 228631 - DNA, 2842 bp, Cannabis indica
aattctataatttaaattttctcgtatgatacattgatactttgagaatggaggatgcttagctgtacatatgggtagcatggcgaagctcagtttttacataaatataaaaatttaggttaatattacatcaatactactccaaaaaaaatttacatttataattttaacactatacttttttactattttaagtttaataaattccaaatatactatcacacactttcttacatttctcaatcttttttatcaaaaaaaaaatattattcattccttcaaagtcaatgtgagttacaaagtgatatttatagttattacaaatgaaattatgtaaaatttatgatatattttctctgtcaatatcggttcactctgatgtattccatatatctgtaactagtatactttgctaacactctggaaacgacattccacttatataagtgtaagtaaactttgttgttgattatcagatcaatgtaaatccaattgactgatacatcatgagactaaaaactttaaatcatataatcaatgattattttccactgtgtgaacaacactataatcatgaatatatgttcaggatttaataaaatttatacattaaacatataatcatgaaagaaatcatgtgaacgatcttttattaattaataaatttgattatattaaaatgaattttatttaaggcataaattcccaacaagtttgaccaccaaaccttgctaacaatagccaacaaaacatacttaaccaaagtgtgagcctccgtattaagagttctaggaaagtgcactagacttgccatactaaaattattaaaagaacggccaaaatcatctaaaacaagatctaaagaagaatcaaacaacaaatgattgttaaattatgacagcaaatttagacaatcagattcaaaataacattattaaaacaaaataaatgacattgagcacccacactttgaagagctaaagcttcagtgatttcaagtgaaaaatctccaactaagaaccatgaagttgatgccaaaacctctccttgagcgttccttaaaatcatactcaagccacaacaacccttagacaaattcaaggcggcatcaatattggctttaacgaaacccaacggaggaggagaccaacgtggatccaccgcacactgtgtcgatgatgaaggaacctgatcaacaccactcgagtcttctccactagaatcaacatctttctttagataggctgctaaaaaatcataagcccacaaccccatcagtttaggagaaatgatcacgtggttatgaacccatttattctttcaaaagtaaattctccataagacaaccaaaattaactcaatctgatgcgttggtagggagtcaaaaaaaatggtaaataaaaccaaagaaattcatacaagtagcaagcgggtcaccaagctataaaccacacaaattacgacattgagcaagagaggagcaattctacaaagtatgatgagtagtttctaattgatcgttgcaaactgggcacataccatcattcaagaaaccatgattgatgagatttttctttgtaggaattgagttagaagatctgatttgtattccttttggaattttgtacaaacgtttattttaaaaaaaaacaaaattttaataaattagtatatttatatatataaatacaaggatatcatgtagctataaaaggataagttgaaatttgcattatgctgatgacatacttgaaaacaaataagaggagaatcattttttcctaaatttatgtatgtagccataaaacattgatgcctatatatttgtatgaaggaaagtaaaaaataaattaggtagcattttatgtaattttcattctatttttacccatttgtaagactttttcattttgtgaagactgtatgataatgcatactttaaaaatagtctctcattatttaagaaccatttaatctttacctttatttataataaaattaatttttttttaacattcatatatggaggttgaataaattatttttattatttgatctaatcttacttaattagttataattttttgtttattattttgttcaaaatctcagtattaagaaaagtgtgtaagacactaagaagaaaaatctatatttatatttatatatttatataaagaaaagtacaaaataaattatacgaaattttatatgattttcattctatttttcactcatttgtgagactttctcattttgtgaaaaaaaagtttgacgatacatattttagaaatagtcccacaatatttaggaactattttgagtgttatactgtatatagtataaataaaatctattaatctgcacttttattttaatttttgtcaactatttcatataaaatattttcttagaatttttatttaaaataattttaaaattatcaattacataacataattaaaagatattatatatatgtatatcatttttatgagaaactatattgtaaatgttaaacttaaaggttatatatcattagtactatttacttctaagtgagtgattagtaaacttagcaatattggtaaaaaaaattacagttctaatagattagaaatcgaattacaattattattgagacttaggaagagaaagttttaagattagaataaaaatacttaattataaaaaattttacatcaaaaatataaaatgataactttattactaaaataccactacacggtaaactaaatatttatacccttcatctttattttattactattttaccacatgcacactcttcccatgcatcaaacatgtgtgtgaccactat

SEQ ID NO: 228632 - DNA, 1070 bp, Cannabis indica
aaaaaaaattaaatattttttcgtttacattaaaaaaaatatacatatattgatacgtaagtttatcattatttcatccaaatcaaatatttttgtaaatttgattgcttggtgaccaaatttcacgcgcgtatagccaaacattttttaaaaagaaaaacttaaaataaaataaaaaacattatttaagtgtttaatttaaataaatttgcagtgaaacttttgttatgttttatttgtatacaattctctaatttttttttagttaattactatatagcttaaatttacttttttctacaaatttaaattttgttaattttaattgttagttgtcacataggattattattgtatatatatttatttttctaagtaattttaattatatattaatattataaaaataaaaataaataaaataaataatttccttttctctttttcttcatttttttttcttctacccaccatcattaccacaactgtcatgacttcccggccaagaccaagaaagctcggtcccgtctcttccccaacatccgacgttcgccgtttgggtacagttgcatgcacgagagaaaagaaaaaagaaagagaaataagaagaaacgtcaagttagtgttttaaattttattagttcattttttatttattttgtaattattttttattgattttaattttttaataatttttataacgtttaaataattaaaattatttgaataaataaacatatgtcatgtgtatataataataatcttacgtgacagttaacagataatttaaatttacaaacaaaaataaacttaataagctatgaacaaaaaaaataagaaattaagggtactatatatacaaatgaaaatataagaaagtatgaccacaaatttctctttcatttatgtaaaatttcctattattatttaatttgttcttttccatttaattaatatctttgttcatgatcttgttctcttgtgatcatattttttttttcaatagtactttttttatttgttagctaactatcattttttatgttcattgatatatatatatatat

SEQ ID NO: 228633 - DNA, 1319 bp, Cannabis indica
aactactgaatgacatagcaatgcatttcataattcaataaataacagtataaaaaattatttaaatggctataaataacttccgtaattaatcataaacaactgataatttccaaattaactaagcgggctttacaatgaaactcaaagaacacagaattatcactagcaaatttagatacactaagtaaatttttggtgatagaaggaacatgaagaagattggttagagacaaagttttggaagagaagggagatattagagaagaattaccaatgttttcaatgtcaagaccagtaccattgcatacaaagaattgttcttggcccgagtagctgctgcatgaggcaatattggttccatcaggagtgaggtgatgcgtagcacctgaatccaggtaccaactgtcatcttgaacagtttctggtgtggttatacaagcttgcatttctgcaacattggctgaggcagagaactgattgaagcactcgggaccagtaaaagatttgtcgaatctatagaaacattgcttgattgtgtgcccgagtttgtggcatagctaacattgaggtttttgtgtcaaagattgagaggctcctcgacctgtagaagcataacctctgccactgttgtgaggatttggaccacgacttgaattagaaccacctcgagacagatgttgcatctgagtttgattctcaacagatcgaaagggatgaccacgattgtatccagcagatgtttgtgagttggggaaaaaaggtctgccattgttatttccataacatggcctggtgtgagctaaattagcctcacttttactgatgtcaaaggatttggcattcttttcaattctaacagattgtgccattaataaagcctccatttctgcaacagaataggagtcttttcttgtagtaacagaagtgacaaagacatcatattctggtggaagtccattgaagatggcttcaatgtgatcttaagccaattttttgtgtccaatagtagcaagaagatcaattatccctttgatctttaacagataatcattgagagaacctgtcatttttgtgtttctgagttgagtcttgtatagccctatttgaattgttgtttcgcaccctatcatccgatttgttgttttcttcgacatcgaagaaagaagccatgaaaccagtaagttgtcctgttgttcccaatcttcgaaggctgggttgatgttcttgttggtttcatcagtgacattaagaaacttgggaggaattcgagtattatccaggaacatctgtaaccgacttcctttaattgaagcaag

SEQ ID NO: 228634 - DNA, 3064 bp, Cannabis indica
tctgcaaagtgcgaatatctgcacttgtgtagattggatgttgattgacatgtaaaagtaaccgatccaatccaatccacacttatttataaaaatattaaaaaattataaaattttaatgtaaaaaaaagagtaatttaaaactctaatacatgtaatacaattatattgtaaaacttaataaatcaaatatatattttattcttatttatgtatgtatttttctacgtacaatttaatataaaattaaatattttatatacatataattttttttttctttgaatttgttatttgttatttattttaatgtgttgttggagacataaaataactataatttgttttattttgttgctagttatatgaaaaaaaatattttttcataaatattaaataatttaatattgaaaagtaaccaatccaaaataactgatccaatccgcacttttgcggattgggttggatatgagctattgtgctgattggattggatccaaaaaatgaaatctgcacttagtgcggatcggatgcactatgagcaaaatagtggggattgaattggatgaacacccctagttgttccagtgttgtttttaattgttctgttttgttgttttacagttattttataaaaagattatttttataaaaatttatgtgtggcaacaaaattataaatttttgtccaaaattcaatatttttgtaaaaatcccttaatttaacccaagttccttaagacaatatgtttggcccttccttgaaatatataatttcctttagttattttaactgtcttcagtctctgtttatgatcaaaacatacatctatgcagattgtttgtttgtattttttatttatttatttattttttttttgcttaaaaacatgtttaaattaaggttcaagcaaatgcttccacaaaatttggactgaaaatttagtcgttaaatatggtacacctaatgttaaacaaaacaaagctagacagcagcaatgccatgtgtctgtacggtttgtctatcatttatgttaatgtttcgtgaagattatggtatcctttatatcattattactaaattaaagataattaagttggtaaaacaaaacaagaaaatgatgagataaaagcaaatataatcttcctcgttcttctcatgaaattgtctcaattataaaacttgcctttaattcttcttcgacgtgtcgtgtagaccaaactatcaaacatattctccaaaaatcttctttgattttttcttttttgaaaatagaaatcttctttgatcttatcaaaaacagatttttaaaattctcatttagttacgtacaataaatctagtttatacacgtatacacatactttaattaatatatttcttttgatcatattccataaacaatagccatgaaattatgtgaagaatatttgtgtatatagaatttatgatgatatgttggctgatgacttcaaatatttatgctatgtgagaatataatgagaaaggaaaacgtcttaaattacacccgcctttcacgttattttttatatttttttttttacttattgttattattaagattttttttttttaattggaaaactttgattagatcaataataactacacttttattcacataattacacgtttttcttcactttataattctgaaataaaattcaatacccccacaaaagaaaaaataataataatacaaatcttataagttttggtgatcataaatttgtgactaaataaatatttttaagtttgtgttgtgttattatcaccaaaagaatacgtgcctaaaagtattaaaattataattaaatgtgattgatttaaaaaaaaaatatgattttttataatactttatgagatgtaatattttgctgaaagtaatatttagtaaaaataataataataaaaaattatattgccagtagaaaattgtgaaaggatagattttcagtgcatatagggagtatctatttttaatatatttaaatagaaaaatgaaaaaggaaaaagaaaaaaaatgtgcatatataatgattttgtgagtagagaaaaaatgaagcaaaaaaagacaaagatcaaactaaaaaaagtcacatttattcagagtgaaaatatatcattgttgtatatgaacctgtttttaaatatgagctacactttattgaaatgatctaaactttcatttttttttcaatgaaaaatgacaattatcagtaatttttaatagtatcacaacttacatataaaataaatcaatatagaaaaaaaaaaacatataagaaggaaagtgatgacactttggattagtggtcttttgattcactcttaggtttgacaagaggatgaggctcgatcagagtttctaacttttccaagtcctccttcaattcatccacctaacattattcagataaataattaactagattattatttccataaaaaattattattatttgagaactagtttctattttaacctgctttagaaaaaaaaaaaaaatctatttttaaccatcgagaaaaaagacccaactttgggcacagacggaccgggccagtgcccgtaccaccatacaaatagggctcaaaatttggaaaaatacaatattttatatttacacgaatttccccaaatgttttgaaattatcacttttcatataaaaaatttaacttttttttccttttactgtataggactcagactcccataactcaagggtagtaggagataagcactctgactcgtttggtagccgtattatatcgtattgtattgtataatattatattaaattgtatttcattcaatattttttatgtaaaactgtatgtcataatgatttttatggacacctaaataaataatattttaatttaaattaaaatttaacataatattatataaaaatatgatatataatccaattcaatataatataatataatacaatacaatacaataccacttaatataacgtaccaaacgagcccttatacgttaaataacaatattggccgaggtcttgacttat

SEQ ID NO: 228635 - DNA, 1210 bp, Cannabis indica
tgatctagcggggcgggacgggatagatccgtacatgatctggatcaggtcggatctgatctgacattcctagatgggaagtgtggaaaacaacatgactatgctctctgtgatgacggttatttgtagtaacgctggatactgtggccagacagatgcctattgtgcccctgaaaactgccaaagccaatgtcgaaccccatctcccccaccaccaccgtcaccgccacctcctcccttcacgccaccacctccgatttctcccgatgatgatagtcacatcattacttcctcacttttcgaggagatgcttacctatcgaaatgatcatcgatgcaaaagtaatggcttctacacttacgacgccttcataactgctgctagaatttttccgggctttgatactactggctctcttgaaactcgtacaagagaactagctgcgttctttggccaaacttctcaggaaaccacaggaatacatactggttcatttatacatgaaatgtgatttaagttatatgacaataattttagtttaactgcaacatcatattttagttattgctgagttaattataatttttccacttaaaagaacacagagaattccatacagataatataattttcctacaaaaatttgttgattatgtttgtgaatcacaggaggatggccaactgctgagggaggaccatatgcctggggatattgctttatcatagaacaaaatgatcaatctccccattgcatcgacagcccagaatggccctgtgttcctggccaattttactatggtcgtggacccatccagattagttagtaagtcatcgagttttatataatacatacatacatacatatatatatatatatatataccatgcatgcatgtcagttattgagtattatgcagtttatatttgttttaatatacttttagtacgtattatgtacttttgtgacaacaaaatcagcaactatattacggaccagctggtaaagtactcggattggacctattaagcaacccagagctagttgcaacagacgcagttgtttcattcgagacagctatatggttttggatgactcaacagtaaaacaaaccatcctcccatgccgtaattgtgggcgagtggacaccaacagcgactgacgtggctgctaatcgatttccgggctatgatcactaacataatcaacgga

SEQ ID NO: 228636 - DNA, 898 bp, Cannabis indica
cttcttaaacggtaaggtcctctttatacaccagagcctcttccctaatttaattaatattattgtcaacttgtacagttcacactctttggctctaccgataattatccagtaataggtctttcacaatgagacgcacccatacagtaatgatacttaattatattatgaagattagcttagtagttgaccatgttattccgttcttgttagagtcaatgacatttaggatcttatcaagttgtcaagggttttatacaaaatgaaggcattgattataaagaaactctttctctggtgtcatcaaaagatttttttagaataactacgtcactttagctcatcttgatggatgttaagataatttttctcaatagcaatattgaagaaaccatatatatatgatgcaactagaaaattttgtgtcaagtcatccaaagtctatggttttaaactcaagatccatttatggtctcaagaaagattcctgtcagtggtatcacaatgtcatcaaatcattatctaatatggatttaaagtcaatattgttgacgattgtgtatatcacaagttcagtgggagtaaattaatctaactcctgttgcaaaaagaaataagtttaggttcaactattgctccaagaataaattttaaagagtaatgatgcaagaagatttcttatgcttaggctattggaagtcttatgtatgctcaagtatgtacgcatctgaaaattttgagatcattaggtattatgactctgatgttgtgggtttccaagaaactaagagatccacttctcgctatgtgtagttgtaacgccctaaataattaggtacgctacccaatatacttgaagaaatcctaatcccctaaacgagattactaacaaaattag

SEQ ID NO: 228637 - DNA, 2026 bp, Cannabis indica
ttattaaataattggaattggcatttaaatggttaaattgaaaaattagcgtttttgagaaaatgagatgcagaaatgatagaacatgtaataccctatgattaaggaaatggattagcaaaaccctaactagttaattgagtattattgtagaatgatattattatataatttattatatgcgaattaatttgagaaatgacatgataagaccccgttggtaagccaggggcattttagtaattttgacccgagaagggtaaaactgtgaatttaatttatttatgtgcttatgaactatattattatattgtatatctggtgtgtcctttttcaggtgtgttttgacaagttggcgcggtatagtcacaattgggtatttcgggtcgaactgggttcggagccgaaatataattttgggataaattattggcattttatttatgtgtcaataatctaaaacttttttatgtttatttttgatatgaatgaccatgttttccttgaatgcttttaagtgtggtatatggccctaggggcaatatggtaatttagcctacatgtattacttgtagtaaatggaattatttgtaaaaatgagattgtattttctggttcttcccacctagctgacccctctctttcagtctccctaaatttcttttccaagttttgatttttgttgagaaagggcttgatttttttgctagcttttggagcttggaatttggaggtgttggggattgttcttgctataatttgaggtagtaattactgttttaaatttaattttctattagctttacctgttatttagttatttctgttaactgttattatttgactgttattttagttattatttcccgtttgtttaggctgtttgttagtcagttttgatctgttttctttgtctcaattatgtttaaatacctcttgtatttttcctttttcctcaatcaatgaatttcgatttctctctttctcttttctttccactttgtcactatcgtaacatggtatcagagcggagaagcagacttctgcactgatcttctacgcttccgcctcttcccaccaggtcgcgtcttcttctccggcaatggtggtgtactgattcgttttctccttcactgaattctttctttgaagacttcgttgctcttcctggaaattatttctagcgctcttctctaatcaagaatgtctactgacaatcaagaaattggagctgaaactagagttcaaggctctaccatttctgcaactcaaagcaaccaggttctgaattccagaaatcctcttgaggatccctccgatccctattaccttgagcacggcgataaccccggcaacattctggtttctcagcctctaataggacaagataattacacttgatggagtcgtgcaatgcagttggtaatttctgtcaaaaacaaattaggattcttgaatggttctatccctaaacctcatatctctgaatataatctttacaatgcttggataagaaacaataacatcgttatttcttggattctcaattccgtttctaaagaaatttcttctagtttgctttacgatgaatctgcagctactatatggacagatttgaagatcaggtttcatcaacaaaatggtccacacatattcaatctcaggaagaatttgatgaatcttcgtcaagaaaatcaaaccataagcatgtactatactcgactgaaaacaatatggaaagaattgtccaattatagacccaattgtacctgcaatggatgcacttgtggtggtgtaaaaaggctccaagaacaccaccacatggtgtacatcatgtcatttttaatgggacttttagaccatttttctcagattcgcagcagcgttcttttaatggatcctatgccagaagctaatcgggttttccatcttgttacccaagaagaaaaccattaatctaaactctggaaatgattctaacactaacatggcttttgctttccaatcagataagaacaacaattca

SEQ ID NO: 228638 - DNA, 1130 bp, Cannabis indica
aatacgaaatcaacactgacccaaatccctttgctgacgataaaggccgggccgagggatggggctgcctggacgcagaggctgaaggaggagtataaggcattgattgcctacacccagatgaacaagtccaacgacaatgattggttccgcatctccgcagccaatcccgaggggacacgttggaccggcaagtgctggtatgtccacaatcttctcaagtatgagttcgatcttcagttcgatattcctgttacctacccaaccactgcacctgagctcgagctccctcaaatcgacggcaaaacccaaaaggttcataatattctatctcataatgataattttgttttattaatttgattgctaatgtttttttttttgttggctttggttgatcagatgtatagagggggtaagatctgtttgaccgtacatttcaaacctctttgggcaaagaattggtaattatctttttctgtttacatttaaagtttaagtatgtattctgtggtattcagagtttttctccttggaatcatggattgacagagaaaacgatggaaattagagtctggggattacattttgatctgtgaaaccttttgtatttgttaaaaaaagttgttacttataatactgaaatttgcttactgttgtttgtttacgcaccagagtccagacccctcacagcaacacacttgaactagacacaagtagtgatttccgaacttgatatgcagtggtcacatgttgtagtaggaataggattagttaccacacctacttgttgatgttttgcatggattggttatcacacttatttttacttcggttgtattggctttcatttgcctcttggaagaactttgaaatgcattggtgtcatttacttcatgagcctattataaaatcataaacggtttagccattaatgcttttaccgggttgggttcatcgatgttgtgcattgaaacaatgctgtgatttcactactaaataaaaatgaaaaatggtagttgcgagttgagtaccttgtcttgactatactaacttgagctgagagttgttttctcaacttctttatctctgtttttcttttgttccctttggaatatggagttagtgct

SEQ ID NO: 228639 - DNA, 2023 bp, Cannabis indica
acacaatggtgattcgaatcgtttttctgttcttgatcagagtgttcgaagctctgctgatgaccctcgcagtccgtatttcttgactcatggtgataatctgtctgttaatctcgtccctaagattcttactggagctgagaattacagttcttggcatcgttcgatcgatgatggttactttacttgcaaggaacaaggtgaaatttagtaatgggaagcttcttgcgcgagatgaagaagatgaagactatgaagcctggacaagatgtaacatcatggtaatttcgtggatcttgcactttgtctcgagctccattgtcgaaagcctaatgtacatggaagatgcctcttgtattttgtatttggtttgaactacaggagagatttcaataaaggaatgccccgagaatctatgaggttaaaagattaatgcagctcctgactcaaggttccaatgatgtcacctcatattacactcgtctcaaaagcctttgagatctttcacaagaatatagaccacaacccttgtgttcttgtggtgctatgaagactatccaggcttatcaagatgaagacaaagttcttgaattcctaattggtctgaatgagtcatattccagtgcaagatcccaaatcctcctccaagatctccttcctaatgttaacaaggcctatgcctctgtcattcaagaagaaagacaaagaggtattactaatcatcaatatgaagttactaaatcttctaatgaaaatgcaggccaatttgctgggaatacgtaaggaaatcgaggaggaaacagccagaccaatgggaaacccatatgctcacattgtggaattgttgggcatactgcagctaagtgctacaaattacatggatatcccccatggcatcgtttacatggcaaagtgctcaaagatctccctaataaaccaagcaatcaacagcgtgatcgatcctctcaacaacatgatcgacctactgcaaatttttctgggcacattgacagtcaagatggacctcctggagaacatgatttttcttcacaatgccagaaactcattgccatgttggcaccaaaagtgcaagaaaccagcacctcgaatcagcctgttgatcaacccattctctccaatatttctggtaataattttgtgttcctaaatctacttggataatagacacgggggccactcatcatgtttgttgtgatcctaccttgtttcacagcgtgcaaaataacattaaaatcagtaatgttggattacctgatggtagaagtgttgttgttccttttgttggaactatacacctatctaatcttgttcttaaaaatgttctttgtgtccctaagttccattgtaatttacttttggtcacatctctttccaacacatctaactgttcctttctttttcttccaaacaaatgtgtgattcaggatatttccaagaatcaagtgattgggatgggtgaacgtgttagaaaattctacctcttgagacacaatgctttacctactgttttgtccatttctaattcgaaaattagtaatgatactatatggcattatagacttggccatgcttcttgtgtaaagactcattctttgaataaagatctgaattttcaatactatggttgttttgattttcattgtgctatttgtcattttactaagcaaaagaagttgccttttgtgtccaatcacaatattgctaagaagtgttttgatttgattcatatagacatttggggtccctatcatgtgtctactattgaaggattcagatatttcatcactattgtggatgattgctctaggtatacatgggtgcatctcatcaaaaacaaatccgatgcacaacatgtcataccaacttttattaagcttgccaatacccaatataatgccaatattaaagggatcatatctaataatgccaaggaacttcagttccctgaattatttagttctcttggtattattcaccaccattcttgtgtccaaacccctca

SEQ ID NO: 228640 - DNA, 2581 bp, Cannabis indica
catttttgtaagcatgacacatggatgttaattaaggaaggccaaggagtcatcagctgcccaactccctcaattgatgctccgagaagacaaaggcatcaacttcgcaggaagagttcctctgaaggaaggctccctaaatgctggacatgcaaagggtatccatgaaccaaagtctcaaccatccaggagctaagactctttgctagcatgagggatgtggatcttctcaactaggcctaagtactttgaggatacaccagtccaaggtacgcctttggcccatggaagtcagcccacgcgtgtcaggctacagacctagtgaccaggctttttcatgtatgatgtcagagtttgtctcccacaacacacaaatcgtatagagcatgcgtgtccttgtgtattgagctaaatgatccaatggctaggaatgagggaaatttaaataagaatgaccctgaggtgacacgcatccgaggcccaacttgtacagccggtacgatttaacacccttaaaagccacatgagaaatatgccacctaccaatctcacagtaggatttcatccctacagtgatccatcgaagacaatccatgcaaagaagtgggcctataaataccctagaaaaaggacaagagggaggaatttttttaaaaaaaagaccttctcctttgaattgaagacttatgcttcatcacaccaagaaaacacatttctgtaaccctactattaactctcgaatatacctactaagcttcctcttcttcaagtggaacacggtggaaaggagtaaaagtccattgtatttgtacttgtataaacaatcgccgaccaacgagcctaataaaatggactcgtggactaaggatagctaacgcctgaaccacgtaaaaatctcttgtttgggaataatgctttcctggaatgtgtgaatcattgccaattagaagatgttaaatacagtgggaggttctatacatggagtaataagcaagatggggcggatagaatttattctataattgatcgagttcttcctaataaaattaggaagaaattattcctaataaaatgggaatttattcttcctaataagaagtggatagatagatttcaaacgactgaagtgttatttgctaatgaagggttgtttgatcatacccctgctctactcaagattcatcttgagagaccaagtggtcgaaagcccttcaagtacttcaagatgtggagtactcatccacaatacaagactctgctggaaaataaatggaaacaaaagtatgttgggacttctatgttccaagttgtgtcaaagctcaaggcattgaaaccagtttttagagagctgaataaaggtggcttttctgatttacaagcaaaccgacatccaatcttgtgctaggttggctgaatgtcaatcgttgctgcataataatccccttaatgatgagctacagcaacaggaatccatggcgagaactcagtatgctgaaatacataacaattactgctcttttttgcagcaaaaggctaaactaacatcagagaaagaaggacccaaaataatatcctttcaattcaacatatggcaggagaaagggttgaacatcctgctgagattactaaagcttttactgttttttacaaaaatctcctgggaacccgattacaagatagaaggaggtcaagaagaagttggtggctttgggccctgttgttctagtcagcaggccaaatatcttgatgaaatattttcgaaagaggaggttaagcaagcggttttcagtatcccagggatcaaagcccctggaccggatgggtttagcagctccttttttctggataattgggatttagtaacagaagcaattctatcggccttacattcgggacaaatacttggttgctcataaccaaggaggatttgttcaaggaagatatatcgcccataatatcatgatatgccaagatttgctaaggcattatggaaggaagcattcaaggccctactgtatgattaaattagaccttcaaaaagcatatgatacactagagtggggatttcttgaggagatgctaattgctatgcattttcctaagaagtttatacacttgattatgcaatgtgtgtctactccgaggttctcccttcttttcaatggctcactacatggctttttcgaagccaagatggggcttagacagggaaaccccatgtcccctctcctaattgtacttggaatggagtacttgagcagaataatgggagtagtgggaaaggagaaggaatttggttatcatgaaagatggagaactatgaagctaactcatttaatttttgcagatgatgtattattattttgcaagggtgatttcagcagtattcatctcatgctacagggtttgaagctgttttttcagtcatctggtttgcttcctaataccagaaaatcggcaatctattatagtggcatggaggagaatgagattcaaagaatagttgctgtcttgggattcattaacaagaggtacctttcaagtatcttggaatttttatatgtgccaagaaaatttcagc

SEQ ID NO: 228641 - DNA, 2500 bp, Cannabis indica
ttcataaaatttcaatgacagttatttgttgtcattgtttatgggagcctttttcttttactttatttaagttacctaataataaataggctcccaaaccaggagaaagaggaactctttaaagcttttttcaatagtgtaattacacaatcaatttaataaattcaatttaagccttacaatttttttttttctactaagaaaagttttacatgagttataaaattatgtgctttataatttttctgttggggtttactatattatgatttattacttgatgtttatatatagggatatttgcaagtttggaatgtttcttttctctattatattttgtgaaaagttgttttaaaatcaatattgaaattattctggtgtaaactcgagataatttttagactcggcactataaaattttgagagataaaatataaaaataattacatcaatctagagattgagataataatcttgaaatcactaatattagaaaagaaaaattaattctgctaacctatcaactaaacctaatgtgaaagaattccactagaaaaaatgatttcaaactataatgatcaattgaaattaataaataataatatttattcaaaagcccattgattttccttgcgaatagcttcttcttcttcgggagtgaaatcattcttgatattaaataacttcctaatttcttccggagtctttcctttgatcatatcagccacagtttgacatgttaagtcaagtaaatttgcgatgttgagataattagcagactgaaaaagtaaaataaatttaataagtacttttaaaaaatatataatttcaataaataaatacacaatataatagcataatatacataccaaaataagttcaaaaagtgtggcttggtcaagcttgacaaagttggcatcccaagattggagatcagtggaattggaggaatcggcgtgcttcttacagtattcgatgacaagagtaagaatcttactggtgacgttaggcaaaggaatgccattatcagcacaaccatcttcgatcatatgtttgatcgtttgggattgtatggcaattgcctcttctacctcaaacgattcaccatctgagctgatcaagatgattttcttcgattccactaaaacgactgcgcttccttcagtttccattataaacgatgcttattatctaatcaagaatcaaggtttacttttttttttctaaagaagaagaagtgagagagaatgtgagaataagaatatgagaatagttttgtctatttatagaaaattagaaaggagtaatctagtcctagtttcttttggaataagattgtgaagtacgatttttgttggttgaatttaattactcagtatctttttatcttttatttattttttatttaaaaaaaaaggagaagattcgtatatctttttttgaatttgaataaaaaaaatcaatattaaatgataaaattaggtactagtttttttttggttatacatggtgcctcgaaagagctacttccgtgtttttttatttatttattattattattttaaaataaatatataaatatctaaatgaatagctactatcgtgtcgaatcaagatcccctgtccaaatattgtgtcccatattatgtctaaccaatatgatgataatacatcatttaatttatttttgtaaactttactcactaaaactaaaactataggagcaattccattaactacaagctttcattttttaaatagtttccttttttttggactatttttggctgaaaatagtttctttttttgtgtcaagattaggttttttttttttttttaaaaattctagaaccttattaaaataatctatttaaaataaaattagtatcgtaatataattaaaataactacaaaataataatgatatattatttttttatttatctaaatataatagagacataacattaataagaattattgaaaagaaagagcatacctctaatttttcttctagttctatagcagcgcttgcaagacttcagagtatgagtttaaaaattctaagttaatatgaggtataataaatttatattaaaaaaaataatattttaataaggttcttgatttcaaaaaaaaaaagaaactaatcttgacaaaaaaaaaaaaaaagaaactactcttcagccaaaaatagccaaaaaaaaaaaggaaactattaaaaaaataaaaaactttgtaattaatggaattgctccgttagttttagtgagtaaagtttacaaaaataattaaatgatgtgtcatcattatattggttagacataatatgagataaaatatttggataggggatcttgattctattcttgtcccttactcttgtcttatccacagattaaattattatccccaaaatctccattaatacacattatacaattaagttatcttcaaatctcatctattaaatataattaatatattataggaaagattt

SEQ ID NO: 228642 - DNA, 1329 bp, Cannabis indica
ttttttagtaaatcttaaaatatcattttagatcattaaaaaaaattatttttaatgattaaagattaaatgttactggaacaagcttgagtttattttttttcctccaaaaatctagatttatataataaatataacatttctttagctttttttttcaaaattatttatatttttattgaagttttaagatatatgatttataaatataaataagtttaatttttttttttaaaaaaaaaaagtcttagttcgcttaaattatttatttgattttcaatattttttgtgtgattttctcagagaaatgtttataaataaaataaagtttgaaaatatattgtttaggaataatttaggttttcttaaataaatttaatattttttaactaatttaatattttggtcaagttttttaagaacttttattatttactcataattaattgaacattataaatatttaaaattaatattttcaataaaggagggcaaaattttgtaggtgacaaattaggggataaaaaaaattattttttaacgtaaaagaaaagaaatctaacaaaaaatgcataattatgtaattgttatagtttaatgagaatttttaacaaattttgtagttgaaagtttgggggcaaaaaaatactaattattgttcattttacaacaaaaagtatattaataaaacaaaaatcctaaacaaaaaatgatgttccaaaagaaaaaatatgatattcatcaaacaaaaaaactttgatacattcatataaataatttacggtttaaataacatataaataaaattttaataaagtatatataaatatgtattatttcgtataaattataatccatttttttccaaattatacaaaaggggaagatatacatgagtttatataatatataaataaaatcttaataaatcatatatttaaaatatttcttataaattatgatcaaattttatttttttaccaataaaataaaaataggatgatctcaaaactttgcaatattgataaaaaaaaatactttcattcgagttaaaaataaaaactaggatattcaaaaaggcaaaaagtggcacgagaattccagcgagccaccacagggcttccacggtgtgcccacgtgaacaaataaagccccgtctcccatgcccacgtgaacaaacagagccccgtccccccatctctgtggagctcctgcgcttgacaggagcttaactgttcagttgggcctccgtatattactactctttataatttaatatatatgtttttatttataaaattattgcacactaaatcaaattagttcaca

SEQ ID NO: 228643 - DNA, 1348 bp, Cannabis indica
gaaataggcagtaaccagctacacatcgtcgatcatctggacatgatgcccaatcatcatcagaaaagccagttagaatgagacgatcactaggtgcaacatgtatcccgtgatgaattgtacctttgagatatctcaaaatcctcttagctgcactccaatgaactgtagtagggcctttaagaaattggctgagtttgttcaccgcaaaggaaatatcaggccgtgtatgactcagatattggagtgcacctattagactcctgtattcagtggcattatacagaggttgcccatcatttagagacaatgtccttcctgctgtcatcggggtaggacctggtttgacattctccatgttaaacctctttaacaattcttgaatatacttgccctgcgataaatatatccctgttgtatctctaaatacttctatccctaagaagtagtgtagagatccaagatccttcagtgaaaacattttgttgagtctagtaataaacacttccagctcctttgaattgttacccgtgactacaatatcatccacatatattaataccattatcacatagctagagtgtttcagcatgaagaatgaggtgtctgccttggaattttgaaaattctagcttacaagagtgtttcgcagctgatcataccatgcccgaggcgcttgctttaggccgtagattgatttgagaagtttgcagacatgtttaggtttgtcctgatcttcgaaaccttgaggttgtaccatgtacacatcttcctcaagggtgccattgaggaaggcattattgatatctagttgtcgtacatcccagtcatttgctacaaccattgtgagaacaattcgaactgttgaggctttaataacaggactaaaagtttcaccaaagtccacccctggcctttggtgaaagcccttagcaacgagtcgagctttaagccgttggagactaccatctctatttagtttcactttaaccacccacttgcagcctacaacattcatatcatcagtatacgaaacaagtatccaagtaccatttctttttaaagctgcaaatttagcagacattgcattattccacccctcgtgctgaagcgcactagcatcagaatcgggttcatagtacacaaggacactagaaggggaaccaagaaaggtgcgaggcttaaaaatcccagccttagcacgagtaaccatcggatgagaaggttgcgtattctgtggtggaacaatatcagtcaaaggagtgggagttgctggtggaaaatcaagtgacacagtcgattcatgtggctatttagaagagtcaggactgatgcttgatggtgaaac

SEQ ID NO: 228644 - DNA, 1039 bp, Cannabis indica
tttatatatatattttcttcctcatacacaattacatgataattaattaatagtacttaattagatggacacgttataagacaggatagccgtagtgtgtcgtttttgtcttttcacaatcatagaatagagaaccacactcgatccttcccttcccttcccttaatttcctttttccatgtggtctctcacgtgcgctcaccttattttatcaaaataacaaatatattacaaataaaatgtttaacacttaacatgtttctttggtatgaacaaaaacaaaacttagataaagagagagatatataggttaataattaagaagaatagtgatttttataataataagatggacgttccagaaaataacgtctttccttccgtgttctttctttatggagaaaaatatattcaaattttaatatcaaaatgtagttaagggacatcttatagtgcaaattgaaatcgctattagaataaattaatatcaaatcttacctaatttaatttaataaataatataaataattgttaactttggataccacaagtgcctaatagtattttttttactaagttataattccatgattgagattcataatcttagataaatgatattttagtgtaattaaatctattttaaataaataaatttatatatatttatcttacattacttatgtgcgagtaaattgtgagatttttatcacaccaccaaataactatcaagccataactccgtaataagagtttggcatttgatttgggggagggctcatttcgttctcgtattttgtttctctctaattttttttctagttaaataagtgattttggtattttttttattctttttccttccactcttttcatctttgtatccaaaatattatcacaacaacaatacattgtgttatttattgttagtataacaaaatatcaaaattcacctattttaatttaataatgtaactaatcattaatttattatttttaatttgttcaacaacatatactacgactattgtaattgtac

SEQ ID NO: 228645 - DNA, 1284 bp, Cannabis indica
tttggtatcatagcgggtatctgacgctatgtccaccgacaatcgtactcctcaagctctcgttggtagcagtgttgcaaactagatgttcacggcccaaaatgcagggtctacttcaaatgttgtcgtaccacagtttgggagcacgctcaatcaacccttccctctcaaattggataggaagaatttctcactgtggaagacaatggttacatccattattcgaggacacatgcttgatggttttttgataggtacaaaagcaaaaccgattgagtttatctccatcccttctcttgatggtcaacctagctttggtgtggaggtaaacccggattatgaacaatggattgttcatgaccaacttctgatggggtggctattcggctccatgacggacgagatagccactgaagtcatgggtgtggaatcctctacaactctttcgcatgcattggaggctctttttgttgctcattcaaaagcaaagatggatgagtatagaaccaagattaaaactcatcgaaagggttcacaaacaattgctgaataccttagacaaaagagacaatgggctgatgttctaactcttgcaggtgacccctatcctgaaagccaacttgtttctaatgtgttgtctggactagatctggactattttctaatagttcttcaggttgaagcaagaacatccacaacgtggcaggagttacaagacatcctacgctgcttcgacaacaaagtcgaaaggctcagcacgttttcaggaaccaacaaattgaatggaaatgttgctacaacagccactaatcccactgctaatttggctaataaaggaaacggtgctggtcctagctttggtgcaggacagaacataaacaacagaggaggtaataatcaaggtggaggccaatttggaaacaatagagacagaggaggcagaactaacaatggtccaaaacccacatgtctaatctgtggtaagtatggtcatgttgtgacctacttctacaacaagttcgatgaagcctttatgggatctgctccaactagtgtcaacaaccaaatgcctccccaagatcaagcacctttattgtcacccctaaaatggttgatgatggctcttagtaggtagatcctggtgcgaacaatcacatagcagcagaaggcagcaacataaaccaagagatgaaatacaatggtaaggatagtcttgtggttggtaatggtaattagctaaccgtaactcatattggttctggattacttgagactaataatgag

SEQ ID NO: 228646 - DNA, 1815 bp, Cannabis indica
aaaattcctactaactttcttacttcaagagagaaacaaaataaatacggagctagggtttatattgtaaacacttgtaatattcaaacactcacctgcaagggctaatacaagtagatagcatggactaggggttattaatgcccgaactatgttacaaattacatgtacattagttactattttatatcattcttaagctctattttattagttttcaaaattcttggtaaacagagtgccatagataatccatagtcattatcatttcttggatatatacatgatttctaggtctagttactacaaagagttactttaatattaatagatactcaatctcataatattaaactcatgttcatacattaaaacttagtttgatccatggaattggatatcaaaacttgtgaaagttaaactcagtgtttatgcagtctagaaattcgttactattctagcttggactgccactaagatattattaaactccaagtctagcttgcaaaatacttaatatcgatttcaaaactattacaaaagtatatattcaatcgatgttaattagaaatttagaaagaagattcagttattgaacaaaataaggatagtcatcattttatggatagattatcttgaataagtcatccacgctacttattttcttataagaaaatagagcagcatcataatcaaatgattattgtcattcttcttcaataatgtatgatctcttcaattttctaataaaaaagatatagagaaaacctaaagaacaattttaattaaattaagaatctaacaatgtccaaagaataaaaaatattcttattttataaacttctacattgtgttaatattgtaaacactaatcaaagttgtcacctttagggatgactcaacaagattttttatttacaaaatacttatctcacgagatctagcactattaatttgttcaacggatgaccatcccaattactaagttcgaccaacaataaagattcaaaattgatactacataatctatatatatataatgctgttgttagagatgatgacatggcttcttatatgagctttgtttcatatgctttactctcttaatttttcactattatttaatttttttttattaattttgtaccatttcatattattatttagcatttatagctaataataatacaaaataatttattcataccataattaattgtaataataatactttactacaaatttaattataaaaggtgatgataaaagttcttaatctttattttaacctttctaacctctcagttctctctattttgcaggttggtcgcatatagcaacacaagctattttatggagccacacaaccttctcatcccttgaaagatttttctggtacatgttcatagagcacttttgacttcttactcaaaacttcaatatttaattgtgttggggtggttagaattttttatttgttatatttattatatatatttgttaattttattattattattattatttttttgagaagtagaggacgggtaattgttaattttattattaatttgttttgtttgttcgtttttagactatgattaataaaaagaaatgatttgattgattcatgtcaaaaagttttttatgatttagactatgatcaagtatggttttatcttttctcaaaaaaaaaaataatggtctttatctcaatctcctttcttacaaaatacatataaaatataattacgttttgaggtgttagaatttatattttatttgttatatatacatttgataattttatttttt

SEQ ID NO: 228647 - DNA, 880 bp, Cannabis indica
agatcctggtaaaataaattccaacatatgtcttgtccaaaagcagtttgtcttgtactgatgtggagatcctgttacaagaatttcgttaagtttattaagtcgtaactaacttattaacaactaaacagttgcagccactgacttagaatctttatcctgagcctatataccaacaattatcatttcatgtatgctagattggtgagtttcgagaggagatttcaagattaagagagaaagattgagaggtagagagagaggtaccggaaaacgagagagatatataatgattcaacagttagagagtctcacattgataaaatatagaaattaaataccacacataagatgtatgagttattcctctcattaatgtcaattagttttgagatagaatctcatgcaccttactatacactcacctattcctacttctttaaccatatagttctgcataaaactatggtatcggagccaaactaaaactctaatgagtaaccgatccaaattcaaaaaccagtcccaaaaaaagacaagccaaaagagtcgcttgtgattcaggaatagtgtgccaaaaaagagccacttatgatcgagtcatgcatgattggtgacaaaaaaaaatagttaccatcctgagggggatgttagagagtcctacattgataatatgcagaaactaaataccatacataagatccatgtaccttaccatgccacacattcacctattcatacttcttcaaccatacacttttgtattctaactttgttaaatgacaaaatgaattctctattttttaaaatggtacagtaccctgagcttaattttttactatttttttttcaatataactaacttgaagacaattcctaa

SEQ ID NO: 228648 - DNA, 1880 bp, Cannabis indica
aatgagtatgtcattattggactttagatgatcactactacatattagaggattaagaaaatccaagacagacataaggttgttcagagtcatcataaaagttgtgctgatctccatcaacatgaagttgagtatgagtttgatgataatgtcttcctaaaagtaacctttaagcatatgtgatgaggtctagaatgaaggataagttagccccaggtatgttagacctttcgaggttattaagagggttgcataggtctcttatcgattaaagttaccagtattgttgggacatgctcataatgtgtcccatgtatctatgctgaggaagtatacttcaaatttgtcagatgtcattaagtatgaggctatccctcttgtggaagatatgacatgtgaagaatgtcctgtttggatattggtaagagagttaaaggtgctatggaacagagcgaatatgtagttaaggccttatgatagaatcgtagagaagatgagaacacttaagaattagtgactcaacgatgtatgagaagcatcgtcacttgtttaatatttaacttggggttgtatctcaaaatttcgggataaaatttcttttttagaggcagaaatgttagactcggtaaaaaaattgtatattaaattagtgggtggtacccacagctttattaaacattccctctcatctttcccttctcgcacaaactacctctctctttcctctttcttattttctttctctcacatcaaagaaccaccataactaccatgactaaccaagctccgacaacttgtttccattcaccactcaatcgcacgcttcagagcattgtactctccaacttccgcaacccttcaccttaagtggcattgcctcaaatatcatcattagaccgggatcgtgggtcaaagtttggtattcgaactttgaatggattttttggctagctctgacctccatttaatgatctattttcactgctagactcaccttcgaggagaaaaatctccactaaatcatttgacccaattcactactttttttggtgatgtttttgtagctttgccacttcctcgtaactttttgtgataccgtatactgtttcgataagtggttggcacgggtgtgatctatttaccgaggtggtcaatttcatatatactattcttatttttggctatgtttcaagtacaccaattttcaatgtcactgatcgtctttgtgcaccgcgtagggttggttacttcaatcttcaaatatagtcatggtatatgtcgctggacttggttttaagaatacattacaaagataaaaattatttattttatttgagaatgttggataaagtcactaatctatttgaacttaataattaggggcttaggagcatctgttttggagaaagtttgacgatcctaatgaggtagggactcaatttgattattggacatgattttatgtgttgaataacgttagacatattcaaatttttattttataaaaaatttaaaaaattgaagacttaatctacatatttttgtggactgttatggggcactgagtgcaaaatatatttttgtacaaatatttatgcaggttatgatttttgggtttattcaaaatacaactgttatactgctggattccctaaaacaaaagggaatttgttcttgtgtttttcttatttacctgcttttggttatactgatgaaagccatgtaaatcattatttcgtgcatattgttgtttcacggcctagtgtttgtgttatcataggtagatcaggtgtgtattccacctgtaggtgaaagacctagaatctatataggaactgaattagatctaagatgcaatattatgctgattatcaagtgcg

SEQ ID NO: 228649 - DNA, 923 bp, Cannabis indica
tttttcagtttcgccttgctgtaaagacaactagttaataatggaaaggtgtttcttcaatgtgatgtggtgctgtttgatgacgttatagctttattgtctaaatttccgggggcagttttgtcccatgtggctcgagatgagaattttgcagcgcatggtttgacaaagcatgcccttcggttagacaatgagctatcctggttcgaagaggtgccgtcaccgattgtggattgctgctttgataatcttgtgtgattttgatcaccgcgtcaaaaaaaaaaaaaaaataatacctacactaatttttcaaaagtcaaaaaaataataaaaataccatataataatgtagcacgtgtaaggcaagacacgtgcctggtctccttttactactacttcactaggaagtgccatgggaagtgttattcttcttcttcttcttcgtcttgactcttgaccctaaaaccctgctctgctctgctctgctctctgatcataatcgtctcttactttacaaacaaacaactacaatacaactaagtaaggacattctttctccatttatttccttttcattcatattagggtttattttctttgctctaacagtcctcaagtcaaatttttatggctgaaaatggcgtggaagaaaacagtcttcgtcccgcggagaagaaaaggctaaaaacgacatcatcatcatcatcatctgctgaggatgatgaggacagaatttcgaaactacctgatgcactcattctacacatcctctcgtttcttcccaccgtggatgccgtttccacaagccttctttcaaatcgttggaaacgcatgtggtatttagtccccaacctatctttctttattattgcttctagttataaatcgacacaggaccgagaaaagttgtgcaattatgtaga

SEQ ID NO: 228650 - DNA, 1120 bp, Cannabis indica
taacttagtcagatcttttgaaataacaaagaaaagacatcaaacttacttaattacagtatttccatttgttaccttcgacgacgccgtttccactccttactgcttctgtaacaaacgagataaattattaatttaataaatcataataaaagtatttaaaaactttaatatttgtaaaaataattagtgtcttccaaaaagtagagggaatggtaccattcaatgaattattctcaagtgacctgcaaagaaataaaattaagtcatataagggagttgatgaatgttttatttggataaaattattatatagttagtagacagatggatgatcatgaaaaattataaagaaaaaaaaaagagatagatcttacattatctctggagtttaggaaagcttgtaaaacttttaggaattggtccatcagatttttcttagataaatcactaaaagaattaaaatacacaaatgacttctttgttataaagtcacctagaaactacaaatgtgtattgtaaggataaatattcaaaagatcagattcgtgcacagtaaagctaaaaagcttttcatgtaaatggatggatggagtatgagtgtgaaattgtgtgtgtgtgagagagagagagaataaaatagaattatgcaaaagttatggagatcgatcatgacatagtggtgatattgtctgaaagcttgttagttggtatactttgactgagttgatttgagctaagatctctatattataaaaatatactaaaattactacaaaaagtcagagctagcaactagaaatcatagaaatgttaataaataattaaataccattattgataaattatgtgaaaattaaacaaaatcattcaaacatggaaagaaaactggcagaaacttctaattctacaacaataagatttaaaatataagactcacaagtaaaagagactactagaaaaagtttagttgggttgatagttttacaagtatttagagctatatgactcgtatttcagccaaactttaccaaataaacatcaaacactatcaaattcaccattcgctttcataaaacacctttaatactcaaaatcccatctaaccaaacacattaat

SEQ ID NO: 228651 - DNA, 1974 bp, Cannabis indica
aaaatgacaaactattcataatacacactttattattattattattattttgagattatagtggcattaaaaacaccaaaggcattggtgcacacaacacaatattattacccaatattttatttaaatgtttattttaagaatctaccgttataattttgatctatgaaaaaaatagttataataataataataaattaggttactttttttctactttagttgcttggatttatttccatttattattatttttattatggtaataaatactcaaaacgtatcttgtgtaataatattaaaaattaaattaaaacaatgaagtttaaccaaaaattaagcaataaaatcagataggagttggaagttttatctattttctattattgcttttatttatttatttctagttaattaattattaaagatagtttacttaaataattaaaaaatatggtttgacaatttgtgagaaagctcaagattttgtcttgagaatttaaatgtcattttcaatttcttatctaaataaattggcttggtcttttcatggaaattatttattagcaaataataataataatttaaagtatcaattttttaaagttatttttagataaaattttcttaatggacaaactaccaaatttgtaggaagagaagattgaaatttactaagtcaaaatgaccattttgcccttatagtaaattatatttttggttgaccaaattgagttttgtgtcactttcttatttatgaatcttcaacgttaatgtcactcaattcttaaccgaaaatttagagttaaaaacatttaaaaaaaaaatgttttaaaagcccttaattacatgcttttataaatttgttgtttcatttataaagttaagaaaaattaaaacccaattaaatagattaattttttggaaaaatattgtagcaatttttttttaaaagaaatggtttaggaatatccaatgttttgtacatttttttttttttttttgtaaaaagacaaatgaaaaaaacaaaataatgggtattttcttgaaaaaattgttcatgggtattacaaagttatatgccactataaattttttggcattttgtagccggttcttgttgatataattactaaaaatatttcaattaaaaatatatatatttatatatggcattttatataagatttatttggacccataagttgtgttgagaaaattactgtaattggattcggatatagttgaagataattacttaatttaacaaacatttatttttatcttatataattactaataacttttttattttaaatattaattatgaaaaatgttattttatttgttaaagagactcatgttgataatatgtgtacactaattatcatatataagatatatgagttattcttcttattgtcaactggtttaaatttgaatctcatgcatagggatgcacatttctcacacggggatggccccgcggggacccgtatggagaactgggcagggaaggagataactttttgtccccgaatattaaacagggcggggacggggatcacactccccaccatgataaggatccatttagtattttatcttatgtttatagtaatattttataatttatgtttgtatttttagtatattagtatttttttatgaattttaagttgtgttttggataataattagtttagtgaataataattaatgtataatattttaatttttatgtattttaatatttttttatattaaaatttttatttttctattagggaatttttcgcccctccccgccccattctcgataggaaataagggtggatgggaatcaaaatccttagcgggaatgggaattaaaattcttaacgggaatggggatgggaagagcactctccgtgtgacagtcagtagtcccgtgatccgtaaggagaaacaccgggtaagctgtacaatcccaca

SEQ ID NO: 228652 - DNA, 1570 bp, Cannabis indica
aagaggctcaaagattcattcaactgagttcttctttatctgcttagaaggcattagaagagccttcttgtaatctaatgtatagatctcttgtaatctaatgtatcatactgatttggtggtcataattgtatttatacagtgttagggattttttctattttaggatataattacctcaaataaacattttttctaatacatagaaaaataaacatttaaaatattaattttaaagtttgttatttacaaatatacttttgagatacaaaattaaacaaaaacagaaccaaccggtggtgtgaaagacacgctcgagtggggaatcatatttcttgagatcctaaattatataatttcttagagcaagtccaaggacacggtaaaatcttatgtatgctgtgattttgttcgaaggatacagcaattgtgctaccattttaaagttttgtcaacagtgcacgacatataatttaattatgccatagatcactgtattttttttataatttaattaatatttttatatagttatattattataattataaaattaagaattattttttgaaaaattttacaatacacatttttaaaagtggtgtacgaatctactcctatttgtttcggcatctgataaatttttttagtctattttttatatagtagtgtatattatagttatttaagacattttacaaaattttgaaaaaattagaaaaattgaatacgccgaaaactgcacttccttaaaagtggcgcactgatatactcctacctgtttcgacattcgagagatttatttagtctttttttatggtcgtgtacattatagttatttaagacatcttgcaaaatttcaaaaaatttagaaaaatttaacacgccgaaaataaaattcaaactttctgtcgtgtgactcttttaaatataacaattgtgacaatttttgttaattaatatgatattaattttttttattttattaaaaattaatataataataaggaatatttttttagtgtaatttttggtgttgtggttggagtacaaatattttttgacgccaaatttaatgatagtgtaacactaaatttagtgtatccttggagatgctcttacatgaaaagtaacaccaactattattaatttttttttttgtttttttttttgtgagatactgattttgatccaacattttataccaacaaaaataaagtaaaaattatcagatattttaaccaatgactaaattaataatgaaatataatttagtattttattgataatctcacatgcaaagagtatgagaaaattttactaaataaatttaatattataaaatacgaaaaataatgttgtactctggtttattttttatttttttttaattttttctaattaaataaccatttatgtgtcttattactattactattatttgttgatgtgtttccgtataaatgacacaaataattaaactaaaattttaaaaattaaaatatatcattacacaatcacatatatatatactaggtgaatgtacgtgccgagccacgtattgctagtt

SEQ ID NO: 228653 - DNA, 1090 bp, Cannabis indica
ccaaaactgtcccaactggcagattggttccctaactggaagaccgattctgtggggttcttggggaccaactagaattcaggttcctacaggtcccactgaaccggtcgaccggtttagtacaggaaacacccaaaacctttaaaacaccacaatttgatcctaaacttcacaataacttctacaacacctatttaggttacaacaaacgtaatccaagcaacaaaaccaaccaatacacctagaatcgaaatccaccattagagagcaaagcttgagttcttaaacttaaaccttgctcaaacacaatctcaagccaccaaacaacaccaaaacagctcaacaaacaccaatataacctcaaaatactcaaacaaaagcaaaacacaactataacaaccctaactccaaaatcaagcacaaaagctagcttagaacttaggaaaattaaagagaagggtgctaaggggttataccttgaattgaaacactaaatccttgttagaattctctgaattgaagctaaaaaactagattcccttgctgcctcttgagggttcgaaagagagagagtgtgagttgaaaagagagagagaaaaataaacttatctaattttctaactaaataaaactaataaatctaatacttatctaacatatatgcttcctataatctgattattcaacaaaaaacacaccactacaagacaaaagtataaaaatggtaaaagatcatcttgcccttgcctaagccaaaaggtaatcttactacttaggggtattttggtcatttctaaaacgtcaactattctcgacattctcaatgcctatctaagtttcccggctactactaaaatactaaaatgtgattctattggccaaacactgcattccaatgttgctgggcataaaacataaaattttatatatagcataaataatacaccccgaattcaaataaatctccataaattcataaatcatatttagaaatctaatttcataattaagccttaactatctactaattctatattaaaattaagcggtctttataattatccccccgttaaaaggatttcgtcctcga

SEQ ID NO: 228654 - DNA, 664 bp, Cannabis indica
attaaggtcaacgatgacatgaatagctcgttcaccaatataaagcaataattgggagaaagtctcaagaagtataccaaaggattatgaatgcagcaacaaaaattaaggtcaacgatgacatgaagctagtggccttaacttcagagatatctaccatatccctattatggggagatttgaaaagaaaaaagtctgatacttttttagatttcttgtccatgcttatggagtacctccaataccatcaacaactgtaaggagtgttggaaacttattttactgggatctagatttactaacgtgtatgttgcttatataactataatctaacatcctaaatatgaaattcctaaaaacaataaataaactcataagagattaagaaatccttaaagtgttggaagtggaataatatgactccttccattcagatctctagcccttgattcatgtctgtggatgaatcaagggctagagatccagttgctttgacatcttccagttgccaacagtggatgcttgatgttctctcccaggtccacatgaggctcaccaatagctggctcgccaatccctgactttgtttcgcctgcataatatcggggaccaaacctaatttcgctctgtataggttgttacgtgttgacaagaccttttgttc

SEQ ID NO: 228655 - DNA, 1295 bp, Cannabis indica
cgggagatcaaacctaatcgttaaatttaacagaatattcttttatttgtaagtgtattctgttaaaccaagaaatgtcgttagatagagacttttaatatataaagatatacataaatatttatggggacttgaagaacctagctacttgagtagcttcaagtagttatattttgtgaattgaaaatttttagataaccaatttgagttcacaacctaccgacagatattgaaatgaccatagaaggttgtgcagaaatattaaattcatgattacaacatgcctgaacagtgtttaaaagaaaataaacaaaatgaagactaaattgactataaaatcacaaaaaaaacaatatatgttcagttaaaaaaaaatgaaaagacaataattgaaagaacatactgattaggtccatctaggaagcgtaaattttgtcatttcaaaggccaaccaatttataagagaaaattcatgcaaataatctttttttgaatgaatcgattacttaagtgcataagagaaattaaaacaaatataaagtactaaattcgaaataattttaggaaatagcaacataattgtgtattattgatgaaaatctaatataaatatacacacaaaacccaaaattataagacacataagatatacatgtataatttaatttcacagtcaaatgaaccccaatgagaaaaatttgaagagaaagacaaccttactctattttttagcctaaaacccaatatttcataaccaaaagaaaaccctaacagagaacttactatcacaatttaaagaaaccacaaaataaaatttgaatattaaaacccttatttgagaattaaaagaaacaatttatccttacaaaatcactatcgtccaagcaaatcttacccgaacagcttttgaagtaattttcccaaaaatggttatattgcttcaagtatacgatatacctcgaaagatggttagatttttcaacgcctaattcctcggtagctatgatgttgaacaaataatcgtttgaaaaggtgtatctgtaatttttctccttaaaatttacgtttattggcgtaagtgttaaagttaatggagaaaaatatcaaaaggttaaaccaacatttgtcgttagatagcaacattttttatatactagtatctattctatataaagtgtgcttatataatcgaattcttagtttttaagaaattcatgggtgactttttagttatattaaaaataaaatagtttattattaaaaataaaatggtttgtgagaaattcatgggtcac

SEQ ID NO: 228656 - DNA, 1474 bp, Cannabis indica
gcaatggagcatatggagaatcaatatgggaatatagaattggatgatgaggaggagtgtgggattgagattgaggaagatgtggaggaggcgatcctggtggatgaccggtggtgtttggtggggagatttttgaatgctagatcaatagattttgacgccatgaagcacactttggctgggctgtggaagccgggaaaaggcttgtttgtcaaggaattggggccgaatctttatctttttcaattttaccatgagatcgatatcaagcgagtcattaatggcagcccttggacattcaatcggctaccattgatttttggcagagtcccgcggggtggagatccgaaagctgtaaagcttaatcagcttgatatgtgggtacagattcatggtctttctacgggatttatgacggagaaggttgtctttacagctgcaaactatattggtgtctttgtggaatcagatcctaagaattataatggtctttggcgtgaatttcttcgggtaagagtgacagtgaacattgatatcccgctgaaacggcggatgaagcttaaaaaaacaggcggtgattggttttatgctaattttaaatatgaatttgctcctacgttttgttttatatgtggtttaattggacactcaaaaaacttttgtcacaagttatttgacacacctgaggaagagatcgttaagccatatgggagcttcatgcgggcgcaaccacgaaggaaaaattatctattgagctctcagtatttgcgtacgggtacggagttggatgaacaatttgcccaggcgcctccggtgcaacaggaagatgaatttgatcagccgccgttgcaaggtgggaagtttccttgtttggaatttgacagtaatcaacagtcaacagacggtaatgatgctcctgatttggaaggtgatgggactattcctattaatgagaatttgactaatcatgggaacaacaagaatgtttccatttctagtgctactgaaagaggaaagtcggttgtttttggaaatcatgtgcaaggagggaaggggcagccttctctttttcttggtggacttgtcgggccacatggaggactagggggccgtgggccttctaccgattctaagaaaagacgtcaacatgaagggataggtgggcctgaatatgttgatatggatgcggaggatagtgttgaattggctgttgatggaccctcaaaaaacgggttcgaggtgggctctggtttccagacccaccgggcattatgagtacgttaagttggaattgtcgtgggatgggcaacccacgggcgatacaattccttattgatactgtggcccataagaaacctgattttatctttttgtgtgaaactttgtgtcgtaaagatgtgttggagcgagttcgagtgaagctgaaatttgaaggagtgtttgcggtagatgcatgtggtagaagtgggggggt

SEQ ID NO: 228657 - DNA, 750 bp, Cannabis indica
caaaggagaggttataccacccagtatacgcagtacacagggcttacggacactcaagaacgagtatacttcgcgactcagcaaaatactcattaccgaaaacctcttcctttgcatcgagacagttcttggagagatcccaataaaaggtgcgactattacaatgacatcaatcacaccactaatgagtgcaaaaatttgaaggatgaaattgaaagtttaatttgattgggccacatgtacgagtggatcaagaatagtttgccacatctaaacccaggtcaaaccggagtcctagtgcctcaaggaggacccacgacaacaccagagggacaggtgcctcccaaagaaatgccccatcagcagaaacccggacaacctctctggacaaatggaagggtcaccatgatctcaagaggtcctcacatacggggaaccaccagaaatgagctgaagtgttacgctaggactctagaacatgatagtgagattcgggaagttactcagcttccggcctaaaggccgagacttatggatcaaccaatcaccttcactgaggaagatgcaaagccagtacgctttctgcatcacgaccccttggtcattgagactccaatcgcaggtcgtggcaagaatattggtggacaacggaagctcagtgaacttgttgttcaaagatgctttcacagccatcgaactcacttatagagatctctctcccagcagttcacaactcacgagatttaacgg

SEQ ID NO: 228658 - DNA, 956 bp, Cannabis indica
ttttagcgaattccagtcggccattcacgcttagtggctcacatcgctcagcgcgaggtgaggtcttgagcccatccagaggttttggtattagctagcctggtcaatacaaattggtgcccaggggcattctcccttccacgtgttagcctgccagatgccatgtcatcagtgaaaattttgggataacgtttgtccctaagtctgcgtggaaacttctagttgtatgggggctttctatgcctcacatgttgcacgactaggtggtaggcgtttatgcccacgtacttgcactgatatgtcatcaatcttgcttgaagcgtgtgaatcattccttgtctcttcaaatctctggattaattgtgctgtcttagaaactgcatcttagagatcgtgcactaacagttactcaaacttgcaaatattcccgccaaacttcaataaaattcttcggatctgcctccacaaaaacccccaacatagttccctattgctttaagcattgtgtcaaacataaagcttgggacaaaacaccatgaacctgcacccacatgtacaatctgttaagattacgggaattatctccttcattaagttgttccaattggttacatgttcacgggctaccctcaataacccgttgaatatccatctcatggtagaattggaacacgaacaggttattctcaagttgcttcacatacatactcattcttggtttccataaagaagctaattgattctgaacaaattccatcagcttgccaaacaaaaactttctcactaaacaccaccacgcattgaaactatagtttatttcaatctcctcccccacctcgtagcctccctatacttcctcctccaacgttagtttagcacaacattcttcaagactctgaataatgaactactggatgccataacaaagaacacagatgatgttgggttttatgccc

SEQ ID NO: 228659 - DNA, 1166 bp, Cannabis indica
aggtgtgttctgacaggttggcgcggtataatcacaatcgggtacttcgggccgaaccgggttcgggctcgaaatgcaatttggattgaattattggcattttgtttattagtgattaatctgaaatttatttgagtttaattaggcatgaaatgacttaaatgcccgtaagtgtttatgtgtgtgcattttggccctaggggaaatttggtctttttgacccttggtttatgattattaaaagaaatgaattttgagaattaaaaatagaattttctagttttctctccctctaacccgaacccctctctctcttaaaccctctttcttttcaatctttatttttgtgtgaattgcttggaatttggccaaaaattgaagcttggtgttggtgaatctttgagcctagctttggagtgatttgaggtaacttttacagttttaaattttgttaatcttactgaattttatggttgaaagagcatgaaatagattgatgatgatgatatgttgcatgttagtgttcttttgttgatttgagcatgtttatgcttgaatctttgatgtggtgcttgattgagctctagatggaattttagggtatttctcatgtcttgaattcaggttattgttagtgtttgttgctggaaaattaaggttaagctatcttggaagttatagcttttggttatgaattttgttaagtaatgttcaagattggagcttaattttgtgtattggtgcaatatgaaattatgaggtttattgttggaattgatgcatgaaatatgtatttttaactctctaaaatttgttagcaactctacttgtgatttgagagtttggttgtaaattgagatgatttggttgtgaattgttgctaaaatttgagttgaaacttgctggttttctgggtttggaacccaggttccgcggcatggctttagcatgctgcgacccacccctttggatggaacctgggagttggttccaagagtcgcggcatgggttttgcatgccgcggcccaccctcgagtttctgggcagattcaagtgcaaactttaaaaattcataactttgtgatccgaactctgtgttaggagttctatatatcgttggaaagctcgtttcgagctctatgtgattatctgtattttgaatgcca

SEQ ID NO: 228660 - DNA, 1178 bp, Cannabis indica
tatttggtcccatttttctcttttttatgtttctatttttttatttatttttttaattgttttatttcagacgccgagcttagcgtagctggtttccatgttagaaggtataaaatcatataattgtcttatgattgacttttgattgaagttttccataccagtgcagtgcaacgcctttccaatatatcccttcacattcataagcaaacccataaatgaataaataataaataaagaaatcgcattcccatcagtttccataatcaggacaatttgtcaacaaatacattaaataaataatttataaaataggtatcacattcaaatacggcaatgcatttttggaaattctcaaatttggtgtctcttttatttgtgcttcttgctttgttctactactatcatactcatcaattctctctttccatcaaaatggccgaaactgaacagacccccaaatccatatatgacttcactgtgaaggtctttatttcttctgcctttttttccctcaagtatttctgtttggagtgtcatatgattggttaagatctttagaaaaagttctaaacagaatttctcttgtgtttctgttttttggggttgttttgtgctcttcttggaatttttttaattattatatttgttttagttattctaattttgtaattggatttgatttcaggatattcgtggaaatgatgtgagtctgagtgaatataatggaaaggtcgttcttatcgtcaatgttgcttcaaaatggtaccaaacatactcttttgcatcaatataaattgctctgtgttgttatcatttcttaagttaaaatatttatgtgaacaattttttatcactaaaatatagaaacatttaagaacatttgtgactctgtacgattttgtcttcaagatatgcttaaacaagtaacacaaatttctaaaggaatagagttttattgcaatttgaaagacttttacagcaaattttggcaaaatggtctttactctaagattaaattcgcttaacagtgtggatgaattttaagttttcaaacttttttttttttatgaatggctatgtgaaaatcagattaacagtgatacaatacaactttgatttttgttaatttaaagaaccattggactgaagatgaaaaatgaaatccatgtaattta

SEQ ID NO: 228661 - DNA, 1777 bp, Cannabis indica
cgtctgaaatcatccatttgcacctcattgcgtaaagcccctcctagtttgttttcataagataagatctcgttgaaatcatcaattactagccatggtgttaaaggtgcaacttgttttagtctatccaagagagtccaagtttgtggacgtagctgaactgaaggagatccataaaatacagtaaaatgcaatcgaggttgattagtgaagccaatgtaacagtcaaatacatttgtattaaaattcaaaagtgatacatctacatcatttttccaaagcaacattaacccaccccccaagcatactttagggacttctagtccgttattgaaatgtaatacattacgaaaacgagaaacaacattaggacctaacttagtttctattaaaaaaaagtacatgtggggattgctcttttacaagcaaacggagatgacaaagtgcgctaggattccccaaaccacgcgccttctaacgaaggagtttcatggttgtttgcgaggctggatcatagcctccacaacattgtcgggataaccagtagaatccatgtcaacagtagaaacattctggttttgttcatcttcaactgacaaggttggagtgaacacacttggttgattacctctacacctcttaagagtgtctcgaagtgatcctccctctggctgtctcttgacactaccgtttggagagaaattctccttgttatctccccctgcccgagttgaaacaacaaccgatgaagatgttgcaaagttggtgaatgatgcagtcaaggtacctttatttttgctcacagtgttttggtctaaaggtgggtaagtggcaaatgtgttagagttgattccaagccatgtaagtggcatataaatgcatgagagatcagtaaacatatctggtgtggaataaatgtgagagttatggccagtaatatttatcttgtctccatttgctggtgtgttatgagtatccaggcttgattgatacgcaaatttagcattaactggtgcaagattatcagtcgagatacccagtttactagtagtagaagccacatgattaccttgaacatcactgatttagtttgaaatgagtccctgctgcaccagatttgatatagcagcagtgttctgggtggtgaaagtcccacgatttccttgagcaacactggtttggtttaaagggatttgttgctgcatctggtatgaagttgcagcagtactttgggtgtgtagcatcacttgattcccttgagcatcccttggttgatgagaggcaagttgctgaagcctctagtttgttatagcaacattgttttgggtgtttattgtcacattagtctcatgctgagaagattctccttgaaataattgtctcggttgtggttgagttcgaccattgagaagcgaaactgtagatgtcaaagtgtttcgtgctaaacgtgtgagtagaggccaagcgtttcctttcgcaaagtctgtgcgataccgatcatagcctgaagttgagagtgatgaactttttatggtaggcctgtattcaaattccggttcttcaccattgtcaatcttctcaagaaaagttgtacatttgttgtatggatgaccaattcttccacattccatatagtattcgggtaatcgttcgtagcgaaattcaacccaaaattgatcccgaatttgtgaaagtgttatcatttggcctctttttagtgatttggtgatatcaatcttgactcgcacccttaaaaacggaccccatccttcattta

SEQ ID NO: 228662 - DNA, 1181 bp, Cannabis indica
tcatcttctgtattagagcatagattttctgctggatggcgtgcatttacaagagacaactctcttaacccaactgatatatgcatctttgagctgatcaagaagaatcaagctgagattaaagttaccatatttagacaaaatgggatttctcaagaataggctgttgtaattatgtatggaagttaattataagaaccaaatcttctacttatttaattagtttagctacaatttactccagttgaaggggttttgtttttatataaccgacccttaatcagtatcaggactaaaatggttgctaataaatgtacatgttattagtgttttgttaacttgtgattctcttaagccaaaatgaagacgtatcttttatagggatgttctttatgaatcagaaatgaatatgaaaacatattgagcagaattaaactaatagaatgtcttcaagagtaataacaattgagcagatgagggaaggagtggatgaaacaatttcaactccttgaaatatggttgaatttggactttttcttttctctttagataagccaattaagacagccttatctaaaccgctctatgattactcaattaacaattttatctatttatcaaaatgaatgaaattttagatcctcacccatggacttagagactataaaatactaaaatttaaaattatatgtttttgattagggattttttatgagggatggtttttttgtgttacaagtatgcttttagtttccagaagaagttttagcttttttgtgcaattaaaatggactcatgatgttaaactacctgccaatgggatcttttcaagtttgttttcttcggtcttaaccttggagagtcctctactttaggaggcaattcgtgttgtcgtgtgatattcgtgtttgtgttatgcatattgatattgatattgatatgtataattagtcaatcctaactcgactcatatatatttcgtgtcaataaatctcaatccgaataagaaataataatgtatgtgtcactttattcagaatgatatgtataattagtcaatcctagtccgattcatatatatttcgtgttaatctaaaataagaaataaatcataaaattaaagaacaataaaaaaagaaaaaaataatttcccaaaaaatttctctttttctcgttctctc

SEQ ID NO: 228663 - DNA, 886 bp, Cannabis indica
agaaatctcactataacagttaccaaatagtatatattaattgttagttaccaaataacatctattaaatgttagtatatatatataattttaaatatatagttatatctacatttttagtagtggatacgtagaatctaaattagcattcaaatccaatcagtgggtcccccaaacaagataaaatgggtcaagcccatttgaacaggtccttccaagaatgtactccagctctgtaattgtagaatcttccgccattgatagctcatgtttggaagaaggtccagtatcatgaggtcggaagggtagcgttttgccagaagactggactggtttccctttctattcctatgcatgaataagaaaataatggtttgccagatctcgacaaaggatcgtatcaagctaaatgaggaaacttcttacagcagatatcatgtaacgccctaactattaggcacattactcaagaacttttaagaaattctaatcccctagacgggattactaataaaattagcgcgaaaattaaactttaaaaaacaaatggaatgaaaataaacttgtaataatttaaacattacaaacaaaacttacatgcgtcgggatcccaaaaataatttacaaaatacttttacaagttcgtttccactagcccacctaagcggcaaaacagagttacaaaattcatcattggtagaccccaacccgcttggtctagggtggcctgagcatgtacatacaccatccagctcccatactcatggctgattagaaatagatttatccttttctgcactgtagagcacccttgagccaagcctagcaagacaatataaaatattgataaacatatttatcacactatataaacattaatgtcatt

SEQ ID NO: 228664 - DNA, 2023 bp, Cannabis indica
tatgaatcaaaggtgaatgattgattgttcttgggtgttagttgttgttacagtccaatcactcatggctgaaatgggagtggaggaaaacagagttggtccaaacaaaaaaagacttaaaacgaaatcgaatatggttgatgaggaggacagaatttcggaactacctgatgagattatcatacacattctgtcgtttcttccaactgaggatgttgttcgtacatgctttctttcaaagcgttggaaactcatgtggtatttggtccccaaactctctttttacgaacaaggccacagaaattttgacaattatgtcaacaattgtttgaaacatcgcaagagaggtatggtttgtgacccgaattcagttataactagttttaaggttactaccaacaactatagaaacgacactagtttagataaatggttagattttgcagttgagaacaaagtcaaggaaataaatcttagcttttctggagattggtcttcttcttcctactactggttacctgaaacactagtagttaaggcaatatatttgactattttggacttggctttggtgaggttggattctcgttactcatttagttttccatccttgaaatcattgtcactaagtagtgtttggtttgctgatactgatacggtagataagctcttgttgggttccccttcccttgagaatttgcagttagatttcgatgtgtttagttttagggattgtctccacttatgtagtgtaagcctcaagtttttggatattaatacccctaataatattggggtggaaattgattgtataaatcttgaatctttgacgctacaaggttttatctttgacaaaataaatctctcctcatgcagcaaagcaattagaaatatctcattaacttgtttttggggtgtggtatcatcatcgttagaacatctcatctctagccttcctctccttgagaatttgactttgagcaattggcatccgtggaagttgaagcacattaagatctcaagtcagaccttgaaaagtttcaatctgaatcattctgattctgaggataaattgactgttttaattgagtcagctccaatgttaacatcattttgttatgatggtaatttcaaattaagtgtatcaatggtggagtcatgcaatttgttgaatggaacattcatactggcaaataactatgacaccaattggtttgttagtatggtgaattttcttcaaaatctcaactgttcctggaaaagggtaagcttacatgtcgactcagataaggtatatttgtcacttaatcgctgttatttcaaatttatatatatatatatatatacttgtctgtttattgatatttgttattttttttttatatacatatttaacatgaaggctctcatcttgccaaaagacttgaagaggttacattgtcctcctttgattaattgtgagcatcttagagtttttactaaatgtaaactggcaagggaatccgatttgagagatgttctgttgtcagtctgtccatcattaaagaccttatctatagcagaaggggcgcggaaggggcatctttgaaagactattgaacatattagatgatgtttataggtagatgtttgatcgctttgctaattgctaggttagtgattttgagattgtatctactttataggtaatttagtactaatgtatttgtataggaatgggatttgttgtctatatacaatatatatttatatatatttgcttttgaatgagttgacatgatatatttatttctatatttaatgcaattttctacaaatctatgaaacttagacctcacactgattagaaattagatcaaactaagaattgctcttgtaatattcaaaggctgtgtaggttactgttttgattttctttatatatttttttaatgtagacatgggtctttaatctttctgttgtgtttggctaaacacttgagacaacgtaacatattccaatcctacaactcagctacaaact

SEQ ID NO: 228665 - DNA, 2632 bp, Cannabis indica
aggaaagttcagctgaaagtgcaacattccaaataaggaaaagagcaaccacaatccgaatttataaggtaagaaatcgaatatgaatgcacaacaatcttaccataaatggaaaaattattttgtcaactaacttgcaaaaaaaggagtttacatataattttgaaaattctgtaggtactaactgttaagtgtaaagtaaactgtcacgtgacaattcttgattggtccaaaattttttattttttttaaaaaaataatttcaatatactaataagaaaatgacacgtggataatgacttgacattcaaagttcaggtacctacagaattctaaaaatatatataaaaaacttaaatatttatttacaattaagagttaaacttaagtatttataccgcaaattactctaacttaaaattttgaataaagaaaaatgtgattttctatgtatatgtctgattggtatagccttttatttattttatttttgttaaataatatttatattaaatactcataaaggtacattgtttcttttcgagctccaatcctcttgtgtatcgttttagcattgctcatcgaattaaggagataagacaacagttagatgatattgctaagaatatggaaaagtttgatttgatcaaaactcagctgaaaatgggtcaaggccttccaatgaatggcaatagggagatgaatactcactcctttgttaaccctgcagacattattggtagagatcgtgaaaaagaggagatcctaaatatggtactaaaggaccaagctcaagatcatgacaatcaaatcccgattatagctgtaattgggattggaggtttagggaagacaacactcatcaaatcaatatacaataacgatgcaatcaaagaaaagtttgatttgaggatttgggtttgtgtgtctttggatttcaatgtgtctaaaatagtaaaagatattcttacagatgcaactggtaatagcaatgccacaagcaacttgtccaatttaaaccagttgcaaaaagttttgacagacaccttgaaagataagaagtttctacttgtattggatgatgtatggaatgaggatttttttaagtggcaggatttagcagaattgttatcagtgggttcgaaaaagagtaaaattatagtgacaacacgaagtagtaaagttgcttcaatcatgggtggaacaaggccttatgaattggagggtcttcctcagaaggattctttgtctctttttctcaagtatgcacttggaggtgaagaagaagcatcaaaatatcatgaactcaaaagaattgttgaagaaattgtggaaaagtgtagtggggttcctttggcattgaagactttgggcagtctccttcgattgaagacttaagctcatgagtggaaaacggtaagagatagtaaaattcgggagttagaacgagaagaaggtcatattttacctgcattacgattaagttacaatgcaatgtctccatctttgagacagtgttttgcttattgctcaacttttgaagaggatagtttgatgtcaagcattaatttgattagtatttggatggcacttggaatccttccttacctaaaaataaagaggacctcaaagttattggtgactccagctttgtagagttgtgcaacagatctttctttcaacttgatcctcacgaagattcttttgaaatctcccaacaagtgttcagagtgcatgatttaattcacaaccttgcatgttcaataacccaaaatgagtgctcaattgtaaattccaacgacgatagagagatttctgatacggtaagatatttaagagttgttatcaatgagaataacttaaaaaagttgagtaagctaaagaaactaaagagtattcatattgaggataccggagatgagaaggatgaagttgtgcagttattcctttctacatgcatctcaatattcaagcacttacgagtgtttgatttgtcaggattatcttttgaggtgttgcctaattctattgggaccatgaagcagttgagatatcttaacttgaatggtaatagaaatatgaagagactacctgattcagcttgtaagctgcaaagtttgcaaactttgatttttgaaggatgtaagaagctagaggaaatacccaagaatatagggagtttggtaagcttaaggactctttgcttaaccacaaaacagagctttttggcagaaggtggaattggatgcttgaagtctcttcgtttgttgattattgatgaatattgtaaaaatttgagatccttgccgcatgacttgataaattgcactacattacgttctctctttgtagttgtttgtggtaaactcaacttggcaagtgaatttattaataaagatgttcagttgagcctccacacatttgttatttatggattactagagataacagaattgccccaatggctccaacaagctgctaatgttggattaaaaatcctatgtgggcacatatgtataatgtatatgctattataaagtatgatacaaaattaagtgaccaattatggtatgggtatcaaaagggtattaaattgtcatggaaataatgtgtagataccataagttaattt

SEQ ID NO: 228666 - DNA, 1156 bp, Cannabis indica
aaaaaatgatagaaacatgttcattgggtttaataccattctagaccctgtattttgcaaaattactaattagaaaatggtacaaaatagtaccctgagctcaattttttaataattttttttaatataaccaacaaatttctagcacgaatagaagcagataatatacccaattatgtcataacaactctacattttgataaaaaatcaatccagggtactattttgtaccatttttaaaaatacgaaatccaatttgtcatataacaaaacagtccaatcggtaacttttacaaaacacagtccaaaatgatttacccttgttcagtgacaactcttcatctaaacaagttaaaaagaagaaaaaaaaggtcagtaaaatcttctctttgttttccttactgaatgttgcaacttgcccaatgaaaacgttaatttagtagcaggtgcataaaccctgagtattttatttccttatcttctctttgtttggataataatatatgataaatccatgaattttccatattatcagggccaggttcacaacaaaattataaagaaacgagaataatatgtttaactcgtgttcgcaggtcgtgttcgtgtcaaaacccatgtataacaggtatatgctcaacccgaacacgacccgtctaataatcgtgtcagaaaatgaaacctgaacacgacccatttataaactgattgacacgacacgacccgtgtaacctgtttataaacatattttgtttaaacatgtcaaccaataacaagtttatgaagtatataacaagtttataacccatttatgacatattgaaatactaaaataactttaaaataaatatgtcattaacgggtcagtttcgtgttagccgtgtcaacccaaacacgacccgtttattaaacggattagacgagtcaacccgaacataacccgaacccacttaaggcaaaccgaaacccgctaactctcgtgcgggtttcgaattgtgttatcgtgtctgatccgttttgtcagccctattaatgagttgaatttcatatattgatatcatatcaagcacaacagtcattgtctaacatcaaacatgttgactgctgggagattgaatctgactgcagtactgtaattcatgcggtgcatggcaat

SEQ ID NO: 228667 - DNA, 1134 bp, Cannabis indica
ttatgcatatcgtcgaattaaatcaaagcttagttactcattctcattttgattggttattgaatacatgttattgtcgctaacaattattgaatttacttttgttatgaatacggtaaatttcttctagttttttttttttttttttgtttttgtgtggaaagattcattgaggataacctattgtagtaaaacaaacgaacttgttactaaaattgttcgactattttctttaatctaataatttaggggaaaaagaaaaaagaatagtaatgaaaaagctcatagacaaatagcaaattgaattgttttgatatgagaaaaatattcaaatattaaatgggtcagatttgatatcatgacttgaaaatcatatgaaatttaaagatttaagtttgctttaaatgggtttagatcattttaaagttaacgtcatattggagttcacacagttgatacaaattgactcgttaatgacatatttaaagtttatctagaattttaacaaattataaatatgtcataaatgtattaatatatatgtcataaacgtgctaaactgatcattaatagattaatgaattgaatttttataataatatctatttacaaacaggttacacaggttgtaatatgccgacatgtttaggtgttattttgttgacacatttattaaatggaccatgtatgggtcaagcatatacctatgtgttgactaaattttttggtgactaaacaattacgaagactttagatattgacgaaatatttagagagaataaagaagagatttttacgtggttgagcgttaattaatcttagtctacgagtcactgtatcagagttgcttggagaaattacaacaatgggagttcttgaaatttcgatagcaaaatagcttgagatcgaaattcaagatcccctatacagtggagtgatgacgctatttatagatttccatctaaggtgggtcatagtaagcaagcccagttacacactaatattcattattattacactaatcgagtgattacacatagtaattaatggttggaggagtgtccctaaagctaattgaagttgataaatgctttttgttgactcaaaattcggtcaactgatagtggagcctta

SEQ ID NO: 228668 - DNA, 1968 bp, Cannabis indica
gttaaaaagtaaaaacgtactctgacactcatttaatgtaccctgagactcatctaatgtaacacggaatacattccgtgaaagtacattgcgggacaaaatcatattcctatatttctgttatgatacccattcaattttatatggtataataatcttttcatttttttttattgatatcatatatatttaataatttacttatacattattttatggttctttcataataataaattttattttccttctcaaaaaaaataaattttattttcattaaacataagatttatgatgcctaaagcttttagctttgatcattcgaatgaaattattggaaaatacatcaaagcaataaaaacgtaagattgtgtttagttaagagaaataaaatataaaaatataataagaatgagaataataaaaataggaattaaatagaataaaaattacaaatatattataaaatagggtaaatagcggcataagtacccaaagttttaagtttgtaagcggcataaacccaatgtttatttttagccgcataagtactcaatgtttgtaaaactataattttcctctagttttgtcagtataaactccgttttggatttattaaatgaacatttggaagtaactgatactacatgtttctgtctagaccgaataatgaagaatctagaccttatatgtggtatgtttaagaaaataacagagtttgtattgacaaaattagagaaaaattacagttttacaaatattgagtacttatgccgctatttaccctataaaatattataatttagaaaaagaaaatagataagatatgagaattctctaagtattttatttcaatgagtgatctcttatttatacaaacatgagagtcaaaaattagtaaacgaagaaaaagagaatattaattataattaatggtaataaataaaaaatttggacatccatatatttattaatatttataacactcccacttagatgtccataataactgcctcattaaaaacctcaccaagaaaatccagtgtgacaaaactcgatcaagggaaaaagtgcagcatgaaattactctccctcattttggcattcatggagatcttttaatcgacgcattctaatcttgtggatcattatctcaaaagttgatattagtaatgactttgtgaataagtctgtaagattatcggttgttcgaatttgttgaacatcgatatcactattctcttgaagattgtgtgtaaagacagaatttggtgaaatatgtttagttctatctcctttaatgtaacatcttttaagttgaacgatgcaaacatcattatcttcatagagaattgttggtatttctttattggatgttatccacgtgttcctcgaatatgttgtgtcagtaatcttaaccatacacattctcgacttgccacatgatgaattacaagtatctcaacatgatttgaggaagtaggcaccagagtttgctttgttgactgctaggatatagcaacaccactacaagtgatcaaatagcaactttgagatatggctttatgtggattagataaatatcatgcgtctacgtagccaataaattgtgaaccatagttattagaatagaacaatcctttatcaatagtaccctggagatactgaagtatgtgcttaattccttttcaatgtctatatgttggagcagaactaaatcttgctaacaaaattgatagagaaagctatatcaggtcttgtacaatgagtaagatacatcaatgctcttattgcgctaagatatagtatttttggactaaggagctcttcatgttcttctctagatcgaaaaagatctttttccacatcaagtgatcaaactactattgggctactcaatgagtgtgatttatccatttaaaacagcctccaaatcttttcagtataagttgactgatgaatgaaaat

SEQ ID NO: 228669 - DNA, 929 bp, Cannabis indica
taccttaaatatcaagaaaataccaaaaatgagccttcaaaaaaaacttcccaaaaaaacagcatgttgtttttctaggccactgctaggaaaaacggtaggccgtttctgagaaaacattttgccattttctgctgcaaaatcttcaaacatatcatctcaattccaaactaacccaaactttgtgaaactctccaaaacacctaatttgagtccaacaaatatatttcaagcaatagcaacaactgaaacccagaaaattgaaaattaccattgttcagccaagaactcaaactttctcaatacctcaaccagttatcaaaacctaatgcaaagagcatcaaacaaccctaaactaacccaaaatcaaacctaaacacctatagttcggactttacctaactctcaaaattaaatgcttgatccaaaccaaaacttccaaaaatcaaagaaaaagggttctagggctttaccttttagtttgctcttctaatttcccttgaattgttgccgaattcctcaaaaaattattgttgaaatggtccggacttctggtttccttagggccgaaagagagggaatgagttttaaatagagatatgtgttttgttttgatattatctaacttaagaaaataaaataattcattaattattattaccttacttaattcagttagaaaccccttagaatagctagtgacttactaaaggacaaagctaaaactcttaggcaaattatcacttttgatcttacttgccctttaagtagtcttaaggcttaggggtaaaatgatctaatatcccaaccccgcctaatctcggtatccaaatatcaaataaacttgccccgctaactaaaatagttttaaatcaaactcacgtgtctctaatagccaaaatgtcgtatttctatcgttaccgagtaaa

SEQ ID NO: 228670 - DNA, 581 bp, Cannabis indica
tgatcgatgtctcgccatttttaatgcagaaaacttgtttggatttggatggattgcccaattaccattctggtcaacttattctgaaagctgctgcaacagtgggaagatctgattgtcctctgattgcagaagctattgactaagaattcaagttcccagctagattaagaggagaactgatgtgccaggaagatttcaccagcagtctgctatcaaatttttggtgggagttggtgcaagcattagcttgttctactgatttattttgtccaaatggtttaataatttcagattgtaaacgattacttgaaaacttctctgatgttgttgtttcttttattaaacgcggtctgggaacgaggtaacttattggttatctcgctcttcatattctagtcctgatcgtattatcattgagtgatttgtccctgttgagttcattgtcatcttattggtagtgttaatgaaattgattattttctgcttaagaaaaaaaaacctgtactaaaatataatataatatttttattgacaaccattttatagtgtattattataataatatacaatgtaatttt

SEQ ID NO: 228671 - DNA, 957 bp, Cannabis indica
gtctctcaagcttgaattgaacctagtgttatttccctcgcagccaacataaatgctttggtacaatggaaaaccgatttgcgcccttacgtaaccattgaggaacattctttgttcattattccatatcaagtcatttaaaacttctgccatctctgctaatcgagtaacattcttcttagtaattgttgtcaacattattcctttcatcctcacccaacaaaacatcttatcgagttttgcatccctcaattgccccgtgtccggccaatcctctagcaatagaaaccaccattaaagattcatggttgtttttcaaccactactcgagcatcctctcgagtttttaaggtaatcccaacatatgaactgtcttcgtcttcttcaaaaaccttaacatcctaatctgagattcctttccacaatcaattgaagatcaatataaattggtatttcttcatttcttgcttggaaatgattctatccactagtgatcttcctctaaatgatgcaaccgcctcctcattcctcttttagttcaaccccaatttgcttgtcatggatacattaccatccacttctcctgattgattacctacaaccattaatcccaatagtaaccacaagttagtcatcattcttagtccagtcgactatcgctcagagagctaaagccaatttttatctatattgaaaaattcataaaatatgagtttaaaatttaaatttgcaaaaatatgatatgtttaattccataataaaacttagaaataataaagaggaaattacactacatacttcttttgatttgatgcctttaatttttactctttttaaaaatctattatgttcacctcttttcttatcattctaccaattttacttctatcactttatgataatttttattattctctaattaaaattttaccccgtacaatacttataaaaagaagt

SEQ ID NO: 228672 - DNA, 1334 bp, Cannabis indica
gtcctggtagaagcagattgataataagtgaatcaagatgtgatgattggattaacaaaatatctccaagatggatatttcatgttctcttaaatgctgttttggattcagatgcatatctccttcatcttgaggtaataataataataataattacttttttatacttgcatatatactactaaatactaatatacttccacaaattatattacatgctaattaatccctaattagatgcaatttttataaataattttcataataattcaaaaaaaaaaattacacttctaactgttgttttcacacaagaacattatttatgttgtttgcaattaatgcttttatatttatattatattgttttctaattactaataggtaaaaaaaaaaaaaatagtaaaaatatatgtcattttaagttgtgtaaaaatttatttatatatattcatgtataatatagtaacttattgtgcaagaaatgagtaggggatccagaaattttatttacaagaatgtagaaaagtaaaatatataaatttagggtataaatgtcaaaatatatatatctacaattaacatactcaattctaaaatttagggagacataaatatcaaactatacatatttattgtaacactaaattgcaaaaatacatagattgaactttttaaattagaaaaataaagagaggggcaacaacactctcatatacttggatcgatcaacgcatgaaattatatgaaaaacagaaacgttcctaacaatatgagaaaaaaatgatactcgtaactaatattgcttgttgtgttgaatgtaatgcaggagcgtaaaataatggaagctggagttgggaaatggaataaagcatgttttgtgccaacaaaatcagatgctcatattgttgcttttagaaaatggcttaacaagtatggtggtggccaagttgattggggtggcaaattctctggtgctcttccaccaacccctcctagagaacaactcatggacaggttctatatataaaacaacaaaattatcacaatattttttttgatcgatataggaaaattctatagtagagtattacttttatcgcttttcagtagggttgtttatatttttagcatttagaaaaattataactcaattttttttatttgtcgatgtatagcagttgattagatattttgttagtgtttagaatatatactttacaaaatcgaaaaaatagagtttaaacatttagttacgtatgtgtttattttcttaattcgtttttggtatggtaaattattcaaaattttctaaaaattagtgaaatacctataac

SEQ ID NO: 228673 - DNA, 1470 bp, Cannabis indica
ttgtgccatctcatcttgaatattttcaaacccatggaccatgtcactcctcatggtgttcatatcattattgagattggtgaattgagagttgatattattcctcaatattagaaattgagtgtcacacatatcaaatcaatactcatcatagtgagaaagactatgtagttcaattatcatcagaaggagaacccaggttcaaatcttgatcatactctgcgacgaaaaggatcaagagttagatatctgaacatacatgtttatttgaacttgagtaaggatttcttaatcccttatatgtttatttatcctttaggatattcatatttaggatgttagattatagttatgtaatcaacatacatgttagtaaatcaagattctagtaaaataataatttatagtatatatacaatgtacatacactatatatacaccatatagatactatatatactatgtattatataatatatacacacataggaacacgaagagacccttgacccgtgagggtctttgttctctaacatgacaaagatagggacatgaagtcccttagcatgttctgcatgcttcgaatggaccgatgggttctaaggtggtttgaatggtggtcaaaccactatggtctttgaccacttgaatggtcaaaacgaagacccgaatgggtcttaatttattgtcccgtccgcacgttagagggactaacatcccatgcatgcttcgacatgaaatgtggaaactacctttattgtcattgacgtcatggatggtcggggtccttgtaactcgagctccacacggtggtaaaatggcagtgcacggctagggctccatagaaccggagctccgtgctagcgaacattaaaccgtaaaagttacgtaaaaattattttaaaaaataaattacataaaattcctatgccacattatggcttacacaatttttctataaaattaaaaacaaatcctacacccaatttttaccatataattaacgtcaccatctcacatacattcataatattataagtgttaacgcaaattttcgttaaccaaatttgagcctcacgatgataagtcaacacaaaaaaaaaagctatagaaaaataatatatgaacacatggttttttacgtggttttgtagttaaaatgctgcatagtccacgagtcaatgttattcagatttctgagtattttttcagggcctctttcataagagctttttcgtcttgtttttaagattgtttgccactatttataattgtatagcggcatttaattataaaagctgaccaaaatatcacaaaatgtaaatgcggtgtatgattttgaaaatcgtatagctgtgattttctcgctttaactaggtcaagaatatcgtgtattaaacacgtctttaattgctgaatttggagatgtctcgacaaaaacttgattgtagtgatcccaatagcgagttg

SEQ ID NO: 228674 - DNA, 911 bp, Cannabis indica
atctaaaccataaattcaaaactcatcaatctaaaacatacacattgactttccaagctttcttatttctacacaaacatacctcagaacaagttaagatctggccagaaaccgagccagctacatcctctcttccaatatccaaagcttcctcacccgaattcgcctcactactttcaatattcagttcatttgtgttgaattctccactactggagctcgatacaatgtcaagatcaactatagcctttgtattaagagactctgctatttcattcaagtgaggtgtaattttctgattatcaacatccactccattgtcatccgaattctctacataatcctctaaatagctttcaaacttatccgtattcacttcagttctctcaatggagtcgttaatatcaccaattcctccaccaactttggacgattcagaaagcctctccaccagaaatctgatcaacttacacgaatcctcttcagatggataaaggaactgcctatgcaacgcatataaatagtctgtaactgagcataatttccaatacaaaaatatgaatacacatacacaatatagcaaaaatagccccttataagggtatcactttttgtgttgtgaacatgattatgctaaaaatatgtcattattcttgactttttattactcaacattcacattcagtcacatttatgttgtaaaacttagaagttcagctctattctgtaatacaaaagagataacttcttccaaatggtcaaagagaataaaattctgttataaaaaatagagtcaaatggtccaaaccacgactaaatcaacttaaatagtagtttggaaaagctaaccaattttgtagtgacagacatctttaccattgagggttcaactcttttaagatgattcattt

SEQ ID NO: 228675 - DNA, 549 bp, Cannabis indica
aaaaaaaaaaaaaacttataatatgttattgaatccaaatttcatgtaccaatcataaaaaatattaaatggttgaaatattgaaaattttaaattaatttaacctttatttacttgttatatatatattatttttttttttggtactaggttatctatcttattttctaaaaaaactaattttgataattaatcacatcattgagtccaaaaaataatgaaattttcttatatatatgtttttgttttctcttcacaaaatccaaagatttgaatgttgattctttttttcaatctatttaattgttaaataataaaaagacgcacaaagagatcttaggtagctagggcatcattttcactcccatgcatcaatattgcaatattttttattttggtacctaagaaattataatttcccgattcttttgacataataactaaatacattataattatattagtcaaccaacctattttcagaaaattataaataaattacactatcgataataggatcgattcaaatttgttttctttacttgcatg

SEQ ID NO: 228676 - DNA, 1614 bp, Cannabis indica
aatatgagctaggcacaacaagcccaaaagcacgaagcacaaataaattagctcgaaagcacaacgcattaaaatatctaataatttgataataataaataataaatatttatttatcaattaaaatagtaataatatttaaattataataattataagtatttttatatgattgtgtgtaactattattaaaaaaagatataaaggaaacaaaaactataaattatacatatattttagtatttagctcattaattctaataaaaatgtaaaaacatagagcacgatttgagcacgtataagaaataagttggtcaatttaagaaaataggtcggctcgaataaagcactatacgaattcgagcacagtacgaaattactggatttgtaggtcgtgttgggcctacccttaaaattgttgtacgatacgatacgactcatattttttttatggcacaggacgatctatatttttttataatctgacacggtacaacccgtattttaaaaaacatgaaaaattatgaatcagactagtacgacacgcataactttacaactatgtcttatatgggttatgtattttcttaattattattattattattattattattattattattattattattattattatttggttgagaaactctcttagaccatcttcaggctaaaaaatgaactaagaccatttcgactgaatgatttttaaactttgtacaagatttagctcaacaaatagatcattaattaccatattgaactaatactaagatcatttccaatattgaatatatagtgaaaactttatcttatatttggcttaaagtttagtaattgtactttaatgtattatggtataaattaacttacaaagctaataaataattatttttttttttgaataatgatgaaattttcttaaatcaaatcattcaaaactaaagatgcaaaatctatgggtaatgcatccccagagtaagtacaatcagcctcaacaagagaagatcgcgtaatagcatgcgcaaccttattagcagatcgcttaacaaaattaaaagaaacaccatcaacacccgaacacaaagtcatacatgtacaaaaagtatttcattgaatatatgtataaaaattattatctaaatagataaaaatttaaatttaaaagtagttaattattatattaattgtaacaaaaaagtaaataaaaaattaataataattatgacacatttaaatcgcacacataattattaattttaactacataattaaaagtaatgtgatcttcatatataattatctatgataaaaattattaaatacatatccttgtgtgtaataaaagaaagtacgtgtaattcttcaaatttaatacaacttataacatgtatcaaatttggtgcatattttatacaataacgataataaaatattatttattttctttcaaaaatattgtaaagaaataataattaatatataacattaatccattaaaatagatgctcttttggtttgttgcatgtattgtaaaattaattcataatcaatcgattcaaaaactatgtaatttagtgacctaccaaataatcattttcttattca

SEQ ID NO: 228677 - DNA, 1497 bp, Cannabis indica
atgtaaataattccatattatagtattttcttaaacttttcttcattttacaatatttttgtaaaatctctaaaaaaaaaaatatggtggggtcagtaagatctcacgatgttaggtcctaagtattgggcctatgagagtttttttgagataagttgaaaattatccttttttattatatattaactaaatataatttcaaaatagttttaattggtaaatacctttttttataattaaatatcaattataacctcacataatttattaaaattagagttactaatgaacatattgggaatatgacctataaaatttggtataaattaaagaatagttaaaatgaagagcgtctgcccactttagtgctctgtggcaattatttggttattttcaatttttgttggttttttccagtttcactctttgttcgtcctatgttcttgtctttcagtttcaatagctgcaacttcaagtctacatttttttttgtttttgttgttctctgttgggttctttgttttgtctattccttcattgttccttttaagtatggttccccttgttgatcaaatgaaatcaacaatcaacttaattgatactgaacgcagtgtagtaactatctctgatgatggtacttctgttgatgctgattctttggaccttgttcttgttgtacgcattttatcaccaaggaaagtttggctcaccacctttcagggtcaaatggctgaacaatgggatgggcgattcaaggcagttattttctaacatcattcggggttgttttttatcacgttatgctgtattggagacaaacttagagctcttcggaaggagccatggcactttcaagatcatcatattgtcttgtatacacctattgttctgcaaaatgtcacccctgaatctacggttttctcacctttttgggttcaggcatataggctccctttcttaagtaaaacacgatccttgtctaaatctttgggcaatattattggtaaatttcttgaagtccatgaagattcttgttatgaaggttggggtccttttcttcggtttcgagttcgcatggatattaagacaccattgttaagaggatgtatgattactctgccaaaagttagagatgaattttggatggtatttcagtatgaacgtcttcctgaatattgtatggagtgtggcataatcgatcattcttttaacaagtgccctactcatcttaaaaatatggacaatggaattgaatccaaacttgcttacgacccaagtttaaagggatctgcccttccatcatctaactacgacagatatcgaactatttttcgaaagggcatgcctagccacttatcactcatttggccaggaacactctaactgctacgttgccacaacttaatgcaagacctctcccaagcccaactctattatttggggaattctctactgagaatgtctctcatggtaatcggactgaatctataatggtcg

SEQ ID NO: 228678 - DNA, 1342 bp, Cannabis indica
acttcttttcaacttcattaaacttgtagcacacagacttgaatgttatctaacctagattgtcggaatccttcagttcataaatgccagtttcattttcaattgggattcctaagagtgggaacaagcaactaagaaaataaccatagggtaaggctctttttaggttaggcttatacactttattgattgttttaaggataaggtaacctaggttgatttggttgtctttcatagtgatgttatatagaattatttaatcaagtgcactcactctatcttgagggccttttctaggaataaggttagagcatataaaagcatggatgatttagccttgaagggtaaggaaggttcgtcttggttttgcaagaaagtttttacctacacaaacattattattgaaaagactatagttgaaggtgtcatcattcttaagatgaagtatatggtcaagcaagaggccatctttgggtttatttagaagatcattaagcttatctaccctattgaggattcccttaacactatttggattcccctttgaggattcccttaacactatatggatcacaatgagtttcaatgcaagtataaaaagctctaactagcctaggatagatattggtatgaatttatagcaagatttcacatcccatatgttcaaaaagtgaattgaaatcgacatactcaagagctttgagatcacattgcttaccatttagaacattcctttgtgagaagtcttcattaaactttcttgcatatttccatgggataagaggtcattccttgtcttggacctttgttccctttgtttcatttaggatctttgcctctttgctcttgaagaagaagcaaccatggttatgatgataaaggggaataggaaagttaggtttagagagtggaattttgagagaagagggtggaaggtttctaattagggttggaatatctgaattggaatgagaaaatgtttaggtagggttttataggaaaaaaggcaagtttgaaatgactaaaaggacctggggatcgctacctactacgaactggttaaccaacttgtcaagtattcaggaaccaattaactatttcctgcagcaggtttcccaaaaaagcttcaaaacatgtttcatccaaccatttgactctaaatattttctaacaccttaaaaataacaaacaaaaatgctcaaacaagaaaactacaaaaatgttgaaacttaacgatttacggtaaacttttcaaaaattccaagaaaattagaaccttacaaaaaatgagttttatacaacaaaattaaaaattttcttttccagtagtttaatgatgtga

SEQ ID NO: 228679 - DNA, 826 bp, Cannabis indica
tgaggacttgaatttcttttaatccaactttaaattttttctaataaaatagaacaattttttgataagatttacactaaactaaacacaaaatattaatttcattcaatgtcaatgctacgttttatgatatatttatatgttttgatattttaatttgatttttttttttattttatttaatatattatagctaaaatttatgaacttattttgggaatcttctaattgttgaaataagtatttattattttttttgttagaattataaatttgttaattataaatatattaaaagaaaaacatgttcaattttattcataaatgtctaatttcctcatttttttttttcttataccaattacttataaccattaggactaaataaataaaaagagaatgcccggaaaatgataaatattgacttgcccacgtatgaaaagcttcaactgaagctttttttaaagatcaccttacaatctgagaatctctatttcgttgggttaaggttcattcccaagtatttcatagggaacgacctctcttgaaaaggcagcaactctaacatggcttgtttcacttcattttgcaccccaacgaagtagaatgttgacttgctcttgtttgctacaagacctgaatagttactaaattcttgaaaggcacatttcctttgcaaaagacaattaagtcatctgcaaaacaaaaacttactaactaaatactcttaaaacattgaatggtatctgaattttgtgttttttagagtgtcgcttaagcagacgagttgaaactccatgaatagaacaaacagaagaggagagat

SEQ ID NO: 228680 - DNA, 2034 bp, Cannabis indica
aaaaaattaaactaaaaaattgttgtggacccatttgtaatattttatttaatgatactagaatttctggtttccttcttggccaaattgctgtcaagtcattacgaaaaggtcaaatctccgttggaaatcatgaaaagaaatctccacgaaatagtctcacgcacctcacttaattgttactttgaaagataccatcactaggtctacctgactgccacattaacactccatacttatcttcatagcccacctcaactttcagctctgttctctccactgccgatcttcgtcgaccccatttttcccggaaaaaatggagcttctaagccctaaataccctcctaaccacgtaccttcttcgcctgaattcgtttccgggttttcttctccagcaagtttcccagttgagtttgatcgggcaatcacttgccaggtgtctgatatcgtcgaggacgatggtgacaaggtgtacgtggcagttgggaagtctgtggagaaagcattgtgcctgcttaattggactttcagacagtttaagggtaaccaagtttgtattcttcatgtttctcagccttctcacctcattcccactcactgtaagtccttatcttttcctactattcgtgtattttggtctactgggtgtttggaatttcggaaaatttatttcaattccttgttttactgtgtacttttatgatgattatgcacaaagggcaaataggcatatacaagttcttgcttttataaaaacaaaattgatgtttataatctttgatttacttcctcctttaaattatgaatgtttgaaatgttaacactgttcacttttcaaaagcttattacggctgggaactcttattcagctttcaaaattcaaatatcataaatgtggtgtgtacatataatatatagggatgactatttattgattattgattggtaatttttagtgtaataatgatcggttatatttagaggtggcaaaacgggtcatcgtgttgtgttggtgttatattttatatgacctgcttctatattttgtgtcacgcgtgtcgctttgttttttaactcgtgtctaattttctcaatcctaactcaaccagtaaaaaattgtgttgtattcatgctgatccactgtagctcgttttgctattattgtaactgtagttttaatgaaaaataataaatttaggttccattaaaaaatttatatacaattatgtgtatatagtttgttatatatatgataaaaataaaaaaatttaaaatatttttattttcatcttaaaagaaaattaaactttatatttctaatttaattttgaatcactaaatatatatttttatataaatcatattattattattagatatttttttttttattttattatattgtatcaaattcgtgtgaagcgtgtcatgtcgagttttgacttatttttatttcgtgtcaagtcatattgacctgttttcaacctgcatctaattttcctaatcctaaccactaaaattcgtgtcgtgtcatgttcgtgtaccgtgtcgaaacccgttttgccattcctaattatattttttactttttattgaaagatattttttttacttttaataatattttctacatatatgttattattaaataaatatttattttacagaatcaaattaattatgattaattatatattttaaaaaataactaattaatatattcaatagactttttagtaattaatatttttaaaataaattatttttatatttaactttttattattatttttttaatattcaaactattgattataatatttgtaataaaagttgatttttttattctacttcttttaaaataaatttattaagcaataaataactatttggtacctatatttatttaaaaggctaattataatatttcttcccctgaactttgacatgtactaaatcgtgtccgctgaacttttttggcccttaaaaattccccccgaactattgagattgttaaatttaaggacttttgtc

SEQ ID NO: 228681 - DNA, 1133 bp, Cannabis indica
aactccttctcacgattctcttttttcagctttttgacctgctcgctcactttgttgatccttttcctaaggaaagcttcttggttcaccatcttgttgttctgctccatcttaaaagtacgattcaccccaccgtcaaaggaaacacctcaggttgagccttgtacgaaccaaagattattgcaaacactcctatagcgcacaacctgcccaactcgctcccttctttaccaaatctttcttcctctttttagttatctcttatcgtctactttgtgcctctatttataaagaaatttacttaggtatatgtgataaatgagtatttttccgttaaatattgctaaaacgtattaatgtttgttcaaaaacgcatcattatatatggtatatattttggtgcattttagtatcatatctcatatattttaatttaaagtgttaatatttgggttctttaaggcatttaaaagtaacaccacataaattgacacttttataagtgactggttagcattttttatcttacatataaaataaagggtaaatattattttggaccttatagtttacaaaaattaccgattttggatcctgtattttgtaaaagttactgattggaccatatgttttgcaaatgttaccactttgaatcatgtgttttgcaaaagttaccacaaaatggaccttgtattttctaaaatggtaaaaatagaaccctaagctcaagttttgataatttttttaatataaccaacttgaaagcaattccttacacgaacagatacagaaaatgtaatcagttttgtcgtaacacctctagatcttattattattaaaaaaaatttgacaaaaaatcatcagatcatggacataattgtaccattttgaaaaaatacagggtttattttatcatttatcaaaatagaaggtccaattaataatttttacaaaatagaggatctaaaatagtatttatccattaaatatatataatcaaaataaaattatactaatatataataatatgacactttatgtggtattgaaaatccttttttaaaaaatattaaatatcaataatggccaataagaccatatgaaggtattttatgagtggttaacaatcttct

SEQ ID NO: 228682 - DNA, 923 bp, Cannabis indica
aaaatctgattatattaaaatgatttttatttaggacacgaaacctaataatagtcccacttaaccacctataaaaagtatccaacaaactatcatctggtggaataagaggatcaagcggcgtagaaggcttgatttttcttttcattttagtatagtttttaaaccaagtaggcttgtttctcttcctctttcaaaattgaatcccctctggtggttctctaaggccagtacctcaccctgtgattggctgtcagctatggaaataatggtggcatccactggagtacatggatcctcatcaacataataatcatacccatcagggaacacatcaacatattcttccatgggatgtgatggggttcgtgcatctactgaaggatttggtgttggatctgttgcaggcttattctgtaatgtactcaaaatcaccttgagctgctccatatgtaataaggttctagccaacctcagttctaggtggctagtctagtatgcctccttcaactcaacttgacaagcgtaaagacccttctgcttagcctccatcctatctaatctctgtactaaattttggtacttcgcacgatcgagccctaaagatgatgcaacaagttcaggttttggctcaagaaaagtagtagattcgatatgttttgctacttttcttttgcttagctttgaaaatagcagggtgatgggtgtcattttcagactgcgtctcattgatacccatctcaatcactatctcagcatggttgtaagtgatttttctggcatacattcttgattttgatgaggacataaccatctcataacaatcagtttttgtttaagaaagaaaacaaactaaaggataatatccaatccagaacatatcggcaaccaatcgaaaatctatcaagaaatagacagaacac

SEQ ID NO: 228683 - DNA, 1601 bp, Cannabis indica
ctcaagattcaggctaatcagctatttgatcatccttatgatatagaatttaagtcttttatagtaaaacaacatgttttgataaatacagcttaattacacattggtctatgtcatatataatctctactatatacaatacattcacttagatgtcatactacatcagcaatgtaaagcgagattgctgtaccgaataacggggatcagtgaacagtattagtaaccgttgattaaagattccatagctttaatatgttgctgattctaggtgatcttaatttttcgtacaatacaagtcacaacctcatatatgaataagaaagtttttcaatatttataaataaattatttaatattaaatattaataatttaacattcaagcatatatcaaaatattcaactaatatttataatcaaaaatatatttacatgcttttcagggaataaacccttagttgatgtgtttcgattaatactataaatgatctttaaacaagtatgaataaaaatcacatctgatctagttctacatattttctagtatgtacttccactaaagtgtcctacactagactagtaacccgaataagttacatgtattcataatactagtgggtggtagtggtaattaatctaaagatttcgtaactttattttactgaaaactcttaatgttcaatatttcaatcacaattctctacaactacatgagaatgagactgcactggatgaactttgaaatttcttgatatttacttcaatgttaattaagtaaagttgaatattctatctctatatatattaattcaattcaattatttatttcatttaaagtatttttcaattacaattagctttaaaagcattaacaaaagttacatttagacctccacaaaaaatacaatatcaagattaattaattaattatggatagtaataaaaaaattaattcaaaattaagaaaattaatttaaaaaatactaaaattattattaattcaaaactaataaaaagttactaaagtattctaaaaatgttagagaactaaattaatttaatgcacaaaagaaactaaataattttattttcgtagacttattaagtatatcatatctagaagacattgtcaggaaggaccaccttccgtgctagagacaagtcgtccaaggatcacattatcctctttgctttgagactgaagagctctaaaagtctaccggtacaatagactctctccaaaagatttggagcaggttagtgtaacctgaacgcgacctttgataataaggactgctatagtctatccccttagggctcgtttggtacgttgtattgtgttggattgtgtggtattgtattgtattggtattatttaacacaatccaatatttggcattgacttgtattaattgattgtgtaaagttataatatattttcaatacactcaatcccaataccaattacgggtttgggtccgggtcagggtccgtgtcctgggtaccgtgttcgagtccgagtctgtgtctcgggtcccggcgccggttcccgagtctgggtcctggtcagtgtaatgaccgctttagtaatttggattag

SEQ ID NO: 228684 - DNA, 1130 bp, Cannabis indica
tggtctgtagggtcagtcatcagttcaagaagcagccagagtggcgtactcgtctataagagtcattcattccgtgggtgtaagggcccaatggaagcttgaagcggggacgttacaataatacttgtagctcaataaagaatatttctctacatgtgactgtataaatcatatagctataatatagctcatttgatggagcaacatttttcatcatttttttttacctctgagctattttagttactctaatgtgagtgctcaaatgacacctagtacctatttgaaatgaacttggtaatcttttatctggatcgccacaattgcttactttgtctccttcttaagttttagggttctatttctcaatatttagcttctaaaacacgaaacccttatataaaaaaaaatattagtatcttagaatgactaaattacaaaactgccaagaaatcctttgtttagcccatagttgcgaccacataatacttggtcgcgaccatagaacaatctcaaaaatttttatttctgtcgtgctccttagtcacgactatgaaatagtatggtcatgactatatgtcaatttccagttttgagatttttttttcctccagtttgcctcgtctttccactagttagtataatttgaacgttaacactttgggaacctaaaataaaagaaatcaagtgtaaaactattttaaaagaaacattaaagaagaaaacaacttcaacatcgactaaaatttagactaaaaataacttaacaattgtctttctttaactaacggtggtctccctcttcgtcgtcgcaccaaacaacacaacaacaacccatccactcccgcacaactctcctctcctccctctttaggcggtgtgtgatgtgtgattactgatttttcttctttgcatttatttcctctttcgagcagttgctaattgccccccctctctctagctctctctttttgatttctgtctctaagcgctcctccactggcacttcctcagaaacctgactatgccacttgaacctgtacaaatccgtctggtcgaaaagcaaacctgatcccagtcaaatttgagacaataacgagcaagttcggttattagcgttttctcacacc

SEQ ID NO: 228685 - DNA, 1052 bp, Cannabis indica
attacttgtttgtgattgtgtacacttgcgcaattataaagcaatataattttcacaacaaccatcaaatgaaatgtgaataacccatcctcctctctttaaaacaaggggcacttctggttggttctgtaagtgcgtaaagcaattttgtcttctccatattactatatctctagattcaataattttatatgaagaattactgaactcaatcacttgttaccattacttttcaattttctattaaggtctatcctgtaaaggtactcaaattgaaacagtgatcgatttctaggtttttttcgtaaacctaattggtcacttccaattatgcaaatcaatagtttaaaccgcactcaaaggtagggcattttccatttatataggaacttctatactagaaaaaatggtatctccaattagagctcctctgggatgtaaaatatatcttttttcaccacccccatagtgtatgagacaaatgtatgcatttcgattggggtcgcattctatagttatgattttaccatatttgtctttgtcatttcgtcaaaatctattttatggtatagacacttatgacctgcccctctgtgcctacaataatgattcctctggcattatgacctttaccacaacaatattgtccatagatcaaattattttgtggagtggattttacttgcctgtctacaactcttttgcatgtgctcggggtaaaagttttgcataaatgtattgccatgctattaagtattttgatttaagctcttttcgttataagagggggaatagaataaccttgttgaagcgtaatgatcatacatttgtaatgcattgtatgtcccatgataggttccattcttctaccctttcctgttagtcgatgactattcatagttattaccttgacactaaaagaagagtttgacctaatactctatttttgtcctagttgatcctgatttaacattagaagtatattgatttttcaacaataactgtatacttttgtctgtaactacaaagtatttgattccatccataaattt

SEQ ID NO: 228686 - DNA, 1344 bp, Cannabis indica
ccatgagagagtggatgcaggacgaaacccacgagtctgggttttatccttagactttgggtggggagagctttctttataactcctagtgatgtaatcgcgaccctcaattaggataatgccaagttagagatgggctcctcagcctcgttgtatccttagtatggtagagtcacatgagtccgcctcttcttcctcctcatcgccaactagacagactttgccttggtcttctacctcttatacttccttgtcattaataagcgcttcggtgccttctttaggatgttcggcacgctcgacattagccattgccatcaaccgagaaaaatgacaatcctcagtcgataacctcctctaggtctacttggtccgcaccacctacttatgtctgaatgggtgctttggctgggtagtgtgttatgcaacgttcactacaatgtccactagcacaaagatattcctcaaaagctttagacaaccttcgggtagggtacctagaacgtctactcgtaccctgtatgtccaagatacaggaaagtattgtctctaacctctgtttaactctcaaataaacatgtcgcacccttctccactactttggtcggggtaatagtggtgttgcaccacaggctctgaagactccgatgagtcaattgtaacctcccaaacgtcaaacctcgaggttgatgaatcttggtgaggatgaagtttcgcagagcctaggtgatcttcatgaagtagttgaagcaaatcttcgtttatttggtgcttaccccctagaaattgtcagggttcatctacaaaaggaaggagagaaaggtgaaaaccggacagatagaatggcttttccaaaggaaaaacattactgatgctctgattagaaagatttaaggttcaaaggaaggaatcctcgtcctaatggcaaaaattccaaagcaagcaggttcaagaacacaggaagaatttaggaaattcccagatttgccgagtaagaatttttaagcatttttcagtaacatggtttggaattaacaaaaaataattaagaatcataagttgtacaagggcattaaaactcagaacgaaatcctaatatctaatgtcgaagaacagttcaactgaagctcaaatttcacgaaacgaattcaagccatagataaaatgcaaaaattttaaaaaaatactcaagaactaaaaaacttactcactattagaacatcctggattatgacttgacttaatctctagatattgccttaatgctcttctaaaccttggtggaaattttggaattctggagctaaaatgaaatctttgatactgctcttaagtttgaaaatg

SEQ ID NO: 228687 - DNA, 2133 bp, Cannabis indica
atgaggagaagtgtgcatgcttctttctcttgccaaaactcccaacacaatgcatgccaaccgaccatagcaataagtgtcaccaaaacctgaagcacctggttgaccactcaagtggaccaccgagactcggccaatataaggccgactgtcaacctaccatggccataaaacgccaagctcttgacagctttatggctgaacataaaatcatatctctcaaaatctctcaagattaaggagaaaagcaagaacaagagaagaaacaagggcaagagcaagacaactcaacctaaaaggtacattgaccacctgcctgatacaagcatggccctcatgacacctgggggcaatggctgcacgagacaattaaggtcaattttaaacttctaacaatgaggttgaacatgaagctctgattgctagcctcaagctagcacacgaaatgcaggctgattacctaaacatacaccatgactttcaactagtcgtaagttatgtcctagatgaatatacagctcaatgcaaaagatgatggcctatttaagataattttaagacttgttaagtcagctcaaaggctatactagaaggaaagtccctaaagatgatgcaacaaccgatgcactcccttaactacccagctgcaccctcacaaccaaggtaaacttggtacccactcagttcttcaaagaaataagcatccctatttcaaaaaaaaatagacatactggacaaccaacatggatacacctacaggagcatacctccaaacaaagaccttgcaataaagtaggggtaagggggatagatgttgggtgtccaattttgcatagcataatgcacaaatgtggtatcccaataccacctctaagaggtgttaccaaaaaagaagctaaatagttattgacatgagtgcatacaggctttacaataatcatgctgggggaaaagccaaccgagtgtagatgggatcaaatcaaactgtagcatcaacctggcctctaaaaggctggcttaccatggtctcagtaggctggccggccatggaatcaacaacctggtcagtcactacctccataggctggccgaccatagcctcatccaactggccaaataatgctccctcaacatggctagccacctagtttataccctggctagcccaatctcccaaaagtctattctcatacttttggtctacaatgatcaagaagtaaaccacatcttgctagtagaatcccttaatgaagggaaaaaagaagagaccaagccaacttaaagcggcgtgtctgctagcaaaaagttgccaagtgcctcagtaaacaagtcaaggaaatccttcataggagacttagtgttctaaagaatattccttgacagcaaagatcatgtagcaagcatgtttggaccaaactaaaaaagtctacaccaagtttcaagataacaataaaagtgcatacaagcctagcaagtacaacgagaacttggatcttctaccaaaaactagaagagggaacatctcggtaagtgttctgactagccaactttcatagtggttcctctaacatttcaccgtgcaggaatccataaaagagctagtacccatcgcccttcactgatgacctccctcactcttcagtgatggcctttgcacggtaagccctacagaggtagccaaatataaaagagctagtacccattgcttttcagcatggcctcccatctttcttcagtgatggcctctgcctgacatctcaggcaagggtagccaaaacgtgatttcaaaagcgaacattaagctataagcttttgttaaacgtaagaccatttgtgtctaaaccactttctaacaaagataacttcttaaaatatttctttttcagttccacatgcgtacacccagtagcatcccttagaaaattcccaggcaaggtctatgaaactttgtgaattgcaagtgaccaagagactgtaagtctgcgtgctcacttggggggggggggggcacccacaccgtacaatgcattgaactagcatagagaacttatgcagaaaatttttagcacttagtataagctactaaaccttcctcttagggttgttcattggatcacatccaatggatttgga

SEQ ID NO: 228688 - DNA, 738 bp, Cannabis indica
atacatttagtcacaacaattgtaatttttatgactaatacttttaactacggactttttagtcacaacacaataatgataatttataattagccacaacttttttatctttagtcataaattttgttgtggcaaaaagtaaaaatttttgtaatgataggacgagagcgactcctttgggtagacgagagagggagctagagagaagtaaggggggagggttggactggagggtggagggaaatgtagagaaaatgttttttttaggtattattaatttttgaaataaaataaataagaaggatttttttaggtaaagtgagatattattagaatagaatggtataaatagggaagtattttttgtaattttttatttaaaaataataaatgaaatttcccaatataatatatggtaatggtagtcatgagtaatcataaatttgagtggcctccaaaattgttgtaaaactcgtattgtttttttttccatgtaaaactcatatagttggtatataaaagagcctcagccaagagtttctccctctattattgagcgcagaacgatattgtttacacaccactcgttaacattccatgaaaaaacaaaaaacaaaaagcaaagtcatgacatgatataatataatatcatattcgttcatgtaatttatggctgatagtaaattcaagtgagattttttcttttttttttaactgctatagtgattgttccttggc

SEQ ID NO: 228689 - DNA, 1298 bp, Cannabis indica
taaccattaaatagtcacccaattaagtgttactcatgttagtatataatgataattagagacggactcattagtattaatgtgaggttataactccattaataaaaatactattttttaaaaaattaaatataattttttaatttgataattatggactaaagttatagaaaaatttccacaaaattaaataaatttaataatagtgattataatataagtaaaaatattattttaaataaaaacttttggttcgtcactagtaataacgaaataaatagtattgtatgatatcatcattaaaccatagtctttgatcactccattgggtcaaaaataaataattctttcaactgagcatttatgcccaattgatccataatctctcataaaagggtctatctgcgccttttatcttggtagagtgatatgtgtgtgcctatgagaggttggagatagaggagtgttcatgaaacccttttgcatttttccttatcttctctttaatgtgtaggttattggtattggatgaggacaataataaagaaggatggttcatattatttaaaaaggtaacaaaggttttttgatgccttaaataagatgatattattaatgattattatctatatttttaagcaggagacacatgacacaattataggcaaaaatttattaacatctcggattaacaatgatgaccatcacaactcttcgtggagatcgatgtttcgctaatctgggaagggcttaatgaaagcttgatgcggagagctatcactggcccagttagcgtctccaagacgcaaaaggatcatacttgtccccggactccaagaagtcttcgaataacggtttgactacttgacatccgataaggactctctgaaccgatcacgaacgacgactcctacgcgaatgcggatgtccacctcaaattttccatgacttatacatggttatgcctttttttgatacaaaattagatcttgtctcctatgccaaactatggtagtgtgcatacgcaccttggacacacctttttgcctgacggcttgtctagaggctaattcataatagaaaaatctttgggcgacacgtgtccttgatccttgcaatggattatgaaaaccctaggtgggtaaagagaatgcccttacccacacttaaccctataaatacccccattttttatgtacaaaggggtgaacaaaatttccactagctgaatctctgccaaaattcctacaagcttcttcttcttcaagagaacaaaaggagtgtagagctagggttta

SEQ ID NO: 228690 - DNA, 1017 bp, Cannabis indica
agaaggggaatgtaaatatatttctctttctcatgtttaaacttaaagaagtaattttgggcataaaaatagagtaaatggccttatttctcactccagatttctctatcgagtaaaagttaatgtatcttttttagaataataaaacaaatgttcttttttactttttgttacctaaaatacccttcattatatataaggtattatcatgttgtggtatataagtttatttttcaattataattggagaatggtatatactgtaatggatgagtatattttatttgatgaatgatttttttgggtgttcacattttatttttattaagaagtgttgatatacatcaactataaaactagttatcgtgtatatcagaatatgaattatatatttcatgctcacttaaagagaaaaaagttatgatatatcaattgtttgtactaagataaaaaccaattgatggaatattaatttttagtttgtggtatatacattttgtattatgatatatacattttgtgtactaaaaattaacattcagcaaaataaaataatcaaatttggattgtataaaaatgtaccccaatcctaatctaatataccattataaaaaaaaattattgtactagcaaagtaaaaaagaaatatatgtatatatgtacaatcttaaacataaaaataatatatatacctcaatcaaatatatttatatctcaaacttaaattaatattctacgttttttttaatagtgatataccttacagaaatttaaatataccacaaaattaatattagtgatgcacttaattttttttattttctccatgatatactaaatcacgtaaaatagatataccaattaattaataggtttttttttattctttctcttaatattcataaaagacatatactatttttttatttatataaaaatatatactactcttatataccacaattcaaattagatatatcaaatttttttgacgtaatcacatttaaaaattaatat

SEQ ID NO: 228691 - DNA, 1425 bp, Cannabis indica
tcaaagaaagaaagagaaagaaatgcaaggatcactagaattattaggtgtgtaataatgaaagcaatgaagtaatttaatgaaaaattatatgtaaattaaaaaaattgttatgatgatatgctagaaaacttaaaatgagaaagattcagattagcattagagaatgagatgagagaggaaaaatgtctttcttcaagatccaagcaattgctcttcttgcagtaaatgaatgggtccaatgaagaccctgccctgggcaaatcagaatttactgtaactctaaaatagcataatagcagcaaatacaaggtaaaaaaaaaaactaaacctctttttaagcctattcctaacccctcccccctagtcaactgaacaacaaattcattaccaaagttacattacacttggtcttctgttgtcagattaatcatcttcctttctttgttgaatggccggtctttcgcttgtggcgactaaaatcagacacaaatctaaatgtctgcccgcaccctggctctgcacatacataagggcgagcacctgtgtgaacccttatgtgttcagtgcgagcccatgcccacttgaatgtcatcttgcagcccttccagggacaccttagagggcgatcatccatatgaactcgacgatgctgcaccagatatttatgagagaagaactttttcccaccaccccttcaccggactaaagtgtttcgtttttactgtaacggacaagctcgtgcttcaccccgaaactcatcgtgcatccctcaacatcacacacgtattctgcttcttcatcttttaattttgtatcactgcgtccagcctgagctttcccagctgaaacattctttgcctttttgttgcttgtttgttgctgctgctgctctttctttttggttcctgtagttttttgtggcttaggagttcttttcctaaggcgtgtactaggcccaccttcttcctcttcgtcatcacatatatgcgaagtgtcctggtcacactgactatttcgaagccgtggagtgtgtagctttgttttttgagtttcttttttcattatctggcgagtaccttgtttcacaggctgagacgatggttgtctcacattgcgcccagtcccttgtttcattttcggctgcatagcagattttgttggcttgcttcgaagaactctcttgtcttcatcgcaagcataatcctccactggctcatctgaaacgtcatcttctctctcaatggacttagcatacttgcttttataaattctggtctgttgcttatacaaattagtactaggaagatcatctgaagctgaatcttcttcctccatgaatttagcttgcttgcttttaggaatcctcccaccccgctgattgaactcaaaatcaagtgagtcatctgaaaaccacatcttgta

SEQ ID NO: 228692 - DNA, 578 bp, Cannabis indica
atgttttgggtaatgaagaacgtgttggttttagggttcacattagagtcgtagcagaagagtagagttggatttagtttaaaaaatatttgttggatccgatatgaaccttagattttaacacaataatacatatacaaacctaactaattaaaattgagatttacctcttgttgcatattagagtttcctcactactttttgtataaataaaatgaacatccaatctaggtaagaactcgtcgaagacttcacaccagtatcatcaagatcagcctcgacacttaggaaaatagtaggcttttggatttactgagatgaaaataattttttaattcatagtgtattctcactgtaattgagattggaaaaacacacaacacactagtatgtgtgtatgtgtgtcgtgtaaagagaggaagagagagagagcacgaataggggagagagagagagagacagagagagattaaaaagtatttttaaattttgttttctttctcttgttatatcgtaccgtaaccctaatctcatgtaggaatgtcaatggggcgagtcggatctgatccgactatgat

SEQ ID NO: 228693 - DNA, 1674 bp, Cannabis indica
ggtaaaatatttccaacacatcccagcaggacctaaggaaacaccggaagaatcctcaccgggtactgagaaacctaagaccaggggaccaagccctatacagtgcccttccgaagaaaaccttgggaaaaatccaacttcaatccccgagaaaaagaaagaggtgaaggattcgcaaaaagtctgctcggatttcccgaaagggaaaggtccgcaaaggggcaagctccctcgagcaattcttggccctcatgaccgagaggaccgaaagagtgtatccgtgcaccaggaacccggggagagagggaggaaaactggaggtaccctccagctgacctaagacaaaaatcaacaaaaaacatggtgacttacgagaccatatagacaaaaagaaacacgcaccagcagcggcttctgcgggcactctaaatgaaggaattctggctaagttagcaatactatgcaaagacattgctagggtctcccgtaggcaaaaaggggatgactcggattctaattgcgagggccgggaaccgtgcgcccaacacatactggatgcagagctccctaagaattttaagatgttcaaaatggcagcatacactggagagtcggaccttagtgaccagttatcccgtttaaaccgggtgatgactgtcatgagggtcagcaatgatgcaaagtgtttatgctttctgctaacgctgagcggttccgctgaagaatggttcaaaaagttggaacccggatcagtagactgctagaacaaactacaagtcagctttcggagacaatttgtggcagcaagaaagattaaccttgaagtcagtgccctgactaacataaaacaattgcctgcggaaactctaaagaactttataaaaagattcaaagaagaggcttcaaagaccaagaaggtggatgacgcaacagcttgacctcctccagggatccgtaaggggaatcctttctggaacgaaatacaataggagggagcagccaatctccaagatttccagaagagggtccaaaagtacatcactttggaagaagcccaaatagtggcttacagtggatactacccgactggagtgtcaggatatgcacccggagttctattcccaggacccatgcctccgaccactcctcaaatgagcgacatacaattctccgctacccaggatataatcagagcctagtcttggctcccgcgtcatcacactttgggacacccatgggcaacccctcagggatgaatggtcaagttccatctcagtctatgcctgccaccagcctaacaggacctcttcagagctcccgaagtaagaggtcttcaaagggtagccaccggactaaggataagcaacaacagagggggatacactccttagtatactcaatacatgtagcttcagaagccgatcctatgaagaccataactgctaaaaaaacattagactttgttatcaaaaacatcgtgtgtcgatacgacttgcctcataaaatagtctcagacaatggaaagtagtttgactgcaaagaatttaccaacctctgcaaccaacatggagtcgttaaaagcttctctgcggtggcaaggccacaaacaaatggacaagcagaagccgtcaacaaaatcctaaaggtcaccttaaagaagaagctgctggcctg

SEQ ID NO: 228694 - DNA, 1130 bp, Cannabis indica
gagttaatagcagttacactcaatggacccctttagacgagggttcaattccaaaagtaatccaacattatataatatatatataatattttatatttactagaagaaagttacgtgcgagacatgtatacttagttttatgctaagtactttctacttgatttaaaaataatacaataaataattaaagaaaaaatataattagttattattttgaaattatttgtacatatatccaattaatgaataatcgggttgcacaatttaaattatgaagatttcttcaagtatcatacaaatttattaaatcaaaattactaatatattacattcaatttataacatccctagaacaatatatctccacaaaaatatatatataccctttaatacatataaagtagggaaataaatacgcaaaacatataacgaaacttgtggatggaggcctaactattacatatcaaattttatctcttaagtatagttccaaatacttaataaaatttaaaaagagccaagataaaaatactgtgagcgtcatagagcttatcatcagtttcttcatttgtataatttaaggcaagcatccgattttgctgaaagcaggttaagaaatataatcatattagcaaaattatcccacaacaagaattattcctaatcaagcattacaattaagtatcactatcatacatatatttctcaagaggacccaataaaatatatagttaatcataaattaggggtgttcactgtgtgggtggtgcagtttttgactattttttcaaaccaacccatacatgcgttttttttttaatttcccaaaccgcacccgcaccgcaaaactaaaaaactgtaaaatctgcactgcaaaaaattggtgcggtgcgatttatcagggttttgcggtttggactatcactaaataattaaactctcacaaatacaacaaatcttgagcaacacttgtcaaaaataccataagacttaaaaataaacatgaaaaaaaagttttaagtttcaacaatataataattagtgggcttaggttggaccttcacatattggacttaaataaatataaaaattggtatttttataatatgcagtgcagtgcggtttgaacc

SEQ ID NO: 228695 - DNA, 1481 bp, Cannabis indica
aaaaaaaaaacagtataaatgttgaatttgccgtgcaacagtataaaagtaataaattgggaaaaaacagtagagggtgtaaatttcccttagtttaatgtgattagtagtttgtttaagttcgtttaacgtgattaataaaatgagtatttttcaacttatctcttgatgttattgcttatttggagtggaggccttaaaatggtgctctctagaatagaaggtatccaagtgcactgcctctgattgttgctattaataataatgcaattcaaggactagggaaaacgtttacaagttaaaccaaacaaaaccaaaaaggaaaaatgaggaaggattgagttgggggttgagcatcatatttggtttgatgagaaggctgatttagatttagattaagcacctacgcacatgtgagcaggagccacattacattacatataatgcatcaaactatttttgaaccttaatgttcaaatttaatgcaaaacttgtattttaagataccagtcataatattattagtgtaattaaggattaaatttcatatattttaatttaattattattataaaaaattatcaattatttgtaaatcgtcatatagtatctaatcacaacttcttttttattccattcttttcaatttttccctcaccgtgcaaatcacctagtattaataaattgttttcaaaagatatattttcttctaaaattaaaattaaaacatttattcctttaaatatataataataataatgaaagtgtgaattattacactatatattgaataatatttatgctacttagaatttttacataaaaactattacaattatcaaatcgtgtcctcgtaaattttttatttgttataattttctctcgattatcaaactatttatatattgctaaaatataaaatttttgttaagctttatctatgtggctaaaaaaaatgctaatgtaattaatgtttattgtcatgttaaagccacatgtgaaatttaaattttttatgggaaatttgacattatatacttaaaaaagcataaggtgtttttatatgcttcttacaaaaatgtaaaaataatacattccaaacatctttaatcccaacaataccctcccaatttcaaacccccactctccctctaactctctcgtttctctttctctctctctttctttaactctccaaacccactcccaacaaaacctcatcgaaccaccaacgaaaccccactggaccacgagaagcactcaagccccaactgttcacgaactccgaccgaccaagacaacccacgaccaagatgacccacgaccaagatgacccacgaccgagaagacccatgacgactcgcgacgacccacgagaagcaccaaagacaacccacgaccaccgcaccgcttccggcgaaacccacttgcttgtttctacattttttttttaggtttttgatgatgtcgcgaaacatcgc

SEQ ID NO: 228696 - DNA, 1220 bp, Cannabis indica
aagtgtaaaaataaaaaagtctcaaatattttttagtaactacaatagcctataggtaacaacatcacaatatattctttaggaaacataaacgcttttttctattttattgtttgaaaagaaaacaataatagaatgatattttttttttcttctaaatatgtagattaggtaaaaaaatgataatatagtttaaatatacgtaatgagtttaaatttaaattacaatgttaaaaaaatactttatgttatatagtcataagagataaaaaaaaagcattgtgtgtatgtgtagtagtttaaatttaaattataatttattttaaaaaaataatactttctattatatatccatatttaatataacatagagaagagatatatagtgagtttaaatataaattataatctattaaaaaagaacaacactttggtggcgtttggttggaggtaatgaaatggaatggaaaggaaacaattttcattccattcttttgtttggttgcattttaaagtattggaatgacattctaatggaatgctctttccaccattttgatagaatggctattccattttaaaaagaaaaaaaatgatcattccaatgtaataagagaaaaaatttaattatttttttatcaattttttttatacattttaaattttattccattctattcatattcctattcccattctcattcctattcctatattttcattcttcctaaccaaacgccttgtgttatatagccacattgaatataagatacatatttatacagtcacaccaaaaaaaaaactataaatttcactttgtatttaattatgattttaccatccgtatttttcatattatgtggaagtcaatgtgtgttgttgaacagtgtattttttgtgggctttgagacttattgtagaatagaggcccattatattggatcacaggagcgttgctcaatgaggcccatgataagtatgagacttttcttttggaatggtttttttttttaaaatgtaaatgtattttcaaaatttttagataaaaaagatacaaataaataaatgtaaaaataattgtattttcaaaatttttagaaaacgacacaataatcagttatgagttactatgtatataacggaaatagatgtcatagtaaccaatttatacctgttctctcagttactagttattgattaattgtcaggtattcgataac

SEQ ID NO: 228697 - DNA, 982 bp, Cannabis indica
gttattatatttaagatcatgctaaaaattatttacaactccaaacacattttttgtcttaaagtttatttcatacgcaagtagaatagactagtttataatatattttcaacaccataaattatttaaaaagaaaaaaattaataggtatatgtacactattatatttactttttatattctttttttaatttattttcaataatgcctagatttttttaaataataaatataaaattaagaaaaaaatacaaaaatataatggtaaacacagaatttatttttctctaaacaaaattaacaaatttataataatagactatagtttacaattttgtttacaaaattattataagctgctatacaaaaacaacactataatatatatatatatatatatttaaattttgttttttcaagtcatttgaagtatatcaaatttaaaaaagaaagcatatatatgtatttatgataaaccgaatagtaattaactttcgttaattataaggatctattttgttttagaatctgagctgagttaaagtgatcattttgaaaagatagacacatatattcatgcttggttgaactgaaaaggatcttctttttttttttttctctctcacatctcaaagttaaattttttttttttatgaaagttaaaatattagttgtaattggctaatttataatttttaaaaattggttgtcaggtggagatggtggcatgacaaaaggcatcagctttattagccaacagataagaattgagctaaaaatatatcttgaatcaatgtctttttttaccagtttacttgattgtcccttagtgctgtttgaaaatgggacaatttcagacctgcttttcagtccaaccatgtttattacttagtgcttaattaattaagttaaggtctgtctcacacccccaacttttatacacttatttattttcgtttttgtataaagatgtattattagc

SEQ ID NO: 228698 - DNA, 1632 bp, Cannabis indica
aaggtcggtgtgacagaaattcgattagagcttcaatgaaatcaacgtttcaggcaacacttgaaaagatgattgagaaggccatcgtgaaacacatatttgatgattagacaacttactcaagtaatgcagaactccgggaaggcactagacatcggagatgacgacgaacagatggttgaaattgtaagagagggaagccatgaagctttcagatctcaaaggagtatcgaggaccttcccaaccatacactataacgggggccaacaagagacgttatcgaaacttagtcgatgctcaccggagccggagaagaaagaggttgaaccagcaccggagcttcaaaagaaactggtggcttcgtcgaacaccaaacagactcacgactcgtggccaggggaatttatttttctaccatattatactagtattgttattttactctgaaaactttataaagtttgctctatgaagatagagattcttcttgccggagaagttgcatggtcaaccactgacatccgaagcagagtagtttctcgccgaagacaatcttctcatgcttgacaatattgcaattgttactgaagcactagggtatgggttaatcactccttacttaaggcccacaatagtccaagtggttggccattaagcaaaacaaaaagctcaaggtttattttaggtcacaaaatggacacatgggatccatgtatatttccttcttcttcttcttatcgcacagagtggaacgacagagtgcaatttgcagacttcaacccgaggcgctagtgatagttcaggcggtccagaatttcttttcgatgaggtggggaagccttttacctgctggatttttgacagaggaaggaaagtcactttcggcagcttaaggcatggcctatcttcacaaaatcactttggagcaccaggtattttctatgggatagagccaactattgataagtcattgttttcaacttggctatatggtagtaatgggggttgtccacgggagtgttgagacaaatcatccaacataaggatttaatttcaagtgccggtactatgggtgtgattagaactagggtaaattctattttggaccctatgttttccaaaagttatagattggaccttctgttttgttaaatgtcaaaatggaccctatattttttaaaatggtacaaataggatcctaagtttaatttttgacaattttttttttaatataatcaacttgaagacaattcctctaggtcagattattattaagttttattttcacaaaaaatcagttcagaatcctatttgtaccattttagaaaatgcagggtctattttgttatttaacaaaatagagggtccaatctataacttttgcaaaacacaaggtcttaaattgtatttacccttattccttctatgatggtgtttaaaggacacgatgttctcaactggagggtcaacaaggctgctaattttcttcctcagcattgtcagcaatggcctatttggcttatgacgattatattataaggggcaaggagacatttccacaggcaaaaaaaagaattataaaaatattcagcagagttagagggttcggttaaggagaaattcaatttgca

SEQ ID NO: 228699 - DNA, 1120 bp, Cannabis indica
ggttgtgtatttgtgtctgtaggtggtatggtaatatttgttggttggttggtcagaggtgctttgtggtaaataggatggctcagtatttaagggatgtgtattggggttgactgggacaggtgctattatcgggttggaagaggcagcaggtgcagtgtttgtttggccattttgggaagcagtatgggaaggatgctcattgtcattgattgcagaatggtgaggagaatgggagttagtacgagtacagtgtacattattggaaactgaaaactgagcaaatggaaagatgggctgtgaagttacctgttcagactgttgttttgtggatgcaggaaaaagcttttcattgaagacaacatgtcttgcaataaacagtcttccctctgaattttcacagagatatcccttgtgtgaggaagagtagccaagaaaaatacattgttgagttcgatactccattttatatctgttgtatggcctaagatgtggataacatgcacatccaaatggcttaaggaaggaataatcaggtttctgtccaagtagagtctccattggagtgctgtagttaagaacaggtgttggcaacctgttgatgagaaacacagccgtgtgaaatgcatgccaccagtagtgaaactctaagcctgattgagcaaggatagttaaccccatttctgtaatatgcctgtgtttacgctcagcacgcccattttgctcactggtttttggacaggggtgttgaaaatgtattccttggtcacttaagaatcgtgagaaaggtctgtattctcctccccagtctgcctgtactttcttgataggaaggttgaactgtttttcaaccattgctttgaacttgacaaatgtttctaaggcttgagatttttgtgacattggatagatccaggtatatctactataatcatctatgaaatgaatatagtagaggtatccatctttggatttgatgtgggatggtccccatacatctgtgtgtatgagctcaaggggttgaacggctttggaatctgtgctagagaatggttgtttgtggctttttccaagttggcatgcatggcaaaaagaaagatgttgagtgttgcctttgtgg

SEQ ID NO: 228700 - DNA, 1374 bp, Cannabis indica
tatgatagaggtacaatgccactaatttttttattgagggcataagtacaaacaatttaaaagaatatgaggttttaccgtaaatatactaaggactaccacaacttttgactgaaggaatttggcagcacaaatgattgatagaatgaaattttgctacaaatttttttattagagggttaagtgtgtcactaactaggagtattgccaagaataatcatatatatataattaatattaaaattattatagtgttttttctactagaaaaatacatgcacattaatagtcgaataataattaattaattaattcatattaatgttgttatatctaaaactcaactacactttagaggatgacacgtgtcaagtagtggaatatgaaccacctggtataataaatttatatcatttaatgcaaagaaaaataatgattcgttaaaggattaatagaaactattcataactcgttgactatgtagtcttaagtgagacaaggatagaaaactattaaaactatatcgacgagacacatacctgcatcaaaatacacaggcccaaaaagaaaactcatttattcgccaaaataaatgtagtatgcaaagcaaccttgggatacataaagcgagacatccaccttgctattcacaagaaacttgacgaggcaaataatttgtttatcacttagcatatttttcacattacaatagctaaggatagcaacttagaaagatgtgattgtctagtctgcaagcccttatggtcaaagagcagttcttaagttttctcagtacactggtactcatgccattgcatgaaggcatatgattgtccaaatcatcattaaccatctacaagttaagcgaaatgatattgtgtaaatcaacaataaccattgaaaggataagaataacaagtagttatgtagttattgattgttatccacacgtggactaaatgaaacgtgggtatcaaccatgtttcattaaacagttattatttgaatttaaatgtaaataattgccaggctatattcctataaataggggcagatcccacaagaaaagaagagaagattccttttagagaaaaattgagatacgattagtaatatattgtattaaatactcagaaaataccttgaataagatagactcatggagtgtgcagatttaactgcaaaaccacgtaaaaaaatctagtattattattatactttttagactttatttatttcttattctttatgtgttaaatttattacaaaaaggctaattattggttaacgaaaatctgcgttaacagtttggtgctttcattgagagcctacgtgataaaactcagaaaaaatccctcttaacaaacaaaaaaa

SEQ ID NO: 228701 - DNA, 2330 bp, Cannabis indica
atataaagaagagaatttttttttgaagcattaataagtaaaaagaaaaaaaaatagctagggaaattataattttaaaaaaattaatatttagtgtaaatataattactaaaaaaataataaattatgttaaaataattgatacctagttcatcaattcaactcattctagtgaaatttcttaaaatccaatgcattgtctacaaaatatttgactcttctaatttttgtgtaataaatgataattgtttttggttaaataatttatatttttttttataggaatatgtatatgttcatactacttgttctctttgtttttgtaagaaggtgtttacaataagagttgctctgatgacatggatatcaatgtttgacacgtggtaagaaagatgaaatctcggagttgagtagtcctgagtcatagcaagtcggtctggaaggggtccctagtcctacacccaggttgacttcgagaactctgggatggaagtttgtgctttagttgttgaggttcaaataactaatatgatagtggcaaaattaatgatcaatgataaagcatcatcaaacatttcgttcaagaaagccctaatcagaatgggtttgactttagaagacctagaaccatgtgaacaactcatgtatggtttcaacagagctgacattcctccatgtggcacgatcaaattgccacttactaggagaccaccatcatggccacgtttatagttgtggacgtgaagtctccatacaacgtgatgctccgaaagcctattctgtacgaccttcgagccatctccatagtataccatttatccattaagttcccaacggttgctggtattagttgtctccttggaaatcaaggaattacccgctagtgctaaaacgtgtcgttatcacttgccaaaaagatctcttctattgattccaaggggaagaacaagacctcccttgctactatggcaccagagcggacgtgcaaggcctttcctgcaaaagccagagagacaataaagacctttaaagtccaaactatagagaagatggagacgacatctaaagccacttgaaggtgctcccaagacgaggatgacattgactcctgttttggggaaattgactcaggagttggtctgatcgaggaactcaaagaactttacctcaacccatcagacccaaccaaagttgtcaagattggaacaaacctgacgaaggtcttgagtgagatgctcattgctttcctaaggagaaataaagacatctttgcttggtcgcatgaggacatgattgggattgacccttaggtcatctttcatgccctcaacatagacaaagttaacttcacccccgtacaatagaaatagaggctccttgacaaagaccattccaaagctctcaagaaagaaattgaaagattatgggagaaaaacttcattagggaagccatctacccaatttgggtatccatccctatttgggtgcttaagctaaatggaaagtgaaggacatgcgttgacttcatcaacctcaacaaagcatgccctaaagattttttcccactgccacaaattgatcaactagggaataccacagccggccatgaaatcctcacattcatggatgcatattttggctacaaaaagatcagcatgcatgcacaagacaaagagcatactagtatctgaacaaacaccaggctttattgctacaatgtaatgcccttcgaactcaagaatgtaggtgcaacttatcaaagactaatcaactgtatgttctataaccaaattagaaataatatggaagtctacgtcaatgatatgctggttaagtcaaaaagatctaaagaccacatcaaagatctataagagtgcttcaacatcctacaagaatatagaatgaagctcaaccttctaaaatgatccttcgacatccagtaaggaaagtttctgggattcattgtcaactcaagaggtattgaaacgaatcttgagaagatcaagaccttacacgacatgaagtcatcgtcccagataaaagacgtgcaaagcctaacaagacgaattgctgcacttagcaggttcgtctgcaagtcaactaacaagtgtgttccttattttttttttaaaaaaaaactcaaaggaagcaacacggggtttgaatggactaatgaatgcgagcaagccttttaagctctcaaatattatcttgccaagcctcccatcctattcaaacctgttatctctcaaaaaatccaaaataagtgtgcatgaatttatattatagatatggaggtccaacaaggaggagctcattagccaaagagg

SEQ ID NO: 228702 - DNA, 639 bp, Cannabis indica
attgacacaaagggatcttgtgtaaataaccaatatatttggttaatatggattaagcttcactgtattttgtaaaagcttgtattgcttacagtttgtattttggattggtaattaatactttttgaaatagtgagaattattatcctcgtttagggaatccaaacattagccgcttagaatgtgtttctagaataggtgaaccttgtaaatcattgtgtgtgattgttttgttttagattctaatttatgctcttagatctagttaaaatctatagtaatcttgaacaagataggtcactagaatcatggtgcttacatttggtattagagcggacttttttgtttgaaatattgatccttagggttcttgcaagttgtgttgtactgaattttgttgttgttgcaattgttaatttttctgcattttttcttttatgcaatatctagttggaactagtccccccctgagatccatctttgagagtatatactgtgttttttgtttgttatggaaatgtttagggcagctggatctacctcccagcttccaatgctggagggggtgaattatccctattggaagaccaagatgcgagcatttctcaaagtggctgataagagagtttggtggctatg

SEQ ID NO: 228703 - DNA, 2461 bp, Cannabis indica
gtttatttatggcatcttattttacgtaagtaagggcgttacaataaataaacacatatgaagtatgagaaaccttacattgggtgtagcggaataatatgtctctttccactcagatctctaacccttacatcatttttgtcgcagagtattatcaagatctcagcccgaatgtccttcttgttgaatgtctttcttcacgatctctaacactaaacaaaatagagacaacattccaaaattagggaaaactcaaaaagaaactgaaactaaaccttgagaatttgatctgcatgcttctttcccatcttaacttcttgaatcgaactcttttctctacaattttttcttcaaaggaccgtgatggattttgttggtggttgaacaaaatcttcatttgagtcatcatctttaactatagttagtttccatatccctttgttcaacaatgatttaacattaattgttgcaagtttagaacttttacaaatggacttcttaggtcacatccatttacacataatttggaagaaaaaaatagaaagataaatcgttgggtggagcttcaatgacagttggagatcatgaggagcaattttttggagagaaaattgattttgatcgttgagaaataattaaaatgaaattgaaatgaaaagttaaaaatgaaaagtgaaaataaaatagaggacgtgtatgtaaaagataaggaaaataattggagtgtcattgtagtataatgacatcatcatagaaaatttatgtgtgtacaagagatatttaaataaaaaaaaaaaaagaggtataaaggttattctacttttgtagagataaaattgtaataaaagttacttttctaatttttcttgtaaattttttaaaatataaataattttttaatatatataaatttaattagatttgatctgtttgtaattagattttgagattgacatccaataactaatcgaatccaattagaatcaaacttttaatatccaattcaatccaattataattggtatctaattttttgtaattagattagattgaattgactcggtttaattgaattagtttgaatgttgctcactcctaatctcaatcatactaaatcgcaaattacaaaccctgaataaccattaaaccatatcgcaatcttaactatgccttctttgcaacccaaattgtaacataaattgcaacctaacttcttcttcctctatcaatcattctcttgagtcaaagttcagtagctctggttgtcaaaaatttgtcacagtcaaaggagaagatgttgaagtttcaaatcacttttttctattagctacagtagtataaaaaaaaaaaaccttatatttttaaatcacaagtatactcttaagttagataacaattttttttgaatggaaaaaactatcttattggttaacacagttacctttgtaatcttaattttttttattatgttaaaaaaaaatgaaaaggataagtggtcataattagctatgaatgattagtgataaaaagtaaaattaattgggtttcttttttaattacattagctgcctaggtgggtatagaccaataaatgaagataaatagcattagagaaagtgatttgcccaacttggcatctccatcacaaaaaagctacaatgatatggattgggagtgggtaccattagaaaatgacaattctaatatcatatctcagcagctacaacttgttcaaacaaattatatgcacacataattatgtatgtaatttggttaaagaataaaggatattctttattacatataatggaaagaaagaaaaaaaaaattcattgtatttaatttacttgagcaaccatattgttacaaatttgtatttttatagtattatatagcaataaaacgtttagttacaatagttaaggtgttaaatataattttggtatgagtttaaatccttgaagggttataatttataaaaatgggttaatactattttatatcatgattagattatattttgttaaagaataaaattagattctttattttttaaaaatggtatgttgagctcaatttttaatattttttagtataaccaactcaaacataatttttagcacaaatagatgcataaagtatacataattttgtcataacatctctagattgtgttattattaaattttattttgacaaaaaatcagttcaaaatattattatatatcattttaaaaaatataagatctaatttatcatttaataaaacaaaagtttcaatcttacatcatataacatattactcaaacgattaaaacatttccaaccatgctctctaaattaaaatagagaatgagattcacaaaaataagctctaatcaaataaaaaattaatctctataataaaaaatggatagagaggtttctattttcttgctaacttttttaatagtattttaat

SEQ ID NO: 228704 - DNA, 1227 bp, Cannabis indica
ggagagccatggctccctgatgacacaaacccctttatcactacaaatcaccccagccttaccaacactaaagtctgtaacctgatgaccgtgggagagtcaaagtgggatactgagcttttgcttgatatctttgaggaacgagattggaatttgataacaaaaatccctctcaatttagtcacggctgaggaccattatttttggtcaaaagatggctctggcatctataccgtcaagagtgcttataccctattgcaaagtttgaagggtcaatggtatggggaagaagatgcaagcttctggcatcaactgtggagcatgaaaattccttcgaaaattcagaacctggtttggcgagcttgcacgaactgcctccctactttggttcaattaagaactaaacatgtgacggtcagtactctttgtccgttgtgccaagaacaagatgagtctatcctgcacattttggtcacatgtcgggtcacaaggaaatgctgggacagagtggggataggcacggtcacaccagcagggaccaattttttcgactggtgcacggctgtcttcagtgtagcagcagcggacctgtgctgcaaagttgctacggtttgttgggctatttggggtgctagaaatgagttagtttggaaaaggaaaagtttcaacccgattgatgttgttgcatttgcaaatcgttatcttgaccaatggagatgcgctcaaagttccgatatggaatcgtcatggccttttcttcgggctagagacgttgttgagcgatggaccgctcctcatggtaatagcgtcaagctgaatgtagatgcagcgatgttcaacagtggagagcaatatggtatcaggttggttgttcgaaatggctcaggacttctcattgaaggtcgcaccagattgttctatggccatgttgaaccggtgcttgctgaagcaattggcatccgtgaggccttaagctggatcaaggacagtcggcggcaagatgtgtatgtcgaaacggactgcctcaatgtagtgcaagcaattcattgttcgacagatatgatctctttgtttggtttggttattaaagattgtaagaatttgcttgctaatttaaacaatgtatctgtttcctttattaagcgatcagctaatgtagtggcccattcctttgcaagggcggctatattgtaccctgattgttcgttcagtttggagtctgttcca

SEQ ID NO: 228705 - DNA, 2951 bp, Cannabis indica
agtcgagtactcgccattctaggttgaatactcgcacatgtcattacccataaaattctctttcatattaataaaataatataatttggtgttgtgaaattcactcgacaacaactactacaatgtaagcctttaatttcctctttttcaacccaatttataaaaacggaagctaaagggggtgaaaatatctgcattaggtttagtagcttatgcttagcattaaaacttctccccataagttcttcgtgctagttcgatgcattgtacgggatgggtgccccccaagtgacgatgcaaacaagtttattggtaactttctattcatcaagtttcacagaccttgcatgggttctttcttagggtgttatccaaagtacgcttgtggtgaaagagtaactttaagaagtcaatcttgtgagcaagtggtttagacacaagaaatagagcataaatattcttttttattatttaatttgtcttttttgctgtgcaacttacataaattgaatctacaagcttacgttacacaaatttagcttatagatgtcaaatggctaccccttcttgccttgtagagcagaggccaccgttgaagaattgtgggagaccttgccaaaaaggccatgggtactagatcgtttttactctaatgttgagtaggtagaatttctactttggagtagtgttctgtaagctggttactgatagtatttgcaaaagttctctccattctagtatcttggtaggagaacgagctccatgttctcgttataccttcccagcttgtaggctcccttactagttatcactataacttgataggggccctcctagttaggtccaaacactcttgctgctgagtctttagtgttcaagaatactcttcggaggaccaggtctcctacaatgaatgatctgttcttgactagcttattgaagtgccttgccaccttttgcaggtaggcttgcagctttaggttggcttgatttcttctttcttctacatcgttaagggactctgccaataaggtgttgtttgtttattggtcataggttgttcttaggtgagacgatggcactagctctacaagtaacatggcctcataggcataagctatagcaaacagagttttcacaagtggttgtcttctctgtagtcctatgcgaccataggacctcttggaggaattcaggctagttgcattttgcttgctcaaggtacttctttaaggtgtccttagggttttgttgatagcttctacctgctcatttgcttaaggataggccacgacaaagaagcttttgatgattccatgcctgttgcagaaattagtgaacatttcactgccatactgcttcccatattttgacacaatcttctagggaagtccaaatccacatatgatgttcttgacacaaaagttaaggactttttttgaggtgattattgtcaagagttcagctcctgcaaacttgataaagtagtctactgtgacaataacaaacggtaaccctccttttgcctttgggagctaacctatcaagtcaatcccccatactatgaagggccaagaagactacatcatcatgagcttgttgggtggagcttttagaattttttagaatcttctaagataggctttgtcccctagcatggttaccgcagaagccttcatatgtttctatcattagccagttgacttaagctttggtgacacacctcaagagaggcatggagaagctttgtgtatacataactctatctaggattagatacctggcagtttttcttcttagcttgtttcctacattcttaccttctagcaaggctcttgtttggaggtaatttgtaataggtgtcatccatgttggagtgtcatccaacatgttgacttcttttgggatggtgatgctgggttcctctaggaactgtattgacaccaaaatttccttgtcgggccagacgggccagtgcatctgctataacatttttgtctctaggtatctacttgattgtttagcctttgagctgaattagtatgtctttgatttttctcaagtaagccaccattttttcacctcgagcttcgtattcacctaggaattaattcacaacaagttgagaattactaaatacgtcttggtgctcagctcgtacttcatgcgccagcttgaggctagctattaggggttcgtactcagcctcattatttgaggctttgaagtcgaatttgattcctccatgcagctgttgtccccaagtgtaataaaggcaatgcctgcacgagacaattggtcagtccagcttccctcaacatggagtttccatgtaagtgcttcaagattttgttgttgctcttgctcttgcttcttctctagctcttgattttctaatgaatcttgacaaatttcaagagatgagtttgtgcactaagccacaaagtctacaagggcttgaccctttatggctgctcttggttgatatgtgctctcaaattagccaagctgtatggccgatttgcgtagccggcctgatgcttcaagttcctgtaaaacttgccacaatggttgataggtgtacacctttatgaggtgtgcctagaagtaaggtcttacctttgttgatgtagtatacagggtgctgtataccatcttcttcatttgtaaggacagcactcacagcatgctctgtgactactaggtaaacgcctagctcttcattgtctaagggtttagacaacacacgcggttaagccaattgtttctttagctcttggaatgcattttcacattcctctatccactcaaattttttgttacctctgaaaatgttgaagaacgatacacatttgtctgtagacttggacacaaatctgcttaatgcaacaatgcatcttgttagcctttgtacttccttgacagttggtgggggacttcatgtccaaaag

SEQ ID NO: 228706 - DNA, 1020 bp, Cannabis indica
atttaataaaatatatttaaaaactcatttattttttcttttttatttttttttttttgtttttttttctcttaacccaataaaaattagtagcgtgggaagaactattagaaacatgaaagctgagcaaagcttacacagagactagagaagaagaagaagtagtagtaataaaaagaaaaagaaaatcgttttttgttttattaaaaaaagagaaaaaaaaaaggaagagtgtgagttagtacgaagagtctgtggcaaagtgtaaagaatagagtctaaaaaggttagtacgtgagagaaagagatctccgttccgtccagccacgccaaacccgggcgattctttcttttgtttatttttttaataaaaaagttaaattttaaaactaaaaaggtaaaaatatatataattgtttattagggtgatgtgataattgatatgagttataataagtattgtgaagcaaaagattttaattgaatgagtgtttttatggaagagatctgatcagaacgttagcatgacgatgtcacctgaactatatatatatatatatattgtaataatagtaataattaaatctatgtctttaattatacacaggactagaaatctatttgtcagacctaatttacacgtgtcccaccttaacaatgattttaatttttaattatgttggtaatactaattttttctattaaaaaaaaaaagaacaatccctatgttgtattaattaatttataccaatagtacaatgtatgagtctcatctcttgttgaacgaaaacacaaagagcaagttatctggttaattagaatatagggagacgattttttccgtgatggacggagtatattagatgggtctcagcgtatattagatgggtctcagggtacgttactatattctaatcataattacccttagatagactccagccctcagatcaaataactctcacatctaacggttgccgtacattacggaatacattccgtgaaagtacatcacgggac

SEQ ID NO: 228707 - DNA, 1261 bp, Cannabis indica
aaaacataatatttaaatataaattgttattaatttaattttaatttacaataaatattagtaactaaaaatacatttaatcacaacaaattataattttatagttaatattttaatcacaaaataaaaataataatttataattagttacaaactgttatactaaaagtaaaagtaagattttttttataaaagatacaaataataacttttttttttttaaattaagagtccaaatataagtaaaaatacaaaaacacacatgactaaaatactattatatgttttttttttcctcttactacatataagccataaaaatatccaaaaagattaagtgggcccataaatgaaagtgacatgggtttttgggcccagtagtttttgcatgctgggctggctctgaagaagcatgccaagtttggctaagacaaacataaagttaagacttagtatcaaaaatctcaaacagataaataatagagggaaggctttagggaaaaactttaaaagcatgtgaagttgatctctaaagaaacactaataatctttttttttttcaaagagaaagaaaaaaaaagtgttttatgttgatagtaaccactcattgtatagcctttgaaaaaatgccactgtagatgaacatgccaatcaactagagcttgacaagtgtttaagctagtagaatagaacgaaaaaggacgaacagtaacacaagttagataccgactcttaaaaaaaaatctcgaaagttaacaagtgtttaagctattagaataaaatgaaacactacaagaaatgttacttttgtcgaaatacattggcaaaacttgtcggcaaaagatcagactcaagccccaattaattcagtctagggttttgccaatgcatatatgctctggtaaaagttacctttatcgacgagattcatgaattgcgttgacaaaaggctaaaatagaaccatcgtttggcgtgaacaattttcaacgattcattaccttttaccaatgcaattatacgtcagtaattgctgggtaaatccccgcgtatgaaaaggttttagcggcacaaatatgcactgacaaaagtttaaaaaaaattagtcaaaatttttctacgtgtgtttttgtttttgtagggaagagttttattaacttatatatacagtaacacaagtcagataccgactcttaaaataaaaaacttaaaaaaagacaagcttgacaagtgttcaaaatagtagaatagaacgaaatggac

SEQ ID NO: 228708 - DNA, 1148 bp, Cannabis indica
tgatctatatataattgaatgaacataatggaaataaatttttatcaaataattggtgttctctctttttttttttcttttgataaaatctaaaagcaaatataaaaaaatacatatatagaaacacacatacatatatgtataaacatatatataaatatacaaatattcatactttctacaaatctaatatttgggtcatttttaatattatgagctgcaaataattaaagaaaaaggtgagataaaagaaaacaaagagaaaatttaactaatcctaactatacatatatacctgaacagtgatgaagataactccggcggaggcgatgggaatgtcaacaacgttggagggggtggactcatcgttgcgtgcttggaatggtggactagtcgacgatgaacaaatggaggtgaataagtgttttgatattgaggatgaagaggaaaagatgaatgttggtggtcaaaatttttggggatgaagaaggagacgaaggggagagataaataagggttctgatatatataaatataaaattattaggggcaaatgtccgccggtaataataggattcgccggtaataattaaaagtataacattttaaataatatttaatgttattagcgacggactttcaccggaaatagtccgctgctaataaatttgaaatttgatactgagaaaattcttgcacaaagcaattctttcaatattattacttttgttttaaaaaattctactcttaccagtagatttagtctgcccctaatagtttcgccggtaatgaaacattttcttgtagtgaatccaaaattaaaaaattggcttctctgactttatggatctttattattgtgagaaactagatagatgcttgaaacgatatccgattcggatacgtgcgcaccaggccttttgtgaacctgtgcgttgggtacttactcccgagctcccgtaatcttgtttttgatacttctaaggcttctaaacttgaggacgaggtctcttaccttatttttttaccatttcaaattcaatgatcgcatcgaatttaacatttgagcaattgaaggcagcatcccaagttgattgtcaacctgggcgttgagccctatttttaagctctcagatttgtggttttct

SEQ ID NO: 228709 - DNA, 3793 bp, Cannabis indica
  modified_base (11)..(11): a, c, t, g, unknown or other
atcatcggganactgacttctaaaaaattccctcttacgtttagagaacataaaaatctactgacttaaaaaccttgaaaaaaaaatacacatagagagacattcaaggaccccaaacgtaacaaataaaaagataagaggctgaaaaagagaatcctcaacacatcaaacttttattgaattacacattcagcttttatttccgggttaagatattaaatttatctcagtaatgtaaatcaaattagacaatgttcagttaaaatacatcatacctaacagactatatcattcttatttcaccataatcttacataacagccaaccaggcttctccttctcaatactgctatgtgactggtgcctgtgtggctttgaatcgacttaggctgattagaggcaagcttttcttctccgacaaatcgtgtgtatcttttgactaatcgccaattaaagctcgcggtctatgtccaatggtgaacagagacatcccagtttgtgaaattgctctcacaaatgccatatttgcagttaaagtaggggcgcgccagtaatcaccagtaccgaaaacaaccttattctttattgcaagctttctagtggttgggaggctcatcatacgctccgagggacaatcaacaacaaccttgagacatccaagtaagtgatcagctcttaacttctcatttggccctccacacattgatactaattccttgaactctgaacaaacactttggcatatcatacctctctttccagatattacactacctagttccacatgaattggtttctcaatttcagacattacctgtccaatcacaaactcatagttactcttatatttttctctcaaatcagtttctggggtacccaacagtttctcacaaccaccattgctgattcccgaaacaacagcaatcaaagctgtcgtgtcaaaattcacatattcacattctttctcgacacttatcctggaaataagtgtcgagaaagaatcatccctttccgataccaaagtttcgagttggaatgtgttttcagcagcacattccaaattgaaaacatcatcatcacaatcatcatcctttgttctaatttcaagtatggatgcatctctatatgttcttgctaatacattaacccactcttcttccaaatcctcattgaaatcgaaatcgaagacagtaaactccaatccaaactcaatagccccaaattgtaatctgagtttctcataaatgacttcactgattccattagcaaagaagagaataactgaagaaggtttaagtgccacagaagacctagcaacagcaagaagtttctcgattcgaaatttcaatcctttactcgaatgggattcatcccaggaaatataattagggttcctatcagaaacaataatccaaactgggttcgtattgagagtacaaactacatctacatacacagaatcacaagttttttcaccatttacagaaattgacttacatacacgtgaaactccagtaatgaatggctgttggagaatgtggagaacagcttcaatgtgcccaatgttgaaacagcacctagggtttgaggaacgggagagaaaggcaagctcagatttggccaatttgaggagggtttgttgagaagaagggttgatttttgtggtggtggtggaaatcaaacttcttaatctctcaataacatttatgcatctcttctttgctaattccaattcttcattctccttcattctctataattcgttttcaatcaaatgcaaaacaaatgcagaatttcaaactgaattgaaatgggaattcatatcaaaataattatttgattcgagtaagtacatatgcaaatccatttcaatattcacagtcatttttaggagaaatttccgatttcatcaataagaacaagaaataaagatcaatcattgtgcaatttcgttcagaaatgaagataaaaaacaagatattattaaataaggagtaaccttgattggaatggaatcaataagattgaagcatggattgaaagatgaagctttatttagttgcagagagtggtgaagtaaagggtttgagttcagatatttctgaaggtgaagctcgaccaagagacggagacgaagacagtttcactccataactgaatatgcaaagagaaatatccttaacataccgtcaatctccaattctaatattttactcaatttttgtgttggaaaaatatatattaaaatacttttttttaaactttttttaaaaaaaaaacaaaataagcttagtcattcattaaataaaataaatgttagacatctcgatcattacaaaatatttcctccggtaaggaggagatcaaaatagatctgtacaattggtgggtgaaagcccgtttagccacattatgggcaacaaaattacaagacttactaacattagaaaaactacaactaataaaataggaagatgactaaacacaaaaggagacatagttatcaagagcccaatagaactccttcccattgagagcattaatagctagtctcgagtcactctccacaataacaaacttattcccaaactccatagccagcgagacggccaaatagcaagtcgcagcttctccgcataacacatcagagaaatccaaccgagccgtatgaacccaaatcacccttctcatatgattccttgctacaacaactgtgcacatactctctaaacccattctaacatcacagtttatttttatccaatcctggggaggtggagaccaggactccctcacgatcagcgaaggaatgggcaagagagaatcatgtaactctacaaaagaagcataaatattgtcaatacatcaggattggtattattgtgaaccttttcttttcgcatcctccatatagtgtcgacaacaattgaagcataaagaaagacgtcttcaactcggatccccctttttttaagatcccaaatgaacttcacccagtcccaaacacgaataccattatcacacacatggtagattccccaaggtgaagatcgccaacaatgaagcgccacctcacaagtaagaaacaaatgttcaattgattcatccctcaacccacacaaaggacaacttgtgtcctcaatctaaaatcgtctcccaatctcatacctaatcgggagtgcgttagacagaatacaccaccaaaggaccttgtggtgctccaaaattttgctattccaaagcttgttccaaagtgacggtgcaattgggagtgcactatttattacacttacaatattatttttgtaaagttttaaaaaatttattacgtttttttatcacggtaaactaaaatattaaaaaatctgttactactgaaaattttataaaaatttatagaaaagaggcatggagagtagtttggttatgtttcatgcaagtagaacacacataattaggaataaccattcaatatctagttatattaggataagaatgaatatctcaaaatacagttgagaatgtattttaattgaaagattataactaaataatattacactaaaaaaaattaaaataccaaaaaatattaatctaataataataaacttttattaacactatatcataatattttttgagtaaatataatacatatatatatgtattatataaatattaattaattatatgtatatattttattaagctataattatttttgtataaagatatattttttaatctgcgatataaaaaatgtataattaatcataatttaaaattattttta

SEQ ID NO: 228710 - DNA, 749 bp, Cannabis indica
actccagacatgactagacattgtactaaaataatctgtcacaaaataacgacactaacattgtacattatttattccacatcaatttattagttttgaaaccattatcaaagtgaaactatttttatgttgtcaatgctatttttatcttttgtagttttaaatcgattcaaatagaatatagtggttctattaattcataatttcgattagatttaaattatggaaccgaaaattacaatataaaattatttttaccaaaaattctattatttttttttatattatgcatgtattgctttcttcttttaacttccatggtaatttttttttttctttttgagttattatgattaaaaattaatagtactctaccgtgtcgttccttactaccagttgtttattttttatttttaccaaaagtttttcaattatacaagtagaatgtatggtaattgttgtggctatggattggattctctccttaatagaatttgttgtacacgctgaataagattatttagcaattaaatcttcttttgataatagacattcatcttttaatagttttagttctttgttagaggatatatatattgcatgtttgttctttttagatttttcgaattgtttttaattcatgtattagaagcagtttttagcaattagaagatgaagagaaagaattgtgtattgaatcaatgaataaattacaacagaatggacatatatatacagactcaagctaa

SEQ ID NO: 228711 - DNA, 1563 bp, Cannabis indica
ttaggcaatttgaaaaaaaaaaacagaatgtaaaataaaacacaaacctttccaaatctttgaacggattctgtagcccatatttttgacacctagacaagctctcaacaaatggctagcaaagtaatccaacagtcagaaatatttaaagatgcaaatacaatttcacataaattttgagctttaatctaagcattttcccaaaaaaaaaaatagattgaaagaagacataatataaaaagcaaacaaaagaaacgccagataccatgtgccatgtgccttactgagtgaagtcaaagtgtaatccaaataatgagcttcagctaaaatattacataactaaacagttcgtgattagctaggctgttgtttagcctaattagtgattcaaattagttggttccaatattcaattaaattataattagagctagcttaatcatggcatagctacctaagatatgtaaataaaataccaaacatagaaatattgattgtagtaagtttgatgctgacaattgaatggaaaacaaaacaatcaccaccttaatcatcaaaaacaaaaacaaaaaatgtaaaaccacaaaaaagaaccaaaccatagtatcactaattcccataacaaataaacaacgataactttacatgagaattatagaaatcaagtacaattagttttgtatttagtagtaatacttctgctttcatctactaataaattgataccaacagaaaaaatgctttgtagtgacatactgcctaagaatttaacaaattatatattttttaaaataaacaaaaaacctaaataagattaagagagctagattcgcctccgtagtaatcatttattttttgatatacttgcatgaactatgatttaaagatacataccaactaattaataacttgacaaatatctatgctacaaaaacggattctttttagagtcttgagaataacctgaaaaataaatacccaacctctcgagctgccaaatacaggctgaattacattagcagagttcctcaaatctctccatttcaaatccgtaaggatctaggtaattatgtgttgttacgactttagatttttgttgaaaaaaaatattaccaataaaattgtgttaattatctataatacaattgtacaacaaagaacataccacttacaatatgagcacattcgaataatgaattcagcaagactgcctacaagaaatcaaacaaacaatagcaaatagaatcacaaactcaaattttataattacaaatattacaaaagtttgaaagacaaaaaaaaaaaactcaataacacatatatgaaactattatatgtcacaagaagtagcagtagaaaagaacaataatgaaaataataataacgtaaataataatcagatattttataatgaaaacttttattcacatgacaccaaactacaaaattatacacattgcattccccaatccaaatttaggtaaactgtgtagtagaatcacgaattatttcttcttaagattaattatataaatgtatagatcatttccactcctcctcact

SEQ ID NO: 228712 - DNA, 1199 bp, Cannabis indica
aataaaaaaaataaattaaaaataaaaataaaaaaaaaaaaaaaatctaacctggtgaaatcctggttccttggtgagagggacgccgagttcggccatacaagcttgcatccgatcatctgagccgtacaaaccagggtacctctgaatacacctgtcttgcattttcgccagctcctttgctaatggatagctaatggcgaatccaccaccgccgtaagccatgttataagagaagtgaatattctgtaaatggctctctgatgagctcccaatataataaaattgttcgtgatcgtacttctgcaaaaccctaaccaaattatcagccacgaatacagtgtcatcgtcccccatcacgaaccacctcactccttccgtttccccaagccgcaaggtctcggagattattctcgagatccgaatcgcggagcggtggcctttggggttcttgtatttgaacttggtggtgttgctcgagatcttcaaagggggcaaactcagttcgtcttcggacctggtcttgacggccttgtctagccaaactactccccgcattcgatctggcttccaccacagcttgatgtaattctttctctggttccagagcttggccgaagccgcaatgccgaaaatgatatgtgaaatattggttttgagtggctcaatgggagccggtgggtcagaattgaaaatggcaatcgattggggatgctgagtgaaaatcagagtttttctttccttacaattactggaatgtgtgacgaatttgatggagtaagagatgtaggtgaggaagattaagagaaagaacaccattagcttcgtcatcgcccaggtggtgtggaaggtttctggattgttctgagagtttttcatggctttttgtaaataaatatgtgtttgtgttgaaaaatatgggtttctatgcctcttcgtcttttcacccggttaggctgctgtttggctggcgagaaagttgagaaggaaaatataaaagcactaaaaattaattaacttttaaattaaaaagaatactgaaatgaaatgaaggcgcgtgtttaatgtgagctgtgaagagtataatgaaaaatacagttcttatataagggaattcccgagctaatctaagctataaatttggattacatttccaattaatcaaaatattagatgttttagttcaataaattatattt

SEQ ID NO: 228713 - DNA, 753 bp, Cannabis indica
aaatcgaatccaaacttaacaaactctctagaatacatacaaatacctcaatagacaatgttaagtgataaaagcagaaataacataatatagcaaagtctaccattgttgagtcaattttaagttcttgaactaaaacatgcttaaatcctcccacaaccaaaaaaacaactcaattaagcttcaaataactcagtaataacccaaaaatcaaactccaagtaccagttgtttggatagaaccagaaacaaaaatttgcatgctaaaactccaactaaaacctcaaaaacataaagaacaagggtttctagagcttaccattgctaataccttcaaattgctactaaattctcttgattttccccatctagaatgactgaacttcaatggaaagcccttgattcctttcggtttaagaagggtcgagagactaagagagagtgagagtgagagagaattagagagaaaatgcaattgatatatcttaatttctaacttatcttaatctaattaatcttatcgtataatctttagtttaaatcagcaagaaaaagcctaaggtaatctatgccttaccaacaaattcaaatattgcccttaacaaaagcttatgttaactttaggcttaggggtaaaatggtcaatttaccctgcataaccttgataaaccaaagaaaacatataattgtcccactagataaaaggttctatactaatcttgtgtgactctaacagccatccatcgcattttc

SEQ ID NO: 228714 - DNA, 2709 bp, Cannabis indica
ttgcacacttcaattggatgccttctttatttggtttactggtttctgaatgtcatgagattttatctaatttgcacaatgttaagatttgttatgttaagcgatctgctaacatagttgcgcactgtgttgcaagaaacttttgttattggtcaaattgccattttgttgaaggttctatttctatggaactttactctttgttaattgtcgatttggttgattaataaaattgaaactttttcaaaaaaaaataatgctgatggctttagtttttagtttatgtattacatcattcatggctgccatttatatatatataaatatataaagtcaatgaattttaataatttatacaccttgatatttaattctttaccatgattatatgaataaaactacagctgtctattatacttattggatgtgtttataatcatagcggtagtttattatcaaataccgtaaacttaatattctttggctgataggattctttggaatttaatccttcaaaataataatagacataattagttattggttaaattagttgaaactgagttgtttagcttctttaattaattttttaatcataacaatttgttatcttgtatgagctatagttttcatttttattttattttgtagatgtaacttgtactgtaaatgtcaaagaaagagaggaagagagtgagagagagagctaaagagagagttcgagaccacggagtggccatgagaccaatcgatccctacagtggccttcgaagacctacggacccattcaggtcctagcctagtcttcgcctcctcctttggttttgacgtgcatggctgagcatccaacccatgcacacgtgaaaattttcacgtggctcaattttgagtctcacagctcgtagccgcactcattgggatttgtggctcatcattttgaggtttaaaatatcgtctcgatgagatcagggtttactccttaaactcgagttcactcatgaatggagaatttgtggaatattaaattacataatttaacaaaaattacaaataatttttaataaaaaattacaacaaaattcctataccacaattatggtgtacaatttttttttaataaaaactataaaatttctaacccaatttttccatataattaataatttacacccaatgtacaaaaaatctatccattcataatatatcaacatatatataaatacattattacccaaacacagtatttaatctatataattatgaagatagctcttaatataaattgttggtttttatggtccatattataattagaaaagcagaagatgttttgattaaaaaaaatataatctaatatgaactataatccctagaatctcaacataataatttatagattaaatctaaactacatgaaaagagaaataatacgtcttgtagcctattagggttttctcgctatcttttttatattaatttatcgaacatgtaattcaaaaacttgctgaagagttcacaccacaatcttctaagtcagcctcaacactaacgaatggagtgagctattagatttaatttggatgagtataatttaatttgtaatcaaagtatatattcaactcataacatgaggtactatgatgagatagagaagaacacaaaaacacacaccacactagtgtgagagagagagagagagagagaaacaatgtaatttttcaaccctaattcttctttaaaaagtgtcgctcaattcactaatattagttgtctattattctaatatattatatatataaaattataaacaaatcctttatttaataatttaaaataaaaataatatctaatttaattcaaattcaaaattcaaatataaataaactgattaacaaaaattaattatatccttttattttaatattatcttttaattaagtagattatccaataatatatttaattaaaaattaaaagataattaattaatttaatttgttaaatttaataataaaataatcaaataaaattaccattgatctttatatgttaccctacacatgtggggtaagcccttaccccacacgtgggccatatgttaaggtctaaaattgattttttaatttattacaaataagatttattatttattttgccaataattaataattgattaattctcatttatctcttatttcactagcattaaaatacatattattttcactaaaataatatatttttctctttaatattatttaagaataatattacatttaattaattaatatagttttataaaataaaactaaatagttaaataatatttgattacacaatttataattgttataattattcaaaataacaatttttcataaattactattttacccttaggatttatttctcactcaaattaaatctttccctatacagtgttgtatagaggtgactttgagactatgaacatatatttcagaactctaataaacaattgattattattgatctcatcaatagaataatctagtttattattccattattactccactataaatatggaattgtactctttgataatatagaattatactttcagaattcttactagtagtctattgatataatcaatataagtaatttgccctccaattattagttcataattagagttggtcaaaattatttttttacccttctaat

SEQ ID NO: 228715 - DNA, 1526 bp, Cannabis indica
gtgttgcaatcttgtaacattccatgtaataaaacttcccatagtgtttgtgcagcttgttgtttaggcaagatacacaaacttccttttccaaatttttccaatacaatgtattctgagccattgcagcttgttgtgtctgatctatggggcctttcacacacactatcacataatggttataaatattacatgagttttgtggatgcttttagtagattcacttggatttacttgctgaaaaccaagtctgaggccttaaaaacctttctccactttaaaaccgaagtagaattacaattgggaaagaaaatcaaagtgtttcaatctgattggggtggggaatataggagtttttctgaccctcttagacaagcaggtgtcattcataggcatccttgcccaactactcatgaaaaaaatggattggttgaaagaaaacataggcaaattgttgaacatggcttatgtctacttgcacaagcttctatgccactaaaattttgggatgaggcttttaggtgtgctgtctatttgcataatcggttaccaacccctgtgcttaatcaattgtccccaattgaaattctgttcaacactaaaccagtctacactaatctcaaagtgtttggatgcctatgttaccctaatattaggccttataataagcacaagttggagtttagatcctccccatgtaccttccttggttatagtcttaatcacaaagggtataagtgcattgactcaaatggtaggttgtacatctctagagatgttatttttgatgaactcaaatttccatatgcctccatctctacagatgttacaattcatgattctgagtcttctacttcaggtgctattcctctcaattctctcagttatactgttgagtctctcttctccaattttaattcttctacaccatctgacactctagcacctgatgtatctcattctggtttgaatgaacatcctgcaccatctgtcttaccaagtctccattcaaacctgcctcaaaattcagatacttcacaacctgcatcaacatctttaaatactccaacaatctccattaatcccactactgaacagtcctcattacctaatacacctggtcccataacaaacaggcacagcatgcaaacacgggctaagtcagggattcataagcctaaagcttttctggtttcacaagaaccaaccaatgtcaaggctgctttgaaagagcaaaagtggtgcaatgctatgaatgaggaaatgtttgctcttaaacgaaatggcacatggtcgtatgttcctttacctgctggaagaacaccaatcggttgtaagtgggtatataaagagaaattgaatgctgatggtactgtcaatcgaaacaaagctcggcttgtggcaaaggggttccatcaacaagctggttttgatttcactgagacgtttagtcctgttgtgaaaccggttaccattcgaacagtcctttctcttgccttgacaaacaactggcctatccaacaact

SEQ ID NO: 228716 - DNA, 1249 bp, Cannabis indica
ataaaatgagatttgtgtgcatacatacagaccatggctccttgtttgtgatgaccttaaggttgttgttaggtataagtggcccacactcttctcaaaacaagacaagacaatatcccataatttccttcttacacccaaacaaaaaagaaaaagagaattattacttggtgagtatcatagtccacaaattgtaaatttgctaaatttacctctataataaacaaacattactttctttaaggatccaaaactagaaatgggaacttgtaacattgaaaaagtcaagggactgatggctctagatttccaaagctacaaaagcaaaagctaaaattactctgtttttacatgaacactatgcttaaacatgggcttgaatggccacaatcttgctcatgtcataacccaatcttaaactacttgatgtattgagacagccacttgaagccttctccataacccatcttccggacaatgctgcacatgaaaacctcaatgggacgaatatcggaatcagatagattgagcttgtcctttccggttgtcaagttagtgaggcctaaatagtaacgcagctcatcttctgaggcagcataaggtatgtcaatcttgttccccaagatgagaaatggaactgtggctagagactcgtcggtgaggagagcatcgagctcctttttcgactctccaaacctctccttgtcgaaagcatcgactaagtatataacagcatcaacctgaattgtcatttgtcaataagaaaacaaagatgagcaaagatgaaacatgtcatcccaacaagaacagaaagagaaacactgtaaaatgttactactatagtaaatgaaagagtctttcttcattctatagccacttggggcatcctgaaatggatggttaggtgagttttagagttggtatttgagttggttaaatgtatcttgaagaagaagaacattcaaagttaaagagttttgcctatagtcaaacataacattttctgtggttaatagctttttatttaatgaagagataataacattttacattaataaagaaggttcaatggtccaacaatcaagatagacttcatcgtttttaacgacaacctttcaaaaaataaaaaataaccaaccaaatgagcaaataaattaatttcaaacattgactgtactgtttagtctataaataaaccagtgcccaaaactataaaactagagtttgaattttataagtaaaacccaca

SEQ ID NO: 228717 - DNA, 1570 bp, Cannabis indica
cacttctcaagaaaaatatagagtttaactttttcctttctacctgtaagaaatccaaaacttcacaaaaataaaaatggtagaaaaaagtattcttgattttagaattttttccatctccaaaaaaagactaattttggagctttagaaatgagtggcatgggaaaataaaacagagcttctaaaattttcttcaactatcagtcaggtactgttatataaatttttgagtaattcatcattgaatttaatttgttagttatatatctggtctagtttctattatataacactaaatctcgttaataattttatgatttgaagaagttgcagctaaatcaaaagttttcaccaaataataatcggatgtttgtcatgtatttattgatattcttaatgtcctatacaaactttattacacacataattcctcttctttaaaataatatgcttttatgatactagaattttttttttctttggataatgattcacaattttttttaactttccttggagctctactactaaattttggtagatttttttctgtttctttgttattcttaagcgttttcatctacaataactcgcaatccatgcatagcttacaacttctagaaaaacataataataataataataataataataataataataataataataataataataataatagtggtggtggtaaatgtttttattagagtaaatattattttgaaccctctatttcctaaaagttataaattgaactttctcttttgttaaatgacaaactagactctatattttttaaaattgtacaaatagaaccctgaactgattttttgtcaaaaataaaacttaataataatttgatttagaaatgttatgacaaaattagttacattttccgtatctatttgttataaaaattgtcttaaagtttgttatattaaaaaattaaattattgaaaattgagctcggggtcctatttttaccatttttgaaaaatataggttccattttatcattcaacaaaacagatggtctaatcgataacttttacaaaatacaggatccaaaatggtatttaccctcattatattcgttttgcaaattttttccttcacttgaattttttatggtatcttatttgattagatagaattagtgtgtaatatttgttatactttttatttgggctcacattaatttttattgattttattaaaatggggtaattccataaatataggaaaaataaagatagtttagataaatatggtaaagaaatttaataagaaaaaatatagtaattaaaataaaaacttgacatatatggaattgaactaccataaaatatattaaaattcccttcatatttttttttaaaagaataaaacaaatgaaattacaatgatcgctggagttgtaatcggtgctggaaaaagcaccggagtttgctgtcggtgccaaaaaaattatcgaagttgctgctggcgccgaaaaagtcatcgaaattggcattatcgccggaaaaaatcaccgcaaaatatcttggtgatttttccggtgaca

SEQ ID NO: 228718 - DNA, 2703 bp, Cannabis indica
aaagttaaatcaaaattttagttcatgatgatttttaagaaaaccctttggttagcgaaggagtgcactgtaattagaaaatcactatagcgagcctaatcattaaggcattacaattttggtattagagctaccatgttatctactgaagaccgtcaagacatgtaaaattattgtcagagataagctcgactcgcggtttagtaagcctttacttgtttagtaagttctgtgattagaaaagccttttaggaagcataatagttttatgattctttattttgaatgcattgatttaaaatccatatgtacggtacataaagcatatgctatcgtgacctacctgacttatgggttcacaggctaagtcctataatatgaatgactagtgaaatacaaggtgtcagggtaacatggttaagatcggaggtggtcgaggaggttaaaatcccccaaatccccgtggatgcggtagaggtcatggaagatttcaaaggggtggtcaagaaaatccaccaccagctcctcaggattgggagcaaaggtttgtagaaatgctaccctaaatctaccaataagatgaagaaattcataggctaaaaacatagggtccccctgcagtgcctccagtgtaaataccggctattttggttctagcagtgccagtagaataatctgttgctgacaaccgtatggagccttttgtatgaaggatactgtaagcaggcgccttcaaatttttggaggtttggacgtcatgaagtttgagtagtggcttactgtaacagaaagaatatttaatttcatgggtatcatcgggaatgaccgagtgacttatgccaccttctagttttaggaggacgctcttgtgtggtgggagttggtatttctcacccgagaagtaactactctaacttgggaagagtatcgagaattattcaatgccaaatattacaatgaggcagtccatagtgctaagcgaaaagagttcactaacttagtttagggagaaagtatgtcagtaacagaatatacaataaaattcgatcgattagctaagttggctttaattatagtacccacagactttagtaagaaagaaaaatacttagcaaatttaaatgccaagatgaaacatgatctagtgatgactacaagtgatacaacaacatatgcttagatggttgagaaggctctccgagcagagggtgcaatgagatttcttctggagttccgagagactccatgtgttggtgggaccaccactcatcctacttctggatatggtaaggatggtggtgattctaatatggatcaaaagaggaagactttgctgacattaggtggttcgggtcaaacaaaaagcaattgagggaaccaagatagaggtgggcagggttattcttatcctgagtgccctcactttgagaaacatcatcctagagaatgcaattggaaggcatcctttcagtgtggcatggatggatattttaagaaagactgccctcagatgaaaaaggaagagtagaagcaagaggcgaagcccgtacctactcaactgtttgccattactcaagttgatgttgtaattagtccttttgtggcaacaggtcagatttttgtcaacgactcctattttgcagtactatttaactctagagctacacattcattcatatgtggcatcgagaacaattaataaattgggtaggccatgtgattctattgagataggatttggaaccctactacctagcagagaattagttatctccaaaaggttgattaggtctatggcagttagaaatgaaaatagggagataagtgtttacttagtggagttgaaattaacagattttgacattatacttgggatggatttcttgtccatgtattcagctagtattgactacaaatgaaagatggtaacttttcaaccaaacggtgacgacccatttatttatgttggagctgttctaggttcctggattctgatcattttagttttaaaggctaaggatttattgcaaagtggatgtgtaaaatttttagtggttgtgattgactccagcagacctaagacatttaggcctaaggatgtcagagttgtaagacaagttctagatgtatttcccaaggagttaccaagattgctgccacaactagagatagatttcataattgatttggcacctcgggcagaacctgtttctaaggcatcgcataggatggctccagtcgaacttaaggagttaaaaatataacttcaagggatgctggagttgggttttgtgccctaaataaaactcattttaatataattagatttactaataaataaaagattagaaatcaatttatgatgcatggttcacgtgatttatttcatgattatatgtttaatgagtaaattctatttagtccagaacatatagttattcatgattatagtgttatcagcacagtggaatataatcaagattatatgttcaaaaagtttaagtcccatgatttttcagtccactagatttagactgacatgataatcagtgataaggtatacttacaccttggataagtgttatgtcctttccagggcattggcaaagtatgcatgtatcggatgtatggagtatacatagattggaccgatatattgtataagatatcataaacttagcgttatttctttctaagtcaata

SEQ ID NO: 228719 - DNA, 2019 bp, Cannabis indica
gggaggcctccatcatcatctagatgagctaagtggtcctcagcaaatgcgatcatatcttcaaaattttcatgatcaccctcatcttaatcatcctcctcatctccattagatccatcattttcttcaacatcttcatcatcattttaatcatctccatcatcttcatccatcttccatcatctccctcagactcagatgatgatgatatcacgattatctcaggaatagtatttcccgattgggggctgcactcacgagaatgaacttcctcatccacccactgtgctgctaaatctccccacttgacaaatttgttgtagaacatgtcattggggtcataatgaccatgtggattgacaacaacatatgccacaattccacaatttgatggtagcttcaccaaagtgcacttctttagtttttcagatggtggtcctggattatgccttacaacatcctcagacaaatgccaatccaatgcacatgttggatctggcagtaccaagtatatatttgcctccctgtagcttctagacctcaaatcatctaacaacatatcgacttggtcttgttcaaccatcctgagtcccatattaaggtgtttccttttaggcttaaatggaaatccaaatggcaactggtatcccgattccagagccatctcttccaaatgcagcctgttgaacccttcaaacccatagtgatcaaaatatggaattcgaccaccctcatacatcttattgccacaacgggtataccagaaatccccatggaataatttcactgtgaaattatccaagttcaaacctgcatggataacataaatagagttaatggtagatgtttactaggcaaaacctaacaactttacccaattctttgacaaaaccccctaaacatttagcccccacatcatacatacagacaaaaaaaaacatgtgcaaatgttccttttgcagaagacaaaggcataagattccctaacagcctttgactacttcatttttacccaaaagtgcaatactttaatatctatctacccacttgacctgtgtatggaccacaattcaacaaaccccacaacctaactattattaactccactaccagaattaaaaaccactataaatccaacacactcatacccaacatttttcaaaaccctaaacactattacaagaaaaaatcacttaccgtagtctggaggagcatcatccctattccgacgacgaaaggccatttcatgaacgagatctggtttctgagtctttctcttcaacttctattccgtgtttctgggtttcctttgattttacgataatggatttggggttcttacactcgtttcacgtgcttactcatcgatttccaaacagtgttcgtgagcttcgttcgattttacaaaaaacggtttggggttcttacactggtttaggtttcctttctcctcgattcacacagtgtttctgggttgtgtttatcttaaggttagttcattttgtttatggatttgtattcatttttttattcatttcccccttgcttattctattttaagtggatttgtgttttgtggatttcatttaattttaatgggatttttgattttatttagttattattttaatttaattttaattttcagttataatcctaggttttagatgaataatgccacgtaatatggattttggtgacttggcaattgggctacccagccacataagcagaaaatggggtcagttagacgggggagtgtatttgctaacggaatagatgtttagatggttttaccacaaaaattttaaatttgtgggttagttgcaacaacctggccacctaaggaggttatgccgcaaatcccccttaaataattataatatacacgattataaaaaatattagactaaacaagtttatcgggtgccgaaacaaataaaagtacatcagtacaacactttaaaaaatatatattgtataatttctataacttaaattcttaatttcacaaataca

SEQ ID NO: 228720 - DNA, 1676 bp, Cannabis indica
ctacctatatttttttatgatacaacacgatactacccatatttttatggcccgatacgacacgatccgtattttaaaaaattcaaaaaatatgaaccgaactagcacgacacgcacatctttacaactatgttgcagtcatgaactatcttaactataacaactcatttaatgaatcaacaattttcttcatttttgacctcttacctaaataatttagctattctattgtatttgtgactgctcttagttatacatatgatcaatatcaatgtactttagcatgatcgttggagattcaagactcaatctcacacactatgggagttcaacataaacaagaacaatcctcaaagtactcaaaacaaactgcaatatgcctatgaacacactaaacttagaatagaaatgaatgaacactttctttattgcttttattctgaattacaaaagtgaagatcaaaaactgattacaagtataggggtatttataattagtgaccccgagtatgttaaatgattaactctacactaactaactagattaactaacttgaaaagttagttaaaaccagttgcttaagtgtcatattacttaggcatacaattctaacaaatctctaccttgacaagtaatatgcaaagaaactaagcaactacataaaggactgaacactgcctaaacttccattacattcagtagtttcaaaaagtgacagaacttagaagtaggtagatctttagtgaggatgtcagctgcattgtcttcaatggccactttgtccagctttacttcccctccaattagtgtgtctctaataaaatacaacctcacatcaataggcttggttctctcatggaaaacttagttttttacttaagtgcaaggcactttgcctatcacaatggatagttatacatctctggtctatgccaagttccatggagatacccttaagccacagggcttctttcacagcttcagtacatgcaatgtactctgcttctgttgtaaacatggcaacaatggtttgtaagtttaatttccaggatattgagcatccacttgactgaaaaaaatacctagattgagatcttctagtgtcaaggtctcttgcatagtcagaatccacaaaacctgctatgttgacagtttttgagcttaatccataaaccagtccaagctgttttgtgccttgtagatatctcatgatccactttactacattacaatgttacttgccaggttgccccataaacctactcaccatacttacaccatagctgatattaggcctggtgcaaatcatgagatacatatgactccccaccacactagagaaaggcactctgtccatgtagttagctttttcatcatctgcaagggcctgtattttggacagtttgaatagtggagtgtagggacttttgatagatttttcttggttaaaactaaacctgtgaaggattttagatatgtaaccactttgagatagtttgagagttctctttgatctgtctctaatgatgtcaatacctaaaatcctcattgctgaaccaaggacattcatttcgaattccttgttcaacataactttaattttgtttatccataagaatgtcatcaacatacaataggagataaaaaatgaatttgtatgttacatgattaactc

SEQ ID NO: 228721 - DNA, 1227 bp, Cannabis indica
tatatatatttatataaatttgatcatatatatataataattagctaggatgtgtaaatgtagctatagggtaagtacgtgcaatatacggctctatattattggtaattatgttattaataattataattatatttgactatatatggatagaaattagattcatgaattattattaacattagtttttcgatcattatataggtgcattgtttggagtgggaactaattaacttcaattaataaaagttatcaaaaggatgattaattacacgtatggtatggctgtaaatataattatatatatttgtgaacaacttttcttataaatttctagaaggaaaaagtttaatttgaagaacaaaaatcactccaccaacttagagaccaaaaaataaccacctatgatatttttgcatctatagatataagggtaaatcactactccacgtatttttaaagatgtatttcgtaaaaataatcgattaaattatctagtacaagaatgtgtaagaaataaaatctgtttgatcataaatacaatcaggtctgattattattaaattttattttgataaaaattaaactcaaagcactattttaaaaaatacagaatctaatttttcatttaataaaataaaagtcaaatcaattattttttttaaatatatagtctaaaataatattaacctatataaattacgtaccaaaatactaaatttgattgttaattattattagaattcttaaatctactcgtaaaatataaaaaatttaaaaactttcaaagctatatatataaatatgttattacaagtgtttaaaacatagatatttatttttttaaaaaaaaaattgtaatgatttaatctcgaattttggcttaaaatccaaaactgccacagctccactaagtggagtggtgtataaagagagcttggatatatatatatatatatatatatatatttatatatatttctagtatatatataagaattgaaaagtgaaaaatttaatactatgatataatatatggagacaagatattttgaggtagttgtttcactaaattgaaaatggtaactaagtaattaaacaacaaaaatatgtggttgatataaggcatctcttcacaggggatggaccacctctattcactagccatatatataccaatttaattagagttatatattatatataaataaattaatgtaactatat

SEQ ID NO: 228722 - DNA, 1225 bp, Cannabis indica
ttaatactgtattgtactagtttttgttttaataacactttgaagccatggaggtcggaaggaacttgctttcttcaccgccgtcttttcctccaagaacccatttcaggaataattattcttcttcttcccctgcttctgcttctgcttcaacttcaggtaactccatacctgtaaattttgtatcttttcttcagttctggtggttgtttttgtttatatgcctgttatagtccttttttttttccaagttacttttctggaattatactgaacttagagaatgatgaaatgggtaggagtaggaggtagtttgtactttagtgacgtggtgtttacaaggttggattttggattttagctgaattccttgagtttttttttaatgaaattggttctaatgttcttagttgggctagctagctccagaacaagtacgttcgggtagttttaggatgttgtttaacgttttttttcttgtgtgtgttgattgagttgttaatttttcatgaacacataggtcctgcggttacttcagtaccaactacttcaattgctcaacggttttctgcctcggttcttttacaagagcagcgtgatgaattgaggcctatgttgcgtttaactaaggaagagaaaacatcccaggtttgtttcatgttcgtttaatacaccttgctatgcttacttcgtaagaatttgagttatatgaatgcattatttgcttaattctattgaaacttctgattcatgtactatggtctgcatgtttctgttcattaaagggaatgttggacaggaggaagaatgagtccgggagtttggttcatgaagataaaagccatgcagagactaacagacagaaatgggaattcgagcacccatcaatccactggcccagtttttggcacgtgtgagattaactatttttctctaatactaacatcaaatttcatttctgtttttcattgttgtatagtgcttatgagttcattccccatttcagatttccctcctcacaaacaaagatggattcatctgcagcattgacaatggagcttacaactgctggtggcaagaagactctgaatgttggactctgtgatgcaattgcattagccaaaaaagctctggaagcttcaaaagaagcagcattgttagtcgaagactccaaattagtgggagctgattctgatgatatggtttctctgaggttagttttatc

SEQ ID NO: 228723 - DNA, 4480 bp, Cannabis indica
tcgacgtctttcagtctcactgttccctccttaacttgacgttctcccaccatcaacatccatgggatcttagactcttccgcatgacgaaagtgcttatccggtcttttggccaccaagtattccgcttttatttttgcatcccatagctcgctcgccagttctgcagcttgaattagatcgtctcctagtatgctcaccaacacttctgtctttgtagctctagttgtctgcttcaaataacacaaaaatcccacaagattggataaaataagtaagaaacgatcaatcgatggagatgaacaaaattccatcaaaacatttatctgataaaatatcatttcttcagtgagaaaaaacaactattcatcacctgattctgatccttctgaatctgctccataatattaaatactcgctcgattcctagacttacaccaactgctggaacttgctttgtaccaaacatgcctattaagttgtcataacgtcctccagcagcaattgaaccaacctaaggacaatcaacattagttttaacatgaaaaagaagaagccgaattgcttgtgtaaacataaacaagctcacctgtgcacctcctttgaaaacagcttcataaatcactccagtataataatcaagacctctggcaagactcaagtcaaaagtcaccttgtcgatacactttgatttatccaaagccttgaataagatctccagatcattcaaagcatcaaccgacgcattattatccaagaattcactcccctccttttaagtttacttaacaattcaagaggagatcccctctcttttacaaaatcaccaattttatctgctgcctctatagtcaagcccttctcttcaacctatcaaaaaattataaaagatccaccagattaaattacatcaacaacatcaggagcatagatagcttctcttatcaataagcatttttcccaacaatgttaatgttatggggtacaagacagatattactttagtttaactatgtaggactccatgatcataaacatatcagtagatctgcctaattatacttattccttctatttatttttttattgtgtggccctggcagtggccccaagtttttgagtctagggggattcaaaccttggaaaattacctatcagcactttccagcatctccttccttaccactgggaccaaccctcttgggattagtaacttactctttcaaatgaagagtagttattaatacaacacatattaacacaaatcaacctttcaagatacatcacacaaatatacaccccaaacaaagggaacgggaaattgttcaggtcacaccaaatatatatgcgtgtgtcggtggaggaaagagagattaaaaacacaaaaatatgtgcagaagttcttaccatttctgtcttaatctggtcaaaaggttgcttgtctaacttgtcaatgcttgaacaaatagttctaaacttctcggggggaactccacaaatttctaacattccatctagtaacttccgatgattcaattttatctgtgatcattaagaaagcaacaacaaacattctaagtaaaaataaaatttaaaaattccatgtaacaagtcagagaagaatatttaatagaaatgcacaagtacaacagttaacattgatactttaaccgagataaggagatgaatgaatacaattgattggcactaatattccatttgcattacatcagaattaacaaatatgtagaaatgaagttaatgctcacattactgtcatgactaaagaatagtaatgatattacatcactaacagcatattatggtaacatctactataaaacctaccttgacatgtttgggtaaggattttttttatgctgaatatcaaaaaaagcacttttttgataaactacgctaaacagaaccatcatttatggttcaaaccttgggacaagaccttgagtaatatagcaaaattcatgcgtttaaatatcaaatagtgcaatccatagagaaaacaagattgttgatagcacgtactaatcaaagtggaaagaagaaaaggaagataggaaagagaagttacctcatacttcccaatttccagttcatccagtaattcagtcaaaatcttaataatttcaaaatctggccccattctttcatattgaccagcaatatcaaaatcacattgataaaattcacgatatcttcctttagatgggttgtctcttctgtaaacctttgctatttgataccttttgaaggatgttatgccattcatagccacaaatctagcaaaaggaacagttaagtcataccgcaaagaacagagctccccaccctgtcaacgaattagaccatcacaaaaccttagtttgttgcaaattagaagcgattgattcatatagtgtgtaataaatgcagaggcaaaagacttcacgggaataaaaatttagaaaatcagtgcgctaacctggtcagcaagatcaaatatcaacttcgagtcttccccatattttcccataagagtctctcttagttcaaatactggagtatccagggccgtagcaccatgcctctcaaaaacatcttctataattgaaaaggctttctttcttatagccatttgttctttcgcaaaatcacgagtaccctgaaatgcaacagatatccaagtcagaaatgtaattttttccccttctgttaactaaaaatgtacaatatatagactaagaacacctataaataatggtgtaaatgattaaaatttcaagtaggttatttacctttggaagcttaggaagtcttctagtttcattgctttccacaatctccttcactttgatcaacaagctatcaaactcaatgtcctttggatccataaaggataaaagatcttcaacccatttctccagtaaccctgaacttccacaagcatctaacttactcaatctattcttaatcaactggatcataacactggtccctttccccataaccaccttccttttcttctcactcttcttatcaactttcgctttctcttctccattgacctctgtgcttttactttcattcaattcagcaccttcaagggaaacgtatgcaattattgcctcccaagccacaactttccacacaaggcccagcaaaacattcacttgatgcgctaatttgccataattctcttccccttcgaaaaccagttccgagaacagcttaaactcatttttcagggaatcattactcgggcatttcttctcaaacaaacctcccaaactcgaccgcaaatcatcgctacccattgaatataaatttgatttagaacggtcaaagctacaagtacccaagtcccacagcgctgcagccaatggcagtaacgcagtccggaccatcccggctgctccagcgacgctcccaggccctcctttgccagctttaacggcagaattcaactcgacccgagtcttggaatgaaccaatttggcttgttccctcaaacagccgtgaattttggggattttcgaaaccgcattaatctcaaccttccccgtcaacttagacccattcagaagtaccttcatatcaccacaaacaccaatctcatccttcgcagtatagccatccccagaatccatcaaattaaacgctgtaacatcagctttcaaagcatcacatgataatgccgccactgcatctgcaattgtcgaaagcgccgccgtttggtggtccaaaagagcgaaaactccgtacatagaagaggtcagccccaatgtttccagcgtagcagcctcctcttcggtcaaatctagcgattcaatctccaggctctgcgagttcttcgtgttcaatgcttcagcaattcgaactgggagaactgtacggatgcaagccgagccggagatgatgagaagcttgttgaggagtactgcgacaaaggccctggactcttccgtggttaagtgattggagaagttgaattggtagtccttgatggtcggagtacggttatcgaaggtggcaagcctgctaaatgccgaggaatcgattcgtacttgtgcaaggccattggcaatggcatagacagatgatgaggacagagacgatccctttccccctagcgtggtaacaaagacttggagtttctccgccattgccggagctcaaagagtgaaatgaagaggtattttttcctggtcctgatattttaaggtttagggttagagattcaggagttggatagataacattcatataatcaaacaatgaagacaatttattgatgaagattgaagacaacaaccattgataaatctcatctgcatatggattatcaaattcaaaaatgcccaatgccattttgtatcagaaaaaattaatgatcaaacaaaacttaaaataataatcagattcattattatcatattcaaaacaataaacaaactaaataaaaaataaacaatctcatattctc

SEQ ID NO: 228724 - DNA, 936 bp, Cannabis indica
gagacttggaatcaggagaaaatctcatacaagtggtggttcagcccccaggcacaacactgggcacccaagtttacatttggtctgaggcttagtgttttgtctatcaagcgacaattctatttcggacattggtcttattttgcccccaaaataagatccggatgcttctgtaattcaatatctcatgtacatgtgtcacacataagtccactgacacccattgcaatagtaatcacctgattgtcacctaatcatcgttagtgattcactgggcatcacatgtgcacattaagtaaaattgccaaaagagcttaaccggagtcaaataatgaactaaggatagcttcacattatttagcatcttaaaatatgtggaaaatccaaaaagtgcaagttcttggtgcctaagttgacatttgtggcaatttggtcgtcaacaagttagtttgccaatttttcaataatacacactactcagtaaaatggccgtaaatcattcaatttttatccaaatgataaggttaaagtgaaagatgaaagctcttttcaagacggatctaagtgtgtctcacacccttgtcacgtttttttaagtttcggatgtcaaaattgacttgtgagttagtgcataattttttaccaaatttcatgcgaattttttattgtaatttaataggaccttatttcctataaaaggagagctccccaagctcattattcgcactttccattctctctacaaggtcagatattctctctccacactctttctctctctagaaattgtgaactgaagttagacttattcatttttccgctagttctcttgtaaggcaattttcttttgcgataataaaagatcaaggtagacgtagctccattaccatcgcgatatgggtagtgaactaatataaattgtggttttctctcttt

SEQ ID NO: 228725 - DNA, 1355 bp, Cannabis indica
tgttctatgttatatacaaatagatcttgggttaattgttaatttatctaacatggacaggttgttggtgattataaatggctcattatttatttaaaaccttaaataaaatgttatctagataagagatattaacacagtacagtaaaatacagccacaaatgaatatcatatgcttcatacctctaatcttttatgttgtacattttaataatgtatatcttttacagcataaatacatggaaccttctattttttttattttttattttaaaaaagcactgatgaatctgacaagttggtgaataataatttctgtgatttaaaacatgctgagttatttttttatcttttggacattaggtggtgggatccttttacttaatttggtatgtagcaaagaagatgctttttgaggtgacaaatttgacactatatgtaaagcatgaagatgccgtgtaaagttgacttgatcattagagactataaaccaaaactaataaataaattattttatcattgtagcaaacacaaattcaatctcaagcaagcaccaaaaagaaagtaggtacgttctcatggcacctccctcggaagaattggaaaacactccacaaatcgttaacgatgaaaggaaacaagaagaagagaactttgcatacgcagcacagcttgtgaactcaagtgtgctctccatgtccttgcaatctgccattgagcttggagtttttgatatcatagccaaagctggtgatgcagccaagctctccgcgcaggagatcgtggcgcagatgcctaccaccaaccctgatgcgcctagaatgttagaccgcatcctcagaatgctggccagccactctgtgcttgcatgttctctggagaatgaggatttaagggtgtacggtcttaatgatgtatccaagttatttgttactaatgaagatggtgtttcattgggtccattcatgtctttgttgcaagataaggtcttcttggatagctggtcagtacttatatttgttttttacatttaaaaacattggcgtatattggtatgttgtttagttcaagttttaagcatttgactcgttgaaggcaaagctttaaaaaccaattagactagttaatttacaaacaattaatcaacataattttagtgtaaacttgtatgccttcaatgaatgagcaggtcccagctgaaaggtgcaattcttgaaggaggaataccctttaatagggtccatggcatgcatgcttttgagtatccaagcttggaccaaaaatttaaccaggtatttaacaaagcaatgtacaatcagactactttggtcttgaagaagatcctagaggtttac

SEQ ID NO: 228726 - DNA, 2410 bp, Cannabis indica
tgcagtatgaaaacttataaaaaaatatagtaaaaaagtaaaaattccacctgacagtatttttgtaaaaaaatagcaaaagttagtataccatgtaaatttcccctaatatatgacattgtccggttttagtttgacccacaaaaatttacttttgtacacctttctaaactcttactgatggcgccgtaggtgaatgctaggctctacgccaatcagtttggacggtttatcctttatattttctaacccaatttaaatttgggttgctaaaatgggggaggggggcgataaaaaaaatctataaaccgacatccaaaccgaccgattttttttttaaaatcaaagtcaataataataataatgaagttttactgttttatgcatcatcatccacactcacttcacatccgtaactacaaaaatatatatatatttatatatatatgaacgagagactgaaaccaaaatttgatacaaatagctagtagggctgtgcatgggttgggttggccgggttgtggctattttagtgggccaacccaatgagatcggcctattaaattctaacccattcatatttagttttacttataacccaacccaacccaacccattattactcgggttgggttgggttgggttgggttacaacctttaattttttacaattaaaatttttaagttgaatcttctcattaaaaaaattgagttggataattaaataaatataaagttaaggtaaaatcataaaataatcaaaaataaataataattattacaatcatccaaattcaaaatccaaaataattaccaacttaaaaaaaaatcaatgttcaacatcaattaagaatgacaatattcttcacttttggtgatgctttgatcttttctttattgcctacaattcaaaaattaagtgagtcaaattatttaaattaaattagcataataaataaaataacattattaatttataaatcaatcattataagataaaaaaattataccttcttcaacatacatgtccattacattttacatctataaataattaaatataacaaaatttaggtatctatataaaaaacaaacaacaaaacagccacatagactaaagagacgtatcacaacatataatactattttatcactcaaatcaaagaagcatcattacatagtattaataactagaaaaatcataatatagagagtaaaatatatgctatataaacactattatagtagcaaattacttataatcaacacaataactgaaaatcagtttatatttaaatttatttttatttaaattataatcaacatatcattcaagatcacagcaaaatctaacagtagaaaaaataaccaaatcatatataagaaaaaaattaaatgagtaagcagtagcaaactaaaaattaaaacttcatacgcacaaccaaacattatatttattagtaaaataaggtcaaggaaagaaagataaagacctgagtttatggtcaccaaaaacaacaaactccgacacctgagaataaggaactccaatgcctagccgactgccaagatgcttacgaaattaaaaaaaaaaattgagctatagttctttccaacatagaaaaataaatgaaaaggattaaagaagagaagagaaaaataaaaagtcttacaagttgtaaacttagtaggtgcggctggcatgtggagagttgaacggtggtggttcctggtgcgggtggctggcgcagttggagatctgaacggtgggactggtgcggctagggtgggagaacattgttggagttggagcctcgatgaggacgatggggcagggagatgagcgtgtgagtgactgagtaagagagaacatagctatggaggtttgagttttttttttcaaaacaaaaaaaatggttgattgacgggcggctgtgtttggagttggagaaagaaatgagaaactagagagaggaagggttatgttgttgtattaggtttagggtttgtattttagatgtaggttaaatattatatatatattaaatatttttttattgttatttttagttgggctgctcggcccagtttgggttgattgggttgaaaaaccctcagcccgatgatcaacccattcagtgcgggttgggctcttttcaacccatgtgaggttcagcccactaaatgtgaccatgtttcggcccatttcgggttgggttggccgggttggtcggcccatttccaacccatgctcacccctaatagctaggaatcaagattattaaaatttgagagatagcagcggagagaaagagagatgaaagtggatcttacagaaaattaaaaaaaaaaataagagagagagagagagagagagagagagagagagagagagagagagagagagaga

SEQ ID NO: 228727 - DNA, 2064 bp, Cannabis indica
cacgagatgtcgtatttaatgaacttgaatttccctttcaaacaggatttcttaacaatatcaatctgaaaaaccagtgattatacaaagttctacttggtctatttttccctctgttataccaattgcaggccctcggctcacttctgaaagtccatccttaagcactcaaggagcagaatcctcaacttctcagtctcacaactctcaggtacatcctactgtcactcctctcacttctcgctcatctactggctctccttcaggtggtgagaggggattatctgaacatcatcctcctagtcccattgctacagccttctttgatcctgaattggccttaaatcctgctgaagctgctgtaactcctgctgaacagtcgactgcctccactactcaggctactgctggacacccgatgatcaccagagccaaggctggcatcttcaagcccaaggtgttcatgggagaagcagtttggaaccctcgatctagggaaccaacaagtgttgttgaagcacttgcacacaaaggctggaacaatgctatgaatgaagaaattacagccctaaaagccaacaaaacttatgttcttgttcctcctgcacctggtcagaacttaattggtaataaatgggtgtttagagaaaatttcaactctgatggatctctccaaagactcaaagcacggctagttgctaaaggctttcatcaaagaccgggaattgattttggagagacttttagtccagtcatcaaagcctcaacaatcagaatcatccttgctatggcagtttctaaaggctgggatataaggcaattagacataaataatgcctttttaaatgggacacttgaagaggatgttttcatggcacaacctgaaggattcgaagagaaagggagagaacattttgtttgcaaattgaacaagtctctatacggattgaagcaggcccctagagcatggtttgacaagttgagggcaacactgttaagttggaactttaaaaattcaagagcagatacgtctcttttcttcttcaaaaatggcaccgcttttatcaaagctctaatttatgtggatgatataatagtgattggaaataacaacaagaaagtaaatgattttattgttgaacttaacagaaagtttacattgaaagatctcggtcctttacatttttttcttggaattgaagtgtacagggacgagacaggtctttacttaacacagacaaaatatattgaagatttattgaaaagaaccaagttcatcaatctcaagccgtgtcccacaccagccacagcagggaagccaatgtcccttaatgatggagagccattgcacgacatcacagcctatagaagcgtcattggacgactgcaatatctctgtcacactcgtccagatattgcctatgctgttaacaaattgagccagttcttgaaggctcccacgacagcacattggagtggtgccaaacgtgttctgagatatctcaaaggaagcatgaacaaaggtcttcacatcagctgtgattctcaacttaacatcactggtttttctgatgcggactgggcttgctgccctgatgatcgaaaatctgttgcagggtattgtgtttatcttggcaacacacttgtttcatggtcctccaaaaagcaacacgttgtatcaagatcgagcacggaatctgaatatcgtgctttagctcatgtctcggctgaaatatcatggatagaatctctgctgaaagaaattggcttccctcttaaaactgctgtcacttggtgcgacaatctaggagcaagtgcccttgcttcaaaccctgtgtttcatgctagaacaaaacatattgagattgacattcactatgttagagataaagtgcttagaaaagaactggaggtgagatacataccatcctcagatcaagtggcagattgtttgacaaaaggtttgacaagctctcggtttcatttccttgtcgacaaacttggagtcatgaattcccccctccgtttgagaggggatgttaaagaaaatgaagcagaggagta

SEQ ID NO: 228728 - DNA, 3006 bp, Cannabis indica
  modified_base (66)..(66): a, c, t, g, unknown or other
gtttttttttttactgtaaaaattaaattatatgtaatattgattgtataagttttttttttttanaaatgacgtaatctaattttttgccctaaactcctgaaccactttgaccggccgccctagtttcacctctcaatgtaaattttgataataactaaatttgtactacttttaagaagttggataattatacatgagttaagaggagagtataggagtgaaaaaatataaattttattcttctactattaatttggacgtattaaaaaaaggtataaatttaattatctcatataataatatataatcggtaaatagtatttgtaaaagttattaattagactttctctgttctgttaaatgataaaatagactctataattttcaaaatagctagtaaaaataggactctgagttcaattttcaataattttatttttaatataaccaattatcaactataagataatttttaacacgaacagatacagaaaatgtaaccagttttttcataacatctctagatcagattattattaagttttattttaacaaaaaatcaatttagactcctatttgtataattttaaaaaatacaggatccattttattatttaacaaaatagagggtccaattagtgacttttgcaaattacaaggtccaaaataatatttactcatatataattgttgtccaaaaaataattactattactatattttccgagaaataaaatcaataagtttgaactaaagtaaaaaagaagttagtttaaccaaacaaatatgcctaatttaaatatttttactttaattttaaatcaattattttaatttaattttaaatcatttttatttatttttcatttccaaagtttataaattaatttgttttttatttttggtacaaatcaatgtttgtctaggcaaaattaatttacttataattttttttttgacgtggtaaataaggtaattatattgttcattcaaacaatttacaatctgccaattttttggcctgcacagtaacaaaaccacctgagactaaattgcagttccaatctctatcagtttgacttattaattttatcatttttaatagagttcttttgaaatagtttaaattatttaaaatatattttaaatgatttgaaaattgagttgattgttgatagttttattttaatttaaagataattagtttataaatataaataaatttgagttttatttttttcgaaaaatttaattttgcttttgaacactaaaaaactttttcgtttattttttatttttttttaaaagagagagttctaaataattttaaaaataattgtattggaattgtagtgatttttctttgatattatataattaatagaaaattagaatttttaaattatctttaatttcaattaaaaaaaaaagcacaatttagtattggttattaaagtttaggcacaacaaagctaattattcatcatcattatgtttaaggaaacattattaatatggcttatatattttttcatgtgcacaattatgttggtgattctataatgcaactcccaaaaaagggtatattgatgtactttttatttatgtcggcacttaggaaaaaaaaaattagtacaaatatacgttatatttatttaatacatcttgcaaaataaattttgaataatttacattatagctagaaaatagcgttcaatcagcctattttacacacttataaaataaaagagtcagtcgtgactatttgagccttattttttacatgttaattttttttaaatttttcaaaattttgcaacatatttttaataatttacaacatatatacacaacaataaaaaaaaacttagactaaatatttttaaatgaggaatcatataggggtgcactgattcacctcttctaggagggtatacgtaggattttcttaataagtttttggacaaaaaatttaattattctaaaataaaatattgtaattataaataaatctatctacaaagttaattacctgcagcaaagattaaagctagggcgacagtaaagaagattactattttgaatcttcattgtggctgatcgtaacttttcaatactatataatatacttaatttgatgatatacgtgaacgttttaggttactacaatataatattatacatatatatatttataataataatttttacaaaaacttgctaatacaatttgattgaattgggtggttttgttataaatttatagctagctaggcttgaggtttggtacacagcagtaatatgtataattcatatgcatggtggctctatagactgaagaaaattatacaatattttacgtgttggatacattaatctgatatatagtcaaatcaacattattttatttagaaattcgtacgtaaatcacaaatcttacgattgatcatttattaaagttcatacggcatccattgtaatattgttagcattatattttgaccacttcaactgtgctaatttgaaagtacgtggttaattaattattctaataaaagatacagattttagtcatgcacagcatgatatgggtacgtacttacgtacttattttaattattacattgtttttatcaccgtatactgtattactgatcctcaatagatagcttaaagaataataatataattatataaactctaagagtccgtttggtacgcaagttttatttcatgagaatggatttagtaattagtattactggaagagtgatgaagggaatcataaacatacgaaaacgacattaccgtgtttggttgtgcgcaataaattttactatatatactcaaatatcactcaatatataaacgactgcatatattataattttaggcgatagtactatttataatatggtattgaattgtataatgttatataataaactatattatatatcatactttaatataatactacgtttaatattaaattatatatgt

SEQ ID NO: 228729 - DNA, 1276 bp, Cannabis indica
ttttgttatatgtatgttattttttgttatttttttgttgttattttcaaattacttttatgttgttttcttgttgattttatgttgttttcgtattattttttggaaaaccgtaaaaatgtaaaaaaatattctttgaacgtaaaaatataaatattttacaaaaaaatggtgtattatgtaattattccaatgatatatgaaagtgggtggaagatcaatccatattttttcatatattggcgcccaagattatttatatattttttcatatataaaacttaatacttaattacaccaataacaatatgacactaaagagggtggtagacacatttaaagtaacaagtcaatagtgaataacaaagaaattaaggattttgatttttttttttaaatatttgaaaccgagtcgagcagggcctgatctgaaataaaatgtatccagcaggggcaaaagctcgacaacaacccagatcatgcaagtcgggagtcaaccgcgaagataaaccaaattgccattccgcaacataataggcagccatcaagaaagccttaccctccccaagagcagagttggtagttcttcaaatatgatttatatgtgtatttgacagtccttacttaggttagactcatctaatcacactcatacaaactgatttaagtacttgttttggtatagcaactttcctttttcttcaagatagtattttttggcatttgctacttgttattaagtaaacctttatttacagttcttcttttaataacttaatccaaggaaaacattctaataacaagccattactttagtaaataataacaccgagtagtattttgtgcagtaaaataatgaaagaacaaaaaattgggatgaagagaagaaataggacagaaattctaattaggatataacattaagaagactacaatatctcacaaaccaaactcaaagtagtgaagtaccattacataacaatgttaaagtatcctaatgcaaccattagcaaagaaaactaatagaagacagtcatcactacacataagttgtaaccattgtttaaaatgttgaagagtaactagtataagccctttccattatagatagactctttaaagaaggagaaatccaatgcagagcatctctcaattctgattcccattccagttttgatctagtaaaaactctaagatgctcccaattaactaaaggagtacgacatatcttctttattttttctgggaatatgagagccttcatgtatagaattaa

SEQ ID NO: 228730 - DNA, 688 bp, Cannabis indica
gtaactataaaataccgtatgaaaaaaaaattgaaaaaaatgtttctttatgtgatttagaatgtaaaaattaactaaaaaattgtaataggaagttgtaattaacactccttataagtgaaaatatatattacctagctgtatatttttaagaggcgggatccatatcataaatttattggacaaaattaaatattaataatgatatgtatagtacatatgaaaattatacatgcatacactatagatatattgttgacaatacataagggttttcctaaattaaagtagcccctactcatcttttgtcaaaaaaaatgcagcccctaccatcaaatttatttctttattcttgtccaaaatgaattcaaagtctccaaatatttatggtaatgtaagggtgaaatactcaatatggtatcattaatgtttttggccactttgcaaattgtggtagtagtaccaatgccttaaaatatttctttttatgtcattgaacacgtcaatattgtcctcaaattagaatcggaaaattaaaaatcacaatacataattaattaagaaaagtcataaaataaacaatatatattaagttgatattacgcatctattgcaagtataattaatttttttaattaagtgatgttaagtgtaatatatgatgaatgtttaatttttttttaattaa

SEQ ID NO: 228731 - DNA, 1383 bp, Cannabis indica
ttaaaattataacttctaagcattaaatgtgaaataatttaatgtaaatacaaaaaatcaaagaatattattttttataaaatgtagaaccaagcattaataatttctagctataaaaaatatgtgatattaaagataaaagaaattattttaagaagctaaaatcataggcatctattgtactgagaatcaaaataaaaaataaatacttaattaaatatactagatttcatcgtccaccttaataataagggaacttaaaaactcataagaaaatcaactaagaaaagcagtaaactgataacactgagcgctgcgagcatattctctggatttttctgcctgaaactctgaaaactctactaaattctaaaatcctaaacttatatttatagaaggctaaaagcactaatgtgtaattaaatttattataaattgtatgcgggtaaaaatataaataataatggttaaaactggagtgacaagtggcacccgttgattggttgctttgtatgaggcagtgccacgtgtcaccatttaaatggctgtaaaagatgagcaagttgacttttggaggttgaagggaaattgggtagaaaacccctggccgtgcgcctcacgcgcgcttggaagggagagagggagacaaggggctggcgtggggcctgtggctgatgcgttaatccggaggcgccacgtggccctgtgttagctggagagggagaaaatgggtcgaatgggctgctttcttgggcttcaaaaatgctattttttcatgttttgggccatctttttgccacattttatatttgatttctttctttttcaaatactattttctcaattaaacacaaataaaattaaatccaaacaaaatatttcaacatattatatattacattaattttaataaaaatatttatttaaaatctaattaatttgtatttctttaaataaaaataatacattttcttaactttttattttttttctctattatgccataaatactaattattatttataagtaaagataatattcaaattaaatctaaataaaatattttaacataataatatattgcattaatttcttgaaaatattataaagaattaattttattttatatttttatattataaaatatgtaatattttggcatttaacagtaaattttttatctacttattaggagcttgattatatagggtcatgatctccgcactaactaagataatattgatttgtagtatcaattaattagtttgaattaatcaattagaattctaaataaaactaatgtcttgtttgtgaattttcactaagcaatgacttatttgagaagaaaaaaagttttagagtttgtttattaattaagagac

SEQ ID NO: 228732 - DNA, 890 bp, Cannabis indica
cgattggaaatatcaaggatatctaatccccgcttgatgttttttctctacaaagaggagacgtagtggaagcgaagagccagaactaaatggctagcccaaggcaacaaaaatactaagttcttccatcgtcacgcctcccataggaagaaagtcaataaaatccttcaacttcacacagagaatggaggaatcgtcaccacggaggaagacatcactcatgaaatcgaaacctacttccattcgctcttctcttccacaaattcatcattctatgacatgcaaattgctttggatggcattgactgttccttgtcagatatcgacaaatcctttctggatggaactttttcaattgaggaagttgagaaagcgttctctcagctctcttcggataaagctcctggccttgacggtttcaactccaatttttacacagcaaactggccgcttgttaggaaagatgtgttatctgtggtgcttagcttccttaatggagatggggacattgcaccccttaacaccactcttataactctcatccctaagaccaagcaaccctcttcagttaaggattttagacccataagcctgtgcaacataatctacaaaattatctcgaaagcgatcgccaacaagcttaaattagttctaaccaccatttttgtatatttttataggagaatttagtgcaaggcaaatacccaaatttcattatttagcatgtgattaataattattacttcacaagagacgcgggacccacaataatggaaaaaaaaaagatgataggatcacaacattttgtacttacattaggggagaataaatcgctcattcctccggtccgacagtgaagacatcgcagagaaagtaaacatttctgggag

SEQ ID NO: 228733 - DNA, 1226 bp, Cannabis indica
ggttcaacttcttgatcctccttttcaattcgagattcagatgcaagaagtaagacttccatttccccaactgtataaccttcaattcgagtacttgtagagatgataaagtgtcatattcgctttgtaagcccttgaaaatggcagtattatgacctcgatcagatagaacctctcaattgaggctaaaagtcgacatgttgcttgactttaagaagatagtcattaatgttcagtgttcctttctttatcttctgaagtttggttctgaactcgaggatcttagatgaaacttttagagtgtagtgttcttcaagagctttccaaatttatttgacaaaattacatcccaccattcgagtcaataagctttcagacattgaagataggagccaaaatacaagaacttgatcttgcacttcccaattcacgaacttgggattaaaatttaatgcagctttgtttacatcactgagaaactgaggaggagggggaagatcttggaggaatctttgaaatcagtttccacgaatggctgtaaggatttgctgcttccatatgagatagttgtggtcattcgtgggaatcgattacaaagaacttgatctcgaatggttagtggtcattgagcttgattgagatcgtgtgattgaagtagacagtcgcatcttcttgatctctagttcgatttcttggagctggaatcggagctccttgttggacaacttgagaacttgagtttctaggacaaatggtagccatgtttgccaacaacgacggccatggctctgataccatgatggaggtattgtaacatagagaaacaaaggagagaaagagagaaagagagaaagagataggacaaaaagaagctttatattgatttagcattagttacaatgtgccttatacatatgacaatggattgaaagcaactaacacctaaccaaacttaaccaacttatgaatagttggaagctgaccaaacctaacaactaacattttaactaactcctaacaaattgtcctaatatagcttattgtggtacataagtatctatttctttgtaatggaagtatcataaaatttcattaggcacatgtccaagattgatacacaaaaaagaaaaatattgtgattaagtagaataaatccttctaacaatatatcccctctactaataagatcagaatttaaactagattctctagcaaaaagtgaacaa

SEQ ID NO: 228734 - DNA, 2064 bp, Cannabis indica
tgcataataaattatctcgaggcgaaattcttgacacttcatagttggaatatgattaaggtagtttttggatcgattgagcctttcgagccgacccttatgttgtatccctggttacccaagtttgagccttaacatgtttgaaaatttttaaccacttttgagtttaccttattttcataagtgcatgtaccaccgataaaccttaaattataccataggtacttggctagtttgggggaatctgttgttatggaaacttagtgaaacgtgaaaaattgagaaaagtgctatgtgatgaattgtttttgacatcactaaagaaaaaaaaaatgactttctcgtcggttatctgaagaaaaaaatctaaaaaagagagaaagaattaaaggaaaaaatatatatggttgaattacggaaaaaaaaaaaagaaagattctcatggtttctcaaccccgaatggtagtagttaggcattggatttccccagtagttggttattataaggtttgttggccatatactgtgcttgttccatactctttttcaggctcttgtgatgcagatgcaacaacaacattttctacagttgatgtatttttctgagcaactaaggcagccacttgattagataaagcagaaatttgagccgctatatttgtcataggatctacttcatgtaacttagccatatttttgtgagtatttcttccatttggccaattataactattatggccaactcctccaataaattaatggcttcaattgcaggttaagacaataatgcccctccaacaggagcatcaataatagtcctagttggaccattcaacccatttgtagaaaaatgaaacttgcatccagctcttatagccatgttgtgggcagcgatgtaataagtctttgaatcactctcatacttcataaagttgcttcgaatcaagctgtctaaattgcccaatctcactcttcaactgtgcagactttgatggaggaaagaatttcaccatgaactctctggcaatttcatcccatgtagtaatagaacatggcagcagagattgcaaccaacttcgtgctctatcccttaaagagataagaaagagtcgtagtcttatggcatcatcagtaacaccattcatcttcacagtagcacatacctccaaaaatatggctagatggatattgggatcttcagtagccaagccaccaaactgattctgttgcaccatattgattaagtaggcttcaactcaaaattattagcagcgatgactggattagcaataccagtcagattttcattcaccgtaagtaagcaataatcacgaacaacccgtggttgtgcatcagctgcagcaggtgctggttggttgtcattaggggcattgttgttattggttgccatggtgaaatttagtttttttttttttttgcttttaactgcttcaaagttcttttaaacttagaattcagcggtgtgagtggtgtagcacttcgatttcttcgcataaactgaaccacaaagcaacaaacaaaataagaaacaaaataaaatctaatttaaagtaaaaacttttagtaataatattaccaataatttaagaatttttaatccccagcaacagcgccaaaaaattgtttttactgcaagcatacagtgttgttatagcaaagttttaatactaaaaaggttatcgaacccacagggattgattattaaattttactaattattatactttttaattttatattttaattagacaacacaaagtaaattataattaagaaacaaataataagataaatagaaaaataaatagacaaacaacatttttaattagaaagtaaaaacctgattgattttcctatttcaaactttgatataaatttactgattatctcaatttatcctataatttgtagtttctaagaatcttaatgtaacctattaacctctctcgagcgatgatagatttaactaaaattaacaaacacaatatctctattcaatgtcaatcaaataagcactcataaaacaatatgattctctttaaa

SEQ ID NO: 228735 - DNA, 655 bp, Cannabis indica
cttagattgtagtagtgttattgattataatttttttgtttttgttttattttttttttatcgaccataatatgttaaatatacaaatcaggctatatatctgctttttgttatggtaaatgttaaaatgtattcttatattaagcaaatgtaatattgttattggtgcaatataaaaaagtatatattaatgtaataaaatatattttaaagtgttaagcataataaaatatgatatatattattatcgttgcaatttaatataagttattacactttttgatttgataaattttataaaaagctactgactactcatgtctttactaacagcaatacttttttgttttaatagtaaacaaagacgtgacacatctgcaaactatttttagttaatttaaacaagtggcaaagcacgctcttattttttccctttcatttctttttatgaataaatagaattaaaattgcaattactaagtgagtttttaatttgctactaatattattggaatggttatttcttcttccattagagtgaattttgtgtataaccactagaaggtctaactcgtttttatttatatatcctcgcattattttcaaaaaaaaaaacctcagggaggcatgtaaagaatatgctagagaggttgaa

SEQ ID NO: 228736 - DNA, 1005 bp, Cannabis indica
cccaaccacgtaaaaatcacgtgtttgttatatttctttctttgaattatttgttttttcaattctaatttcttataattggttttctaaaaatctcggtaaatattttagtactttcattgagagctaaaggatgtaatgataccatctaaagatttcattcagtaatcatggtactcagccgaactaaattttgccttcattatgctaatcataatgctaaggcaggagatacagaagatccgaatgaggtgaccagtcgccacaaggaccaacatggtaaatactagaatcttaatgatcccataatcgaagaatcatgagagattagttctgatgatgttgaagattatccccagaacacaccaaaagatgatcgcccagatacgcctgatgatgatggcaaaaagaaggacaatctagacgagttagatcctgtggtcataatggcaaaaaaagtgcaaataattgaaaaacaaattaactcagcaagaagagttctctttgctattttttttgtttgaaagaaataatgctcgagaaaatgacaagggtggaagctatgatgacagccctcaccgctagaaacaaaactaaacaaatgactccaacaaatgatttcactagaaaagttgatcctaaagatcctagaacctctaatcctcataaggacaaagggaaagggaaaataggtgaaacatcaaagaaggattctcaggccaaacaacaaaaaaaattaaaactgtcagccaacctcaacagaaaaagaaaggaaaccatacttcaaggcatggtgaccagactaattttggagacagagctgcagagaaagataagtctgatgctggaatcaagaagcctacttctcggaaggacaagagtcactataatgattctagtagttaaagtgatgatgccgatgaagtgcatccagtttcagacaacaacagtggaagtctctccagaaataatcttcgaagaaggttaaatgaaaagaaaaaaaaa

SEQ ID NO: 228737 - DNA, 1380 bp, Cannabis indica
attccgaggatctcttgcaaattcgggatgtctactatcaaaatctttccacgcgacaaaattaacaggatgatgcataacaccattttcttttacacgaccagtacgatgccataccatctctttggttgtatgtcttgaactgtataatctttccagtgggtgtcatgatgttttgggagtcaaattggtagctccaaaatcaagataccaatttgtgtcccatccagcacttgaactagcaaggtgtgcctggatttgagctgtgtggccagtgtttccttaaggttgtgtgttgcttgtataagctttgtcaaacttgtagaagaaatcaagagcagcatgactagctttgaagcaaatttgacattgaagtcgattgtcgttaccactagggaatcgtcctcctcgattcccagtgaatcatcctctctgattactgaatccagatggtggttgagaaccatgacctgagttaccaaaatgagtttgagttgctctaggttggcctgagttgtatgggggaaaatatgatcctaatttattgatgttctgagtgttagaactattgtaaggagattgaggtccattgaaccttgaataaggagttctaaaattttgattagtattggtgtaatttgcctcagtaaactcaggatccatataggccatgttgacattaaggtttatttatttatcatttttctcaattcctgatttagatgcaagaagtagagccttaatctctgcaatagagtaactttcaattcgtgtattggtagagatgacaaaggtttcatactcactgggaagaccttcgaaaatggttgcaacatgatcacaagtgctaagaacttcgccaactgaagcaagtaaatcaaaagtttgtttgactcaaagcaagtaatcattcaaactgagagatcatttcttcagattttgaagcttagttcaaaattcaaggatcttagcagaaacatggagagtggaatacttctgcagagtattctcgatttgttacaaccaaccattcgtgttatatgactctctgatatcgaagacagtaaccaagaagctaatagttgatcttaaacttcccaagtggaataggcaagattgacattctgagcttcacaatcaacatcagtcaagaactgaggtggatcaaagttttcttggatgtaagtcatcaatcgattccctcgaatggcagcaaggacttgttgtctccatagtaagtaattgtgatcacaattgatagacagagtatgattgaagaacacaggaccttgattatcaccacccaattttttggattcaactgttttgaattccatggatttgggtttgaggtgttgccagcttgagcttgagcattag

SEQ ID NO: 228738 - DNA, 932 bp, Cannabis indica
aggcattagaatcatatttaaggaagttttttgagcacccaacgcctatgttgaaaatttgtcaatctgggcaccttccaagcatctgttcgaagatccgacttttgcattgaatatgtcttcatcaagaatgggtaaatttgtctttttggagggaaaaaaaataagttataggcacaaataacagggcctaactctgacaccttgggctggccctacgcctaagttgacaatttacaacttggcaacaaaaaatggagttttcccagaattctttcgagcttcatctctgtctttagaaaatgttgagaatcgactatttctagggactaaatggagctttcaaaagggaaaaagagggactcagcgcctaggttgacacttgggactaggccctacgcctaggttgacattttgtgaacctgggctattttcaattcagatcagcaaaaagtgttgtgggaatttccactgtcataagaaataacgaagaatcaagttaacttagagagaaaaccacaaacctgaggccctagaaacagggtccaatgccgaagttgacctggtgttgggcccaacacccaagttgacaatcagcctaggacgttgccttcaattgctcgaatgccaaattcgatctgacttttgaatttggtatggttagaaatggggggagggactccgtccgcatgttcaaaagccatggatgcgttaaaagtattaaaaatagaatcttggagctcgattcaaaggcccagcgcctaggtcaacatttggcctggtacgcagggttctgctcacctaaatttgatgttgttttgactgttcatcaagtttttcacaagtagaatgatccatgaactaagatcaatcaaattcataactttaattttggctcatccataagtcagaagtttcgagtcttctatttc

SEQ ID NO: 228739 - DNA, 939 bp, Cannabis indica
tgcacaaaattaagaagagtaaggcttgatggaaatcgattcaaaggtgacataaccaatgcatttggtgttcacccacgccttatttccatgttcttaaacaacaaccaattcattggtcatgtttcaagtacatggggacaatgtcagaatctcaccagattacagttgggtcaaaataaaatctttggaaggatcccttcagaactcgggagtttgacaaagttgaaagttttgagcttagattccaacgcgttgagtggggaaattccaactcaattaggaaatctaaaagttttgtaccagcttaatctcagcaataatcatttgacaggaaaaatccctacaagcttatcaggtttgagtgagctagaggttcttgatttttcagcaaacaatttatcaggtgaaataccacactggttaggtaattataaaggattggtgagcttaaaccttagtcataatatgctaactaaattctctttgccattataaaagagtgaataaaataacccaattttattcagatcaagctttagaaacagatcaatcaacaccatgaaaagagtttcacaaactcatttctctgttcttcttcttattcttcttatttttgtttggcttccattgaagattgcttcttcaccaagaacacaagcagaggctctcataacatggaggaacagcttggtgttggaaccatcttctatggattcatgggacagcaacaacatcaacaatctttgcaactggactaatgttgtctgtgacggttccataggagaagtctctcaaatagacctctccaacatggacctcaatggaacattggacaagttcaacttctctccattccttaacatcaccgtcttcaacctcaacaacaacaaactcgctggcttgataccaacaaccattggtaatctcaccaacctc

SEQ ID NO: 228740 - DNA, 1242 bp, Cannabis indica
aagttgatttttgagcacttgaggccttgggcctcgagcacccaacgcccaggttgacaatctgtcaatttaggcgccttccaactgtctaatcggagatctaaattttgcatcaaatctgttgtaatcaaaaacaagaacctagatccttttggaagaaaaacaacaattcttcgtcacaaataataggacccagcatgttgacatctggggctggccgtgcacccacgttgacattttatcaacctaggacacttcacatggagcgtttcaggaattatttcaagcatcttctccgtctttagaaaatattgcgatttaactattttcggggatcaaaaaaaatttcaaagggccaaaactgggtctcagcgaccaggtgtaaacctggggctgggcctagcgctcaagtgtcattttgtcaacctaggttgttttcgatcaagttcagcaaaaagtgttctgggcatttttttcgtcattagaaataaaaaaaatttaagtaaactcggggagaaaaccacaaactcgagtccctagaaacatggcccatcgcccaagttaacctagggctgggcctaatgcctaggttgacaatcaacctaggatgcggccttcaattggtgaattgccaaattccatgcgaccattgaatttgacatggtctaaaatggggaaagagaccccatcctcaagtttagaagcgatggaagtatcaaaaacaaaatctcaagagctcaattggaagggcctagtgccttggttaataaatggcctggttagttgggtttttcttatctgaatcagatattgtttcgatcgtttgtctagtttatcacaattacaatgatctatgaagtcagagaaatcaaattcataactttgtaattctcatttctagaacacccaaaaatgaagagtttcgagtctcccattttcgcaaaaatagcaacatctccgagaacaggtcacaagcttcaccaaaacctataaatggtctaagtggtgttaaactatcaattaggcatcttaaaaggcttcccttggacgtttttacacttactgagcgtctaggttgacgtctgttgactgaggtttttgacaaccaattagtaacaagagctttggcatagttaatgcaaatgatttttacgtggtttgggcattaatgatcagtagtcaacgagtctctattattaatgagagtgtttctttacagagaatgctcttggtgtgtttttt

SEQ ID NO: 228741 - DNA, 956 bp, Cannabis indica
gtggcaatactaaatggatatttaaaaaaagaaaactagtggattccaacagtttataacaatatataactgttggaaaatattctttttaatataaaaacaaagttttagatttagaaaaaattgtttcccaaaaaaaaattgtaatttaataaaagaaaatattaaaataaagtttcagatttaaaaaaaaaaaattatttttcttacttaataaaaaaaacttagtctttaataaaataaaataaaaaaaaaaagatttaaaaaaataaaattatctaatgaatttataatttgagaatttataaaattgggaaatttgaaatttataatccttcatcgtataagaaaaaaccaaaatgcagaaaccctaatttcactctgccctcagctcgatcttcctctccgatcgtctctctctctccgatcgtctctcttcgaccgcagaacgcacctccatcccctggctgagctcacatctggcgtccctctctgtgatcttccctttgccttttgtaagttttatctttctagatctttttttataattttttttattgggctatctcagaaaggtgatatgtacagctttggtctcttgcttttggaagttcttaccggaagagctccttcgcagtacctttctctgcccagtacttggcctaatcgcgttgaggatgaagaacaggctttggacctcccgaaatgggttcgatcagttgtcaaggaagagtgtacaggtaatgaataatgctctgttttatttatttataaatatcattttttattgttttaaaattctggattattgaattgaatcaaggttgtttggatgccgagaaaacagagaaccattgagaataatgacctgttcaattagcttttgtttttattaattttatatatgaattataaagatgaagaatgagtcaaatctgtatgtgagtaatttttgt

SEQ ID NO: 228742 - DNA, 766 bp, Cannabis indica
caacaacaggcttgacattcactgctgcatcaagtttacaattgcaaggttactcggatgcggattgggttggatgtagtgatgacagaaaatctacctctggctattgtatgttcctcggaaccaatctcataagctggtgttcaaagaaacaaagtgtagttgcccgctcaagtacggaatccgaataccgtgctcttgcccttgcaacttcagaattaatttggttggaggccattcttacagaactctcaataccgataacaactacaccaatattatggtgtgacaatctgggagccggttcattggcctctaatcctgtctaccacgcccgtactaaacacatcgagatcgatgttcattttgtccgcaacagagtgctggaaaacaaacttgagatcagatatgttgactctccatatcagactgctgacattttaacaaagcccctgcctacagatcaatttgtgtatctcagagacaagttgacactcaagtcaaatgagtgcaccttgaggggggatgttagagatacacatgattaattcccttaagtccttgttagttagtccgttattatggttggcactgtttgtttacagctgtcatattctgttattttcagctcctttgtactctgttgtaaccgacttagtctttcatatataaaaggtttccaagcctgcatttcaaggcagagcttcattcattcacttcaattctcttcattccatagttttctctcttgcttcatatcacaaca

SEQ ID NO: 228743 - DNA, 1528 bp, Cannabis indica
agaaaatagtgtattcttgcaagatcaaaaccttctctgcaatctccaacaatggccttaggttagagcttccacttatcttttatcatcatcttcttctttaatttagcaaaggttctataaatttataatttagacttttctatataaaagcacttttaggaatatatttagatctgtgatatttatatttcttgagtgttttataaatcctaacacaataatgatcgagatttgagattttattaattagcatgttacattctttcctaaaagatttcagattttaaaatttagtatttatttatttaaaagaaaacaaatcgtgcttggtgtgctggttgtattttttttagtaaaaattaaaatttccaagagtgcctgcaacaactttgctatccctgctgaatgtttgtctcagcctacacagtttctttcagtactagcttgtatcctaatttagaatatagtttcaaaaattagtatccttcaaatatatggaattaataacccattttgcccataataagtcatgtttctatcagtatcaaaatatatttctaaatagtaattacataaaataattgtttgttatttttttaaaaaaattacttattattttatcatggggtatttcaacttttttttcttatcaatattataaaaatcgtttcactctttattattttttaaaagatttttattattaatatttaatatatattaaactatttataattttataatctctaaactatattattccaatattatttacttactccaataaaactatataatatataattagattgaataagtaataatttatatatttatataaatttattatttatataaagatgaaacataaggcagtgatgtaacaatttaaaattcaaaatagaatctaagattaatattgggatttgagaagatgagacataagattaatgtattaatgacaacgggtaaagtatggtgagacaacatgtgagatacgatagtgataacaggtgagatttgattatgacgataactttaaaatattagaatataaaaacaatacattatggtgaaaattccaatttttccctagcctacacaatcatatttacttatttttataataaaaatttgctttgaaaaaacaaaacaattaaaattctatatatatgcattttttttaaatgatctatatatatatgcattaattgtataagttttaaactttttaataaaaaattaataatatagaattatataatataattttattattactaatatattgttatatttttattattgtactaaaaatattaaattagtcgagcaaagagcgatcatattacctagttaaataaatgagagaattaaggaaagaataaaaagatacatttagaataattttagaatgtcaggttaccgtttcatacttttaatatatattagcttgatgttgcgtgcaatgcacgtatagttagttttttttaattatatttaattaggtgatgttaagtataat

SEQ ID NO: 228744 - DNA, 1454 bp, Cannabis indica
atattgcattggcgttgtgatgaggatgaggaggaacgagctgaggctgctgctgtggtcagagcatggtggtggagaaagcaagaagtggaagccattgttgttgttgttgttgtgtgtgtggtggtgtggtggtgtgtgagtgtaaatccaattaatgtttcaatgcaaaaggtttttgagtggttttggcttttgtgaatatgtgaagggaaatggccttttggatatagtttggatcatggagagattagatttttgatagtggataagcttctatagcctctcattggtgccacctactcatccattcaatttcactctctttctttctttctttctttcactacaatttatttttcttttttattattttcaactgaagaaaagggggtccatcatgacatgaaactcaacctaataattcatttacattaatataagtggtggctatcagattaatggatggttaattattttagttacaaatttgtagtgatattgagaaatgttaaatgataataatagtgtttcagattgttatttctataattaaatattgcgtttatatattttaataaaattataaaaaaatcttcattcttgagcatgtctaataacataaataactttgaaaaatttacacaaatattttatattttcatggatttataatttttttttaagagaaaaaattaactttgttttcatattactgcaatattatattatatttttgcaatatgtaaataatagttttttttagaacaacctaaaaataatggcatgtaaaaaaacaatccgtaaaaaatattgtattccataaaaagtaaacattttgttgtttttgagtatttttaaaataataattttaatggagttgttggaagaggcaaagagctatttgttaagattaattaggaaattacactctatattcaccttttatttcttattttaatttttatttttattttattattttttaatttatacccagttttataggtcatatctcattatgtgtattggaaactctaattttgataagttatgtaatgttatatttggtactttaattataaaagatgatgtttatcaattaaaattattttagagttatatttaattaatgtataataaaaagggatagttttcaaatttcaacttatctcatctgttaaacaacttggtaagagttgggcattgtttgttgggttttcatttgggcagatgtactaacaaaaccatataagcttgggtcgtgtgtagcctttgcttggttgggttggatcacattattcataaaatcaagggaaatttcttaaattcacaaaaaaaaaaaaaaaacaaaaaaaataataataaaaacaaaacagttgtgtggaattttaaatattttatgattttatttataaaaatatagtttttgtatatattatgttatactttta

SEQ ID NO: 228745 - DNA, 913 bp, Cannabis indica
caatactcatctcaaaagataagacattaataacatccttataaatgttaccaaaaattgataattagcccattttataactttttgtgtaatgtacatataatttcgacatattctttttatcaaaatgcaatgtattgtaatataaagcaagtttctttaaggagaaaatttccatgtttcctttcccccaaacaaagttacactacataattatgatttaatatcaaatgtttgacaaaagccttaaaagatcatgtggagaataagtgattaataataatatcaataaatcgcaaatttagccaacaaaatttgaccaaatgaccatttaagatgtctaagtcttggaagagaggtaggtatttttccaaatggaattaaaatatagcatagggatccaaaatccagattctagtactagtcgaatgttaattaaatttcatggaaaattcttatgaaatcaaataatttagtttaatgcccaattgatctattatcaatacaagtaattttacttttaaaaagtctatactttactccccacttggtgtaaaagtgataacaaatcaaacataaacaacattaaaaagctcattcctttaatatctaatattgccaaatagtttgaaaatattctgttcaagatatgaagagagatgcatcatgcactcttgattttgttttaagtgaataggtttaatatttaatcaaaatcttccacaaataatattataaaatacctatactaaaattataaataaaactcaaccacttttattgacaaaagttcccattaaattattgtttaagcaaatctatgaacataataaaaatgaattgtgatacatacaagatcataaagctcaaatctaaaaatttgaatagaccaacaatttgagtatgaagaact

SEQ ID NO: 228746 - DNA, 6112 bp, Cannabis indica
ccaagaaaggacacctaagatagtcaaaactcacacttcttaaattttgcatacaatttatgttcttatagccactctagttacatctaaagatgttgctcgtgctcccgttttgattgagagtacaccaggatatcatcgataaatacaataacacagattttgaggaaatccttgaataacctattcaacaaatccataaaagttgcaggagtgttggttagtccaaaagacataactaggaagtcatagtgcccatacctagtgtggaaagcagtcttttgaatgtcctcccctcagattctcaactaatgatagtccaattggagatcaatcttttacaagaccatcttcccttgaagttgatcaaataaatcattgaatcgtaggttatggatatttgttcgtgatagctagtttatttaattcctgatattcaataaacaataggggagctccccagggttacacactaagctgtaaaaaccctaggtcaagtaacccctaaagctgtatctttcaattatttaagctctgtcagagccattctgtacagtgccttagaaattagttctactacaggtgctaaatcaataacataatttatttctctctggggtggtaagcctagaagtttatcaggaaaaacatttagaaattcttgaaccaccctgatgtcttctgggcgacttattgcaggttgtgtggtatccaatacaattgctagaaaccctaagcacctttcttgtaacaatcttcttattttcaatacctatattactagaatatgggatccctaaaccgatcccacaaatacaaacgatttctcaccctcagattggaagatcaccatcttccattaacaatcaatgctagttgagtactgtaacaactgagggcctagcctctctatcagcctgagtaagaacaaacaactttattggagcgggctttgttactgtctcgtgttccactttcttgagctgcagacattctcctttatagtgtctaggcaaaccacactagaaatatcctcaccctcaacactcacccagattatgcttcttacaattgacacatcttgagtatgtatattgagtttaaaaatcaccctgatgattacctcgaccctggttcccttggaacctcttgttctgacttgagtcacagggtgcaaatggtgccttttcttcctggtcggtggtcgagtcactaccactcctaccatgaccaaaggtaggaggagtagcggctttaccagtaacctaagtccctcgagactcctgaaagcactcaactgcaccattagctagtagtgcctttcccaccatgttatcataagtggtgttgtcgtcaatagtgatcataagatcatgtttaatttttgggtttaatccatccaagtacttttctttcttgctaaaatcgattagcacaattctcgaggtcaaccaaactaatcagtcaaattgagttatgtatttagtaacaatcatattctccttttgggtcagctgggtaaattcttttctctttgcacttcagaccgcctcattgtagtacttttcattgaacaactcttggaactcttctcaggtaatactagtaacatcacgagtcagggacaccatgtcccaccaaaccagggcatcttcctagaatcggaatgtggtacaagccactctgtcattgctagtgacgcccataaagttcaaaattcttataaaaactctcagccactgctcgactttcatcacaaaatgacctcccaaaaagattggaggggccagcttgtagaatctctccaatagtgattccatctagttcttaaccgcaaccaaccccacctgcctcatatgcctgatctcttcatctcgttcatgggttctagtttgcatagctgcaaacctattttccaaattctaggcaactaatgatagattaacatctctctgatcgcatgctctacctctagggcctctgcctcagccacgtctatttaggggaaacaaaactccctgagcgccattgaatccgaccattcctttttggcttcttgcattttgcctagcgttcattctaatagaacagccagcgaaaccacgaaccagaatagtcaaataactgtcaagaattacttactaattacatcttattttagtaatgaaaacatacacctattcagctatcactctacccattctgctatcacgctactaacatacttcctataaggcttttcttataacatactaataaaataaactactaaagcaataacggcttactcagccatgagtcgagctgatcgctgatgatgattgtacatgtcgtgacaatctttggaagacaacttggcggctcttataccaaattgtaacaccctactagtttaggcatgctatcatgattttatattaaccatgcaacttgttgcaaataaacgaatttattgcaaaattatgaataattagaacttttacttaattactctctaaatgaaaataaatatcttttccataactgaattctgtatctaaaatatttacaattgggtcacaaactattcaatacaaaagttgtcgcctagcgaccattttaagtacagtctactatcccaaagattgtacactccatgtctaaccgttccgacatgtacaatcttcactcgctcgctctcacggctactcaaccttagccttgctcttacctacacatgcaaagaatatttgtgagtcgatagactcagtaagaaaaagcataataataacatagatgtaaacaagattaagattaggcacccataactgtaacccatccccgcgtcctacacggtactgagtaaagaacgttcaaatgacaatactattgaccataatattatcctatactcgataagctagtcatactctggtcgtatcgatgtaatactgtcaagtagtatggtacaattgacaataatatcaacctatactcgtacgctagtcctaccctagtcgtaccgatgtcatactctcgagtagtacataagctaatatacatttatcgatatctaatacagtactaaatatattgataccgctattataatgtaatctaccaggcttaactaacatttacgctaaacatgcaaacacatatgcatatcattatactaatcttagttcgtttccaaagtcaagtgtgacggcgaacctgagtggaaaaacagctcgacgacttataggcccctaaataacattatttgtaaaattggtgagtgacacgctaaatcactttttagggacttaaacttgaaactaaaagttttcctatcattgaataacattgcaataccttaaatatttaaaaaatatttaaaaaatgggaaaaactagggttccctaaaatgtcccaactggtagactggttccctaatcgaaattccagttctgtggggtttcttgagggcaaaccggttaaccagttcctacaactcccaaccggttcaatgtacaaaacacaaaattccttttaaacaactcaaatcaaccccaaacatctccaaactttccagacctcctatttacaccataataagaagaatccatgcaacaaaatcaagaatcaaccatagaaacacaaatcaccgttggagagcaaagtttgagctctaaaacttaaaccttgcttaaccacaacactaagcactaagtccaacacaaatcatctatataaacattaatttaaccttagaaatcaaaacaataacaaattcgcacctacagtagcttaacctcaaaagtacatgaatttctaaacttaaaaactataaaattccgaagagaagaggaagagcaatcatacattgacttagttcactaagattatgtcaagactagctataatcaacaagaaaagaggttgagaagccctagtttctacaggcttcctaagggatcgagagagagagaattcttagagagaaaaagcttgatatttgattatgtaatttcattaaatggtaaagataaatcttaataacaatctaaaatatatcttagctacatcatattaactagcctattgataagtcactaaaggacaaaagaaacttgtagcaaaaagacaatttttcccatgcctaagccaaaagcatccttacaagttaggggtattttggtaatttttaaaatctcaaatattaccaacatttccaatgtctaattaaattgccacgctattactaaaatactaatatgtgattttattggccaaatactgtgttctaatgttgctgggcataaaatatgaaaacatgaaattttatatgtaaagtaaataacacacctagaacacaaatgtatctccacaaattcataattcataactaaaagtataaatttcataaataagccctaattatttgctaatttatcatattaaagttaagtggtctttaccgctagtgtcaatgccagatgtcaacttgggcgctgggttcgatttcaggtcacttggaagttctgtttgctcccaaaaataattgaatcataatctttgataaaaatggagaatatgcctaaaaggctttttggaaaaactcctcgaaactggcttaggttgacaaattgtcaacttgggcgttgggccggtaccaagtgtcaacctaggcactggtcccttgtttttgccccctagttggtatgtttcttcccgaaaagcacttgtttcccaactttggatgaagaataagaagatacatgtgtcatattttttaaatgatgcttggaagttgcctatgttgacagattttcaaccgcattgggagcccaggtaccgagtgctcaaaataaaatttcttcgaatttgattctaatgcctcaaataagtgtgtgatatttttagttcatgtccaaatgaaaattttgacccatttacactaatacaatccttgaaactaaaacattgggttgtcaacctgggtgctaggtgaaacccctaattgtttgggttgatttttaaggtgttgtttcatgtattctcagctgccaaggcttggacatggatgcttcatgtcttcatggaaaataatacagaaagatagttcgttggaaataacttagtgcaattcgaacacccattctggagttctcagagtcatcctagacacaaggttatggaccttcccaggtcgattgctatgacttgaaactaccaaactttgagatgttatctttcttgccacgtgtcaaatattgatgtccacatcaccatggaaaatttctgagatagcaataaccaatgaatattcaatcatgtgctctaggagaaaatttatgccttttactggctagagatgatgcataggcaaggcaaccaaatgtccttatgaggtcatacgcaagttgtttgttatgccggagtttaaaatatgttttatattttagtaaaggtgtgggggccttgtattaaaaaaggccagaagaccaatgctagggaagattgaaaagccaatgcccgagctacatttaaaatgtgttggtgttttctcccaactacagatttttttgtaggtatttcaacacatgatttgtaagtttggatacccttttgagcatagaagtaggacatgtttaactctttagcattgtcatgcctaattgctttaatgttgacaaaatatttcgtacgcactaaaatgtaaaattggggaattaattgttgaacatcaaatttggatttcagcatgtaaacctaagaaatctaccatgatcctccacaatggttagaaaatatcaaaatccttcaacacttgtgatgtaaaaaggtacccaaatgtcgatatgaattaaatcaaaaggtgaagcaacaacattatggtttgaattaaatggaaacttctttttcttacataaatgacatatattgtagggggaagtaggatctttaaaatgtaacattttattgataaaacttgtactcaacatagaagggtatccaagttgggaatgccaagaatgagcattgttacatgatgttttacaagtttgtttattatgaacaaaagaaggagaggaattggaatcttgcaatcagaaattgaggtcaccaactcttttagcaatcccaa

SEQ ID NO: 228747 - DNA, 1795 bp, Cannabis indica
tgtaatataatattatgtttaattttaactgtaacattatattatgtaaatgaataaaagtatattttaagtgtatgatatatatatatataaactctcactctaccctgtcgatcttgattttcaatctttactctaatgacatatttgatttgttgtaatgagaatcataattgaattaaattattcattataatattgttttgtttttaaaaataatataatgaaattacattgtaattataattacaaaatataatatggtagaaaaactatgtaatgaaaattacatcacaaaagggtaaataaagtaaaattaaaatgactctaataccttttttatataagagtaatttgcggcttaagtacctaagtttaactcccagttgaaataaatacctaagtttaatttttggcgataataatacataagttataattttggaacttctgtaagtacctgattaagtaaattaaactgagaattaaacttaggtatttataccgcgaattactctttatacaaatatataaaacttaaagtacaagataattttatcaatttatcatatttattataatattcattcaaataacaaactaaacattttaatcaatttccattactatttttatttcattacattactattattattattatattccaccaaaccaaaacatcacctaaacttagactccgaccttgacccaacaccagacctcaaactctaaattctgaccccggtcccaatcccacctggatatgtgataatattaattattgtcaaaaatgtataacaaccaatatctataatatttattcaactaaatttcgagtaatccaaagtaaggtagtgaaattagatttgttaggatggtgtataatatgtacttgttttattttctttctccttcgttgcataatacttctcatctttgccgaactagatatctagaaagcataggtcctttcttttttcttccattccatccctaaacataatatttagtttgcattatttttggttctagaaaattgttaattatttaatttaatcccaacaagttttcgtctaactttgaaaagaatatgcaatatgatcaagtataagcaaaaggagacgaaatagatgttacaggataatgtttattaattaaggtttctttattagttagttgatatcttacctagactgatcaagagaagggtcatatacataattatatatatcatatcaagaaaacacatgaataacattggttttaaattaagagtatattaaacgttgaaaaagataaatgtatgatcattaatcaaactatgctctatattgagccttacaaataaaaaataataataaaaaaaaagactatgctatattgagtgtttgactactaatcataatacttttgaaaatgataataataccaaattaccagtgttagacatatttctcataatttccaccggatataatcctaatttatggacaatttgatgggagattacttaagtatgtacaatattcactcttcattttgaaattaatatattaattataacattcacaaaataatatattgtgaaattatttacggatgacatctatttttaataagagaaagagaattaattataaaaattttacactgttataaatattaataattatgtgaattcccaaattttttatttattaccataattgtaataacattcctctttttcttagtttccctttttcttagttttttaatatttcactcttgtatttgtataaataggggttca

SEQ ID NO: 228748 - DNA, 1421 bp, Cannabis indica
agatgatattatcatactcaaagtaatgacaatgtattatgacatttcaaagtgccaaagcttttgccacttcaggattaagacaacctttcaggcaccaaacagcaaaagcaagaacaatacccaaatgatcacgcaccactataccaaggccacgataagcaccaattttatcaatagcatcatcattgttaaccttgatagacttagccagcggaggaaactattttgaaacaacctcattagaaggcaaagaagccgcttgtcccaaagagagcggaagcccagcctgagcccgactatgttggaagttccaaagacgtttatgagcccgattcaccaccaactcaagaggcaattattaatgttattatgcaccaatttatttctttgaaccagatacgccacaaaatgacaataactaattcaattttatcctacggcaaatgatcaataacattgtggataaagctaagtaaatttgtatgagtagaaaaatgattacttagatcaaaatcacaaagtttcatgcaagccattaaagttggacaccgccacaaggcattataagtaatctcttcatggagctcgcaaagaggacaagaccatcagataagagaccgtgagtagccaaattaattttcgtagaaatccaattagagaatgcttgccaaacaaacaatatcacctttggagggatattcagggtccaaattttttccaccaactcgagtaccccctagagggagaagcacgacccaagcccttggtacaaagagccaactggtaaccactcttgacagagtatcaaccagactttttgaaattttaaatgagtttgtcatcttgttctgaggagggccaaggaatagataagatagctcccgcttcattaggaagaaagagaccactaaccaaacccaaatctcagtccctgaagcctcatgtaacaaagaaactttgcacctttaccaagaaaatgagaagccaacaccaaagagggagacgacgaggggacccaaaagtcagaataaatatcaatagtatgcccattaccaactctccaaactgctctagagtcaaaaagctcattacccataaaatatttttccacacaaaagagccttgcttggaccgaattatatcactaaaatttcggttcctaaaatacaaaccttttagaacctgggcagctaaagaggtggaaacattgtagatcctagctgcttgcttcgcaagaagagcttggttaaacaaatgtaaatctttgaaacccataccaccatcttctttatgtaggcacaatttgtcccaagtacaccagtgcattttctttttcgcatcattctctcccccacctaaaacgagcacacatcttatgaacattcttgataaaacatttagaaagtttaaacaagttc

SEQ ID NO: 228749 - DNA, 1338 bp, Cannabis indica
ataaatctcttgtgtcaagttatttaattttctgcaaatatttttatattctgcctgttctgttttatcactgcaaaactggtttctgcagtaacagaattactttctgcttctgcagacgcatacagttttatattttcatatatatataattgacatttgtaaaaacacgtttttcaatatttttgttagaaaaattcaaatagtatattttaacttttttccaatatatattattaacatttaaaaaaaaattcatcacaccagaaatttgtcaatctcttctctctctccccattcgtcttcttccccaagccatcaactccatagtcgcttggactgagcaacccaattaaaaccctggctaccaacggtgacatcaatggtcaaggcagtcggagtctttccccttgtcctagaatcggagcaaggatcggtaacggagatggagaacacactaattcttgagctggtggaagtgatggatatttaccgaacaactcttcatctgctagaacaagattaaatgatgacaacgatgaggacactgatacttcatcgagttccatatcagagaaaagtctagaaaagcttgtgaaaccaagaggagaaaatacacacatttgttgatataaggagattttgggactcataaaggaaccaaaaagcaaagtgaaaaagttagaatggttggaagagcttaaacaatcaatatgcatagatgcattgacaaaaaacatacatgcaattcctcttttggattggtgatttaaaacaaagaaaataggaaacaggtcgggaagaacgaacctttaggagcattggcttctccccctatcttcttaaaatataacattctttgatctcccaaccttcccacgacatctttgtgcttgttgagcaaagaaaagaagtttctcatccatcaaaccttcttcagcattgttgatcttggatttggtcaactgacaacggagccttatttattactaataatcaccacgtgtaaagtataaaagcaaataataaaattgacacagcgattgttggggggtaatgacctacttcgcttttagttgtataaattttagagataataccatgcaaattacataattttaacttgtaacttctagctatggtctctttgaatgttaaaatagtgagaattgatgtatgaaagattcttaacaagtgaaatgagagaatagactaagtgtcaataaagaggaagtgtcataggagtgagagagctctagggtttcagagattaaaatttaggttccttttcactttgcctaatgcccttatatagtttagggcttacaaaagatcaat

SEQ ID NO: 228750 - DNA, 1791 bp, Cannabis indica
aaaaaaaaaaaagaaataaaaaatacgatgagaaatatatgaatatgagaatctacacctacatatagtttttcttctttaactcttttaattttcatttataattatgcttatgattatatttgagattatggagtagtcctcttttaggttaagggttatttcactcgagacatgatttattgaatgctttgattaatgttattattttatgccttcttattgaattgcttatattcttctttgcttaattctatgattaatattttaatcttgtttagatgaccgctaaattaaattttacattattctactatcattcttagaatttctattcatctaatattttgacagtgtggccaagcttgtgacaaagctggcattgcaccttttgtccccaattgttggtctgaccacgaccatacgaggcatggccacctcgagtagatgcactaggcgtggaaccacgactattggacgggccacctcttgctacagacttatagtacgatccactattattgttgaagggggaaccaccaaagccacacccttgaccagtattaaagcctggtggtgcagctggagcaggatagtacgaccgtagttggtaggtccaggatatctagtttgggacaaattagcctcagcttttgagatgtcaagacttttggcatttttctttattctaactgactgtgccattaaaagcttccacttctgcaactgtataggtctcttttcttgtggtgatcgaagtgacaaacacatcacattcaggtggtagcccattgaatatagcctctatatgatcttgagctgtttgagcatggccaatggtagcaagtcgatccacaatgcctttaatcttgagaagataatcactaagagaccctatcatctttgtgtttcgaaattgagttttgtaaaggcctatagcagcattcaaagttgtgtaatactcagtgagattctcccaaatttgtgcagtggtgtcacatctaatcatttgattagttgttttctcagacatgaaagatagaagccagaaaacaagaagattatcttgttgttcccagtcttcaaactccggattaacaatatttgatatttgatcagctgttgtcaagaattttgctggaacacgagtatcatcaagaaacttttaaaatttactacctttaatcaaggcaagaacctagtgtttacagggaagaaaattatgctcatcgagctttattgacaaggaatggttgaatgaaataggatacgatctgggtagaggaacttgttgattgttgtgtggttgagcattgttcaatcttaatgctccaccagttgctgaaatagaattcttcattaatgaacgattagctagagctctgataccatgtgagtgtttaacctttgagagggaaagagtagaagaacagagtttgttgtattgattcatgatcatgaatacaaggtttatatacagcaaagataatgaacaagcgaaagcaacaaaaccaactaattctaacagaatgagtacaactgaaacagaaaacagttaagacagttaacaactaattatcctaagtgacagtatccctgacaatatgtatatatgtctatactaatttgtgatgattttgttattaattagttaggtcttggatacattagatacaaacataaaaaaaatagaaaatttaataataataattcattagttgaactactgtccaacaattaattatatataaatcattaataatcatagattaaatgttattatatagttcg

SEQ ID NO: 228751 - DNA, 2310 bp, Cannabis indica
atgtacacaatttaaataagatcgatatgattcatactataaaagaaactacttgataaaattgaaataaatagcatgtatacattaatttttgatcataaacatagaaatgatggataacatgactattagtctagctttgccaaataatctttcagcacaaaacctttatacccaactaaacaaagagttcttaaattttcaactaaaattttgccatgcattgttatcttcctgacacattattctaagtgtatgtgaaacaacagtatttaattgtactttttatttttctgatcatttcaactttacaagagctattctactcaaaatcagtgtgacaaattcaatagtaataacttcttttgcaaccgaaatagtaactaggctcatcaataatctcaacaatcctccctttgcggcttctaaatgtgtattgatgtttttattgttgtcgttgtcttcaacaataacaagaatcaaatattattgatattacttttagggaggcacttgatgctattccaaatgttcctgcaacacaaaaatccataaaaaaacttaaaaaattgaatgaggatgatgataatttattagtctctgtgggtaccgacaataattgcaccatttgccaagaaaatttgttgtttgaagattggaaaatcgtagaaatgccatgttctcatctttttcacaagaattgcattgtttcttggctaaaaattaatcatttatgcgctttatgtcgctactcgatgcctactgtcaacgctgttgttgctgctgaaaattaatactgttatcaacacaccaacactactaccttgtccaaatttgtattattcaaaatattgttaacattttttttgtttcttttgtaatttagtatttagatgcttcgatgatcataattattattatggacattttaattagaattgattgatataatataatcttttgattgttcttgatgtgaattcattttttttttaataaagttcaacttcattaaatcaaattatccgtaccaatggatgagtaaaaagggggtaaagaattcctactaagaacacgattaatctccacaaatgaagctcacacaaaggtgtccgattttctccccgctccctttaatgcgattctattaatatataacgactgattccttctcagatttatttattccacctgagattattaacagattattttacaaaaacaaacaaaaattgaacataaatcatcaatcaaaaccttaaatcgtttaagacatagccataaaaaaaagactaatcctgtattctttgtaatgagatgaaaaaaaatgtacccttaatcgagtataaatgtttgatgttaattaataaaatagcacaaaaagatgtaaagtaagataaagaaaataattttcattttctctcaaagaaatatatattgggatttataataggttgtttgacactaaatatttcttcactttgtttttttttctaaatatatttctttcacttatcgctaataatactttaaaaatctatatataatgtagtttttattggagatcttaagaaaattaaaatattacaatataaacaaaaattaataaagaaattaaataaatgttataatatataatatatattatatatacactttagatagttaagaaaggtagaagaagatatatataaatatatgtatacactcactcacaactttaagtgtattactatgacttaaataatgtattacacctttgtccaaaagtttattttccctatctctacgcactaagggaactctcatggaaatagctttgagaattattaagccttttggttttctaacaaagtgatttcttgatagaaaacttgatatcactcaaatgagcaccaaagacctctttttataaaaatatttaggtgatcacacttagaattcaaaatacgcaacactttatttcgactaattaagatttttactttctaaactttgatatgtatcgaattatatctcataaactttgatatatattaaattgcatcttctgaactttgacatgaacctaactatgtcccctgaacttccatctatgttaggattccattagtaaaaatgaacagaagtccttaaaatctaataatttcaataatttggaaattcatgctcaacagtaaaataataggttgctacttgattttcttcgaaaacaaactatattaaataagaatttattaatttgtttaatagagtaaaaattcaatcaatttaggtaaagatgctatcaatgtgagaaagtcccacatt

SEQ ID NO: 228752 - DNA, 1433 bp, Cannabis indica
tcgggaatagtttgttgagaaaaacccaaaagatgaggaagaggaggaagaagacgatggtgaaaccacagatggatattacaaagacaaatattattatgagcaagaccttaaggtgattcgagtatactgtgattagctgaaactcaacgcaagctagcagaacaagaagctttctctcgttaaatgatgaaaatgatggcatgactgcaagccaaatttagcgatatagatgaagacttcgaagaagatactcaagaggagcctgttaataaggaaattaagagcaaaccctacagatgttagaacaccagctcccgtaaaggatgaggggaaggcaaagataggtgagcatcaacctaaactatcccattacctcctaaaaacaatgtgaacatggccaaccagcccttacggacaaagaagtccaccaatgcctctaggctttgacgtccttatgctccccaaggccaagttgtgaataacgataggctttgtactcaagtatgaaggcctaccattaagggaaagaaaaactactctagttattctgttaaccaagatgatgggataaaagaaattttttctaaagacagttggtctacaattgacctccagagatgccttaatcccaagcgtaaaaaagccaaaggagagaaagcgagaccttgtggaaatgatctccagaatcacatcaacgatagaattcgtggatgtgagcttctgggtagtgacacaaagacattggaagaacaaattaccgctttgaaaaaatgggtccaaaaatagagtggagccatttctgatttggaagacaaagatccaaaaccatgtgtcaagaggatcatcggcgctccactaccagaaaaattcaagatgccacagatggaattatatgatagaataatggaccccaatgcccatctgtccaaatacaaccgtctgatgcaagtggcaacaattagtgatgatgtcaaatgcctttgttttttcttgacgctaaccaagtttgccaaggatcgaaagaagagtctgtctcctggatcgattcatggctggaaagagttacagtctaccttctggaaacaatttattgctactagggattacgacatagaggtcaaatccctaaccaaactcaaacaacaacaaggcaaaagcttgaagaatttcctctaacgaatgatggaagcagagaacaaaactaaagttagtgatgacatgaagctcgtggccttccagtttgtactaactgcaggctcattttatggagcaaaatgtaaagaacaaggttcgagaccttgtccattttcatgtctaggtcccaagggatcatcgtgttggattatctgctgtaaataaaacctatttcaatataatcagatttactaattaatataagatcaaaaatcgttttatgttgcatggttcac

SEQ ID NO: 228753 - DNA, 1908 bp, Cannabis indica
ggtccattttatcatttaacaaaacaaagggtctaattggtaacttttgcaaaacacaaggtctaaaatagtatttagcttattttttccttttcaaaaaaattattttatagttattttattaagatatatatatatatttaaaataaattaatgttattacaatcaaaaaccgtttacaataacaaaaaaaaaatagactaggaatttcacccattcaaaaagtattttcatcaaactttcgagcatattttactaaaccataaacagttcaattaacatttatgctgacatgagaaataataactctaacaaaaataataaaagaaaacgaatatctgaaattaaatcattaaaactagacaaatttaaagatataaaagataaaatagtggaaacttgtaatgcatctatttcaatgtgggtgagaggctgaagttacattgcccaattagtgttgtgaataaagttttcgcctctatttcatctgatctaattctgccttcgactggcttggataaagtagccataacatgacccttgtgatcacgaagtatcgccccaacatctaaaactttggattccatattcaccagtacattaatatttaatttaaagtcatgaagatctggtggcttccaaagaataccttcaattggtctcttagacccaatgaccctcgtgatctcgaagtatcgcccttatacctacaacattggattccatattcactactacattaatatataatttaaagccatgaagatgaggtggctttcaagaaataccttcaattggtctttcagtagtaggcattgatgtagcgaaatgaaataagtaggactcatcatgcctcttactatcatggaatactttatttctttcggtccacattacccacataatgcagatgatcaattccttgatttgcgatgtattgatttctgatttctcaatttgtgctacattttctcttggtgcatcttcaagtacaacaaagtctaaatgatcagggttgtagccttcattccttgtaacagccctgacattcggaacatcaccattcaagtcaaaatcgatatcgcgaagagcttcatcattttcacgccgctcacattggctcgagaagtactcgatcttgtcctttgaaaaggctgacagttaaagccagaagccccaccattagccgaccaagacttgtacatggcatcaaaatagtagccctcgtaaaggacgatatcaaatgatgcctttgcctctagggaagccacttggccctcaaggcgacaaacttgaccttccagtccaacaacactcaaggtcttttcgtcaagggacttgcaaaaggactatctactttgaaagatttttcttttcacgtccgcaagctcttttgtcaagctcttttctcggtcctttgaattatttgatacaccttggagatatgagatgctagtttcaagctcattgactatgttctccaagtcagtatacctggtctctgcattagaagttttttgctcagaagatgacaacttctttgcaagttcaacgactttcttctgcttgttttccatagcatatttcaagtgacaagtaaggtcagaaattgacttcgaaaaaaaaagaaaagtgaatgcaagataacatatccaccccaaagatgtcactgaaacccttatgtgtgttgaaatttattttactaggatctagatttactaaaatgtatgtttcattaacactctaaatataaattttataatacgatgaaatgaaacacataagagtttagaaaaccttatattgatggcagcgaaataatatgactccttccgctcatatatctagcccttgttcctttctctcgcataataataacaagatatgagcttgtatctctttctctcc

SEQ ID NO: 228754 - DNA, 2084 bp, Cannabis indica
cttaagaaaataaaacatatatattagtacggctgtaatttaattagtaattaaatccttctaaagattaatcaaagcaaaaaataaattagtattgattaacaataaaaaaacaggaattacatacatataaaacatcgtcgttcggcatttaccaatctctggctgatgccggttattctcatatgttccaccaaaattagtaagataactgtcgtgaaaaaacaaaaaccatgaaatacatgtataaataatcacttctttattttatgttttatataggtgtgaaataaattgtttagaaaatattatttaacttataaattattctgaatttttcaaattttacaaaatattttaaataattactaggatctacactcataaaaaaaagttaagacaatatataagtctttgaataaaattacaaaattattagtgaagagtagacactcatttttgggatgcacctacagcacctaaattctataatattgcatccaaaaaaatatatagttcatatatatatatatatatatatatattttgaataattacataaaacatactattttagttaaaatttttaaaaattccacacatatgtaattttgtaatttttttgttatttttgtttctttttaaaattatccctttttgggatttttcgttttaagaacaaaaaaaaataaaaactttagttttatttgcacccataattttatatagacatttccatgtatatatctctaatttatacttttttgttcttccttcgacacataaaataaaaatatatctctaatttatgcttttctgttcttccttccacatataaaataaaaataaaatatatttttaatatttataaaataaaggaaaaaaattatatcaaattttattaaaaaaattaaaaatatatatacgaaattcaaaaaaatatatgagaaaaataaaattatcactataattaacacaaaataatgtaaaaaaaaaaacaaattgattttttaaaattaattttacattttttttaataatatggtgcagtattcttaaataatatgccgcaaatataattaatttgacatacataaaattaacctactaatatattaaaatacactggaaaatttgttatcgcagtgatatgtaaaacatttcaataagaaaactcgaaatgaaccatgtaatagaatgatcaaatgtaaaacatctcagtatagcaattctaaaacttacactgttatgttccctagggtttctggtatgtctccatccaatctattccttgaaagatccctaatatatagcagcagtaggttcgtaaatatatatgtacgttaatttgtacaattatatacgagatcagagaattattataaaagcaaacaataggaattaatgtgccgtacagcttgaaaatggggcagaattttccttccataacatatggaccaaatcgtggtgcaaccttcctggttaaacaaaaagatgataaatagttataatctaatttatattttacaaatttattgcatatatcccttcaacatttactttattttttcttcaagaaattatttaagtttcaatagctatttaaatcattatatgattatttatttcacatgtatattaaataaaattacacgcttgacaacaaacttaatttaattttaattttggtacaatttttcaaaaaattattagatattttaactaagtattatgacgtacattaacatataaaaaataaaacttaaactacttgcatatttttaattatcaaatttttcgataaaatatgacccataattattttgtcagtaagagtgttcatctaatccaatccgcactattttattgatagtgcattcgattcgcactaagtacattcatatatttcgaatctaatcaaattcgcacacatagctcaaatacagtccaatccaacccaatccataaaagtgtagattggatcagttattttgaattggttactttttaatattaaattatttaatatttatgaaaaaaaaaaatattttttttcacataactaataacaaaataaaataaat

SEQ ID NO: 228755 - DNA, 1339 bp, Cannabis indica
gtccatatattattagaaaaattaatcgtaatcattaaaattaggcgatatatatgtcactctatgtaaatttgaatttgttaaatatcagttactattttttttaaaaaaaatttaacatttattgtaaaataattaaatttaatacatcataaatagttttaatgttatattatagcattatttaatgagttatgaagataaaagtaaagacaaataccattattaagccttttgtttttactattctctatagcatttacaacatagaacacgctcaggagagaaaacaagatataaatgcacttttagcataaagaagtacttatccaaatatataatatattcatttctaataaacctcttaaatgtagatgttaggcctaagagaaaaatgtctctgggctacaatataagcaataaaagaaggttcatcagaattactcttctgtccatatttaccattcttcttcttatctgacgccatgaaaagctcatcacaacaaacaagagcaggtgatgatgataattctatgtttttcgcctcatagtcgtcgcggttttttcctttagattttctgaaaattctcttcagctttctcacgtgtatgatgagtttcatcaatcttctactcttctcagccatattttctatattaaaagtatatataaagcttaaggaatcgtggaatttcggttttatataagaaaaaaattgatgaggagaatattgcatatgtattggtataatcacaaggattatgtgaaagcttttcaggagagacttgcttatttcatgaattctatcttttatttctttttttgttaagtttgttacttaatttgtgtttgtctcattcttatttttgaaacctcttttgagccttttacaagcctcagctttatatggtaatccttttgtgtgctcgtatatatataggatttttttttaggtgagagtatcacttttgctctcactcataagataattttttagtagttttgattggttgagaagtgggatatatggagttataatgagtccttaaacacaatatcagttattttaatattattttatttttatattattattattattattattattattattattattattattatttttagaataattaactttatcgaaagagttaatctgtgagattttttccaagaaccttctcaataggggtgttcattggatcacatccaatagatttggacccatccgatccaatccaattatttattggatattggatttttccatccgatccaatccaattgaattaagtcatccaatccgatccgatccaatggatgtattgga

SEQ ID NO: 228756 - DNA, 2115 bp, Cannabis indica
catccagtttaacaaagattgcaatctcattattatttcatttttttttacatacccactgcaccaaagtggtatcatagcaaaaaggggggctggacttattgcctacaatcgtggcagtaaaggaaaccctgctggtgacaatcagggtacgtaaaataattgccattgtaagctttgcattgatattgtttcatgtttttgtgtgtggacaatcgatatcatttcttaatcaaagaataaaataaaattagcattggcttgaaaacatacttcttcctcaattgtgatgtactaatataatcccacagaaataagatttgttgcaactgaacctcattcaatgttatctcctgtgcacacattaaaatgaaagataagtgacattataataaacctagaagtttaattaaaatatgaccaaatttatttaagcacaaaataaaataaccaaccaaactagttatctcggcattgatggaatgtagcaggttgttattataaagctctcctggtttgttgacctaaaaaaacattaaacgttgaattaaaagttcttcaagttaggaaaaggaaaatagcgggaaataaatcgctatggagtcttttcaaaagccccaaaatattacattctcggtaattactcatatattgtcataaagactgcttcactaaaaaacatgacactataagaatgcagggtagcccctaatgagaaagaattcatttacaagaaccaattgggccgagtagtgcgggtcaaaattacagaactaggaattttacatagagatagaaaaccagaaacactaatggcattaaccaccctataaaatatgttgtaaaggcaatgcaaaaagggagggaaaattaaagcatgagataaatgattgaagaaccagagtgtaattttccagcagagaaaaggaaagtgtttcatctaacactttttgtatctctagtggcaaggaatagaagacaagttgttataggagcttctataccaaaattgacatggaaacatcagatggtgccagtatggagtcacatcttcccatagatctggcattgtccatagtcgacaagtcaagaggtccttggaatgtaccacaataaagttccaagcctataacttccaaagttttgctgatttggccaccttttagcctcacacttgatctgggatagaagatcacaatattgaaatttaaaatatctactggcaccacaactagctatttaccatttgttatgtaaaagaaagaattatacaatcggtaagtgttataagttgataagacataactagctatttacgtaaagaaaaaaatcttaaattcaaatgaccaaatgaaagcgttagtggcacaaaaaaaacaaagcatatatagggaaaattacagatacccaggctgtatgtgaaagttgtagtaatactctctagatcaaaaatattaacagtgacacatctgtgtctgtgaaacaactttaaaataaataaaattttcactacttaactatgttattgtattaattttgatacttaagtcttaaaaaacaaataaaagaaattaaattactacttgcaagaaaacaatatttttgttgaacttcaatgatgttcagaaggattagagcagaaaaataatgtcactataaaactgacataaagcaggtatctgtaattttcttttatattagaaactaatgaagagacagctcttttacactgttgatgaacaaaaacataactgtacaggttgtcactgctaaaacaagcaatagaagagattgaaaattacccaaaaggattttgcttcattattgtcaagctggaaaatttcaagccaaacatcgtatgcacctgggaagaatttaacaagagcagaaaaattatgctgaagtatcctagaaaatcgtgccagtgcaagcaaataagcaatctctggtagcatctatgaaatatttgaaagaaatactgtcactccctaagtttgccaatagaattgaagataacagttaaactatcgttaaaaatcattcaaccataatcattgctgctattaagtgaattctacttttctaaaactgccttgcattgatttaaaataaaaa

SEQ ID NO: 228757 - DNA, 1037 bp, Cannabis indica
taaaaaaagttttttagcaagaaaaataagaaaggaaaaagttgagtttgagttaaatatttttgtatgaacatatttttgatatagtataaaaagagatatgttttgatatttttttaaattaagtagttaaattaagcatagaaattcaaatttgtgatttcattatttgttattagatcaaaattcgatggtttaatatttttaaaattaatatttatagttaaatttgtttagtaaccattcatgggtaacaccctatatgtgtcaaaaataaatatacgactaaatattcataaaaaattaatgcatatatagattaattatatataagaacaaattatatatatcaaaacagaaatataataaggctctgataccaactgttaaaaatttatatgaatgatattaaatatatgatcatgtatgaagtgcagaatgaatcgaacatatgtactatgtaagtaagaatcgaaatacctccagctattgattttttgaattttaatcccacacgagctttggatctacagaacaaaaggaaactgataagtgtgagtaatcgggcttctaagctctctattcttgttagatagatttactgtatttcaaagaatgagcagtgaactcggagattgagatcctatatttatataggtcagaccttccatcaaagtctctgccataattaattgtcagaatatttcgataattaattcaagaaattaaattagaaaattaaatatttggtaaatcataatctgaccatatataaaatatcaattaattaattgatcaaattcaaagaatataaaatatttattacattatatacacgtataaaattattaattaattttatacttaatatataaaatatttaaatagtggttttttaatgattagttagcgatatttataaaaaaaaatattattttaaattatatggaagtgaatatttaattgtagattattaggtacgtacagtggtgcctagcaccttctcgacttgttgcattgcgattggttagcgatat

SEQ ID NO: 228758 - DNA, 1929 bp, Cannabis indica
gaccgttgtttccaaaacacctctcgctgagtaagaatttatgtcaagctttttttctgcattttcagttctgcagccgaatccttgtctctcaacctcttcaatcgtttgatgttattcttgcatttttttattcgatctttgaagttgccagtgtattcattaccccaacttgagagaacctccccacatcgcttaatcttctctgttatcgagtcgccaatactggtttcccatgaatcccgaaccacctgcaggcacatgggttcacgaagccatgcgtttttgaacttaaattaacgaggagcagccgttaagacattgttcaccagctcaagtaacaacggacaatgatctgagctcaagatttccaagttaacgagttaagccgaatgaaagagctcaatccaaggaggagtagccatagcacgatccaacctaatttccacccagcttcctgttccacgcccacgttcccaagtaaagggatatccaataagctctaagtcaatcagattgcaatcagagagggcttgttggaagccttcgactaaaccattaggatatcgattaccccctctcttgtccgagtgtgaagcgatgttattcatatcaccaattacgcaccaaggtaacggagattcatcaacaatcgtacgaagcaaatcccatgttctgtatctgtgagctcggttaggttcaccgtacataccagttaatcgccaaggacctctctcaatattattaattttcacatcaatatggtaattggaaaaacccagtacttccaattcattttgatttctccacaggaaactaatccccccactatgaccccttgtatcaacagtaaagacaccatcaaagccaagcatcacacgaattctcgcaagtgtttccttcatacttaacgtttcacaaagaaatatgaaatcgggtctcttatgacttacaaggtcttttaggaattgaacggcccgtaggttcccaagtccacggcaattccagcttaacacactcatgatgaatggtgggcctggaacccagaacccacccctgataagttttttgggccatctggcccaatattactattcaaatcatcacccatcaccacatctttccccactggccccattgcattttttgttaagtgaactggcccactagtgtcagcattaattagaggcaattcattgttgatatccttcccagtacgtcttcgtttagaatccaccacattaagttgagtttgactttcctcctcaattacttccacaatcagctctttgccaactactacagaacaatcagtagtaattctttgctttccaacggcacaatcctgaaagataagattattaactacagactttccatatctggtcacacattgactctccccctgatttcctgcattgtgcaaactttccttaatggtagtttgcatctggttcatcaccggtacatcggaaaacattgcatcattcgtactaccatcgcgtagccattgggatccaatctggtagttcttccttctcggctgtgcacgaagaaacgagccataaggcttgatgacttgatcaagtggcatagagaacagcttcggacagggtctttcgatatgaccaatgatttgcaaataaagcagaacgttggcacatattcatatttaaagtttgcccagaaccactcacttcccgttttacgtagcttcatccgacgcttcaatagtaaagtgatatcgatagtaactctgacacgtaaatactccctccatattccttgaaagttctttggatctgtctccacgaaagtgcctatgtagttcgcaaggtctcgtaggacttggtctgacttaaaccccgcttggagatcatgaacttggacccaaaggtctaaatgattcacagccacggttctgggatt

SEQ ID NO: 228759 - DNA, 2030 bp, Cannabis indica
tttatatagaataaatatatgtagatatatatgattatgttcgttataggtttaatttagttgtgtataattaatttgatttaattatatatataaatattttataacaaatatatatatattttttgtttcaattgaattcaatgaaaatggtatttaattacaacaaatatttttatgtaattatatttgttgcacttaacaatttatgtaaaagaaaatttgttgcaaataactacttatgaaaaaaaatgataacaaaaatacttaagtagacttgttttttatacttttgtaaaaattagttaaaagcctaatattatgagttttttaaaataattaaaatatatcaaatagatgcattttcttcaaaaataaataaataaataaatatgtagttaactataacaaacaacacaagtttacactacaaaaatttgtgataaaaactaaaaaaaattgtgactaattataaatcatcattcctatattgtgactaaaaggttcgtgactaaatatattaatcacaaaaattaaaagttgttgtggctaaatgaatttttagtcacaatacttgtttgtgattaaaactaaattagtgacaacttgtttttaaatactatgttttaatcacaagtaatttttattgtgactaaaagtcacatttaattaaaaaaaaaaggtaaataacggcataagtacttaaaattttaaatttgtaagtagcacaaacctaatgtttattattagcagtataagtaccaaatatttgtaaaactataatttttttttttaatttcgtacgtatatgctcggttattgtcttaaacaggggcacatataactatataagactcaaattctagattattgggtctagacttaaatatgtaatattagttacttctaaatgttattttaataaattcaaaacggagttgtactaatgatataatttatatcactcacaaacttaaaactttaagtactcatgtgctatttattctaaaaaaaaaatatgtttcaatgcgacatccaataaattttgttcataaaataaaataatgtgcatttaattattctttgtttgttaatgtacttggataggaagaatcagaatatccaattttagagcctctaccttcttatggattagagaaaaattccacaggaaggttcagtagtctaattatgggaacaaatctcactgatgttgtaattacaggtaatcaaattattgaattaacaattttatatgaaataaaatctagattttgtttctaattaataatagtttatttaatcgaaaaataattattaggaaacaatggcacaatagatggtcaaggtaaaccttggtggaccaagttcaaggctcgtgaattaaatgcagttaggccattgataattgagattttgttctctcgtgatattcaaatcttcaacctaactttgcttaattctcctttttggttcgtccatcctgtatactcaaggtttgaatatattatcctttttttttttatggttaattaagatttttgtctctaaattttgacatgtatcaaattatgttttttaaactttacaagtcgttaaaaatttatcctgagttattgaaatagttggatttaaatacttttgtctaattttattcaattttgctaatgtgacaattatctatatactaaatcgtgcttccaaattttgatatttataaaattatgcgccctgaattttaatatgtatcgaattgtgctcttaaattttctttcacgttagactttcttttgtaatattaaacagaagtctttaaatttaacaatctcaatagtttgagggtaatttttaacaagctgaaaaattaagagagcataatttggtagatattaaagttcaggatcaaaattcaaattagtctcttttttttttttgtaattttctaattatttaacaataataaaaataaggaaaattagtctatatactattttaatttttttaaaaaaaatttacgatttgggttgctc

SEQ ID NO: 228760 - DNA, 1224 bp, Cannabis indica
aaaaacaatatttttgtaagtttcccttattaagtgcttctttctatgatcaaagtatctccaatggtataaatatatacatatataaataaattttagctaaatttaatatatattaaaagttgtattaaatttaacacaaaatataataaaaatcacatttttctctataatatatattattttttttatttattattttatcactcatatgtaataactaattttttatccttttatttatacactacctattagagatagtctcatttcatgagtgataactaataatagaagagctaatctatctactatcaagccagtttttaatgcgagcgtttatagcatactagctaatctaaaagcccttttttttttggcaaaattgtgtatactttttcaatatttgttacaattaattagtgggattagggaatgagaatgagcaatgaatttggttatcttgtttaattctctaattatttttaagcaacgagaataaaatttgtgagttccacactaatttgagattgaagaacgggagtgacaaactcatgggatttccattcttattttttcttaaattatgaatttttgaccttcatttaattttttttatacgagtccaacatacaattaaaatttcaatcaaaggtgttttgtaatttcagataaaatattatgattctaatatagtgtaaacacatcaatgagaatacttcttatcttgatatcgattcttggaaatcaagcaaataactttctcttattctgattcatcaatcaaattgagggttgttatttacatatctggagaggtgagatgtggctcctctagggggcccactaaagtactcgacccatcaactagtccatgcaaatgaacaagacgactcatcgcccgaatggatgcggatttggacagcatgtccaagaataatttggatctgcaagctcccgaaagtatagttcaactctaattaaattctaaggataaagtaatgttgggaacccaacatggatatcccaagggtacgcttctaacataatccctaaggaatctagtgacctgtaccactatcagattccaggatggctcgtggctaaaggatggttacctgtttgtgcattgcacccataatctgacattctctttccccacagcggtgcacacaccagttgtcatcgttaataataccaagtactgtacaacatattactctt

SEQ ID NO: 228761 - DNA, 888 bp, Cannabis indica
attttggtcggatgcgcaggtaatatatcttgatttatgctatataaaaattacaccaagaagtttgtatgtcaaatctagcattcaaagaatcttgtttcttgcttgcttctgttctttccttacatgctaggtatgatcaacttctgaaaacatctcatacttttaacatcctagaagtatttttagaattcgacagtaaatgaaagttaaaagttccaacttccaagtgtagtatgtttgttacattatttactttctcaactttgatggtcatcatttttaaggcggtgcctatggaatatagacacaactatgctttagcaataagtagtaatgcttattcaatgagaataatttcttggcatacattcattaacgctcttaacttttgtgcatatgcttacgcttcttgttctctcagtttagctcgtcagtgtgcacaattatggttgaagactagggagacgcttgaacatccattgggtgtagtttctgaacctgttaatcttgtatgtcctaaggagcttttggaggcagctgtcaaaagggtcagtctatatacattagatatataataggtttttggctgtatcataagatggtcatataagtcaacatggtttctctgtattgtcttaggtaatttttggcccccctgacttattaaaaatcaataggacatgggtttttcgaccataattattatagcccaagcattgtgtgatattgtgacgcaccaggctaattatgtagcattttagctaagtgtatatgcatggacatgtgtggttatatctatgtaagcatccttgaactgtttaccatgtcaaagttgtgtctaatatgatattcaaatgtcacttggcataatattcacattgctca

SEQ ID NO: 228762 - DNA, 969 bp, Cannabis indica
gaggatgctctacaagccactttaagttgtatacctaccaccatcactccagacatgaatattaatcttatcaagcctttcactccttcagaagttaaagatgctttgttttcaatgggatctgacaaaagccccgagaatgacggtatgtcagctatgttttaccaaagacattgggatattgtgggtgattctgtttgttctgctgtacaaacattctcaatcatggagccgatccttcacccctaaactcaacataatcacactcatcccaaagagaaaaaaccatatcgtgaaagattatcgtcccattgcactttgtaatgtcatctccaagctaattgaaaaatttcttgtggcttagttcaaacctgtcctaccccttgtcatctccgagaaccaaagtgcttttttgcccaatcgtctcatcacggataatatcttagtggcatttgagcgaatccatggtatcaaaatcaggatagttggtcgcaaaggtattgctgctatgaaattggatatgtctaaaggttccaacccaatgaaaggggttttgttaagggagttatggaaagaatggggttctgctctcaatgggttactcttattatgaccggcctaacaacgaaccgtttcacattccttctaaatggggaaacaactagctcactcactcctactcgaggtctgagacaaggctgcccgttatctccatacctttttttgctatgttttgaaggtttctctcggcttctgcaacatgaggaaatgttaggtaatctccatggatataagctcacacgacgggctgggccaatatcacacttattctttgcagatgacagcttgcttttctgctatgccaatgagagttcatgcctatctattaagcgtgttttggacatttatcaccgtgcttctggccaagctctcaacgctgacaaaacgatcatgtcattctctccaaac

SEQ ID NO: 228763 - DNA, 881 bp, Cannabis indica
tgaattgaacttactttgtactgcttctgcgattctcctcacaaactcgtcctttttatttacacctcggaattgtaattgcatcaactgcattcaaaaaaaccgtatatatagtaaaatcaaatattaattcttacatttgccccatcaaatatatatatataaatattaattgttacatgacaacatttagcaatttatcaaaatcacataaaattgaagctttgtaacaacaatccagacaattaaccattattttggtattgtagaatctgaaaaataaatacccatatttttcaacactttcaaacatatatgcttaaccaagtaaacaattagggttcgtctagtacgccgtattatattgtatagtattatattgaataatattttatgtaatatttttatgtaaaactatatatatgatattgacttttatgagtatctaaataaataatattttaaatttacgtaatattatataaaagtatgatataatctaatttaatatatacagtccaatacaataccaccgaatactgcagaggagcacctagtgaatttaacatccaaactaacatagaatggagaaaattcgtaaactctgaccgacaagaatctaaacaaaaagtaatcacactagatgtcactccatctggaaaagaatgtcaactaaagctcatgacaagcaatatcaactgtctgtccaaaaaaaaaaacagtaattgaaatttgaaaccacacagtaagagaactttaagatagaaggcataatgtataaatatatatatgcacagagtttggaatagaattcaactaagaaatggaggttgaggaaaggtaacctgtagtccacccgagattaagtgcacgtgggaatc

SEQ ID NO: 228764 - DNA, 1821 bp, Cannabis indica
gactattccattttgaaatagaagaaatgacgatcattactgaataacttttttatgcattttaatgattctatttcattcatattcctactctcattctcatttctactcctatgttttcattccttccaaccaaacatcacctaataggaatggtaatggaaacaaaaatggacattaatcttacattgaaatggtctttactttcgtttcaaacatttcaaaatgaaatagttgttctactgaaatggtaaaaaaatcattctaatggaataacattacaatgctttaaaatgcaaccaaagaatggaatggaacaaaaattgattcatttctattccattccatttcattacctctttactcaagaacttatagaaacaactactagtgctaacaatattcccaatgcttaatcaaacaaagccattatctttctcaaataactatacataccaataaagttccatccttttcaatataccaaactcaaaaaacccatcatcaaatccaaacataaaaaattcaaaaacacccaaataaaaagaagaacaaaacactatacctgcaaataacaaatggtattggaaggattaagcttacgcgatttcaactgcaaactcttcttaggcttatcatccttatcccttccctcagcccttctcttattaaacccagaagactcattactcccctccatcggcactcctctttcccggcttttcctctctctaaaagtactaatatttctcctgccagggccacgagaagggtggggatcaaaacggggtcttcttctatttgaagataaggcaagaagagtgaaagaagatgagtatggtttgagtctgggtttgggaagtaaggagaaactgaaagagggtttaagcttaagagaagaagaagaagagtggaagagtaaacgaaggtggtttgtgatagtgggcattgtttttcttccttttctttcttcattaccaaatacccaaaaagggttttagtctgcgtatcgattggtgtggcgggagaagacaaagtccaagttttaaggaatggtataagaaaaatttgttgatggagcgtagcaaaagctggaatagctcagctggttagagcgtgtggctgttaaccacaaggtcggaggttcgaaccctccttctagcggttttattttgtaagttggaccttttagcccaaaatattacacatataattaggggtgtttgccgtacaagttctaatatttttgtgtttttgcattagactttttgttttgttaaatgacaaaatagactttgttttgataaaaattcagttcatttcatttaataaaacaaaaagtacacaaccaagtttgaaaaaaaaaaaccactcaaatttcctaaattcaacgtttgagggccgcccacaaatttcctcaatttcttagtgagaattttacaccacatactgaaatttgtaactttttatctttttttactgggggagggaattttttcaaaaatcctgtatttttttttcttcaaaaatactatataagttttatactgcgtattgtgttaagtttttactgttgttctacaattgtttttttgttgttccactattattttaattgttatattgtattattttatagttattgtataaaattatagacttttccctaaaattcagtatttttgtaaaattcccttttcctaaattaaactcttgagggccggccacaaatttctcagggggtaagttgaaaaatgcctcttctattaatcaattaatcaaatttgcctctaagtttatatttatttgaaacatacctct

SEQ ID NO: 228765 - DNA, 1371 bp, Cannabis indica
ctgcattaaatgcgtatataatgatttgacctcaagcagtgtgctacactccgcatgtccttccatatccttcttcaggtcgagttcactcgcggagaggaaaatacaagaaatacccatcgtccagatagaccctcccggagaaaacaagtaggttattattcatttgaaacaataagctcttggagtaattaagatggcttatctcgtagtgcggagtccattgtcacctgacttgttcctgaactaccacgtattttgggagaaattataagcaacattatgtatttattttttgtatggactctataatcgagctaaattaatgttattagtgttttatcaataaattattttaaaaaatgagtagaatgcatttgtaagggatattttgcagtgatttttataattcaggaggagttttcgaaacacagaaaagtttgggggcaaaactctacaggagtcatagttcaggaggataaatcatatttattcaaaaaaatgttaagtttatgtcggttacaaacttaaaattttaggtactagtcttggaatggttgtgttaatccggcccttgctgaggcttttggtgtgaaagaggtactaagttggataaaggagtcaaagctttatcatgtcaatgtggaatgggatagcctcataatagttcaagctttccggagcccggtgaatactaattctcctttcggttgttgcattgcagaatgcaagagaataatttcagatttgaatcatgtttgtttacgttttgtcaaacgttctgctaaccgtgtggctcatggtcttgcccgagtctcatggttatatgctgagcgtagttattcggtggacactgttccaaataacattagtgatgtaattgcacaagaattgttttaaataaagttatcagaaaaaaaaaatttaggtacttatgccataattatttcatttattaattaacatctctaatggttaaattttagaggatgcttgttgaggtgaataacttaggtgccgtttggtaacacttttatttttaattttttaatcataaaataaaagtaaaatttttgttttaaaaaattttatttttgaaaaataaaaatacgttctgtaatcatttttgtttttcaattttaaaaacaaaaaataaaaatgtgttatgtaaagtttatttttttttatttttttttttatttattttttgattttatttaagtcgggtctaggtctggggtcagatttgggttcgggtgagagatcgagttctgcgccagggccatggggagggatttaggtctgaatctggtcagaatctaaaatattaattaagaaaaaaaaaaaagctgtttacaaaaatattaaaag

SEQ ID NO: 228766 - DNA, 2052 bp, Cannabis indica
caaattttctttaaaatatgcccttgggccctgtgtatgtacttacattagtcgttgtcgtattataaaggtttattgctttgatatttattgtcgtttggtttatgttcgtaagattttttttacttatagaacattgataattatatttctgtttgtaatcaactctctatgaatttttatcttgtaattttttttttattcttagatgttgtaattttgcggcttacaatgtcgctagatggtcgttcgctcagaatgtttcgggtatagtggatctataccctactccatcctttgtaatgatcaggaggtctaattttttagtttcaatagctttattttcaaaaaaaaaaattctacttctacaagaaattcaaacatcagaaaacaaaatgaagaatatgatattgagcaatgatacatattgagcttttaatagcacaatcaaaagaagaaaaatcttcttctctacattgaataaatttactacccatcatatcactctctacaacaaaataatgataataatcattactaacaactttaagtactcttcctctcttttgcaaaagtaatgaactatttgattctttctctttaattaagcctaataatctcttcacattctaatatatatttatatataacaagcaagataaactatgaattgcccacatcaaattttttcaccaccaaatcaatgggagtagattacatgggcaagaatcaaatatcaaaattatttccaagctttttgggtttcatcatgatcagtttaaaacttggttttttcttctgtctgcattaatgcaagcctgaatctcttcaagtgttttgcctttggtctctgggactaaaatggccacaaacagaacagccaatagagaaaatccagagtagatgaaataagttcctgaaaaaatgagaaaacaaatgaaaaatgctaaggtcaaacaatcatggagagtcaacaactaactctattcattcctatttcgttggttttttttttttaccataggcactccagctcataaagaagttgtatgtataggaaattgcccaagctcctaaccagttcaccatcaccaccatacttccagctattcccttcacatgaattgggaagatctaccaaaagggaccataaaaaataaagttagtaaaaatgattcaaaaccattatttcttttttggattatcaatggtgtggatattagttacctcagacataatcacccaagggactgcccccaatccaattgagaaagaggctataaaaatctgatcattccaaaagagattgaaagaaaagaaattagtccaagattttgatcttcaagttgagttatggcaacaaatgtcttatcttaccagtactccagcaacagctattaggggtgcccattcaagtagcaatccttgatcctgttcattcaaatgattacaagtttaatttagacaccactggtttagcactaagagggaaaaaagacatttgaatcgagtctcgactactcgccttgagtaagaaagaagttcctgccataaagcagcctagaaatgttccagttgcagacaccttcatacaaaaagaagaaaaaaaaaacaagtatgaaaaagatgaatacatgatgaattatacatagcattgttatgatgattttctcagctgatttaccataatgagtggtcttcttccagttctgtccatcaaaattgctcccattacagttattggaacttgaacacaagcataggcaatggttcctgtgttgcctgaaagtcctgtagttgaaatgataggatacaaaacaagtttgataccagtgaagactaacaaaaaaacacatcaaatcttgtgagaagaaagctatgactttaccagcttctgtaaaggtttcactaacatagaatccaattccattaatgcctccaaattgttggaaaatcatcagtccaactccaatctaagatgtcatgaagatcacaagttaaacatgaaagtcttttacaacaagatctaaggacaaggtatgaaacattaag

SEQ ID NO: 228767 - DNA, 1532 bp, Cannabis indica
cacaactattaaatggaacttacaactttcaagtccaatgtctatccgtcatggaagttatgccataaattaaaatttaaatcgagagtttttagggacatgccagtaataaaaacaatacttaatcatgagagaaacgaacccaactagctttggttcaagaaaaattagagttacctacaggcacctacgggctcctaacacaacgtctcataaatttccatacttctaaaacatttgattcagccctctcagctatccaattacatttaatagcaaaaattttgagaaacatgtagactcaaacttaaatttcttggaaaaattgggttccatatcatagattgcaattttgaccaagatctcttgttaagttggtgacatgaacacaaaaatatccacaattagaaaaaataggacaaaagatgaagatgctagacctaatttactttagttgttgagggatggatccagatatgtgaaggagagggggtctttaatcccccatggtagtattatgctgatcgtgtatcataacatgactttgttgtaagaggttatagggttattatttcctatatcttctttacaattaacgtgggcacgaaacaacacctgagacttctcttatcactttttaaacccgtgttgcatgtgtatcattaataagcaataccctttgataaatgtactcatttattcagctcatctaaaacctttgcctaaggtttgcatcttaatgactgaaaatctaccttaatacctaacaaagcctaattcctttgctagggttctatatcacaaagcataattaacaaatagaacttaaaacactataactattaacttaaattatattcaattaacaaaagtgaatatgtctggtatgtgccttcaattatgctgatattcaatgagcaatatgaatttacagaacttacattgcatataacatgaatcagaaatcttgtctcattcttcataaaagtttagaagaacatcacaagataacatctttatgaaacctgaggttcgggaagaaaggaaaattggaatagatttattccaaagaaattcagcagctactaaaccaaaacccaagaaaacctcactaaatagggacatcccaaaattgttttctaaaacattcttagaacatgaatctatagttttaaaacacttatggtccatcgaatctatgcccctgccacattgtataataccaatgacaaaatgctagtccactaaaatatacttactgcacaatttataccaaatgggtataaatataaggatggaaattgtaaaactggaaaaaattagataagcattaatcggtagggttagataaataaatattcctaaaagcaaacaattatacaaacaaattaagcatcaagtcatcaattttaacatgagaacgaggacaaattaaaataaaattaataaaatctaaattagagaaagaccacttatcaaagtatttgagtaaacctatctttgtgtaatttttaagaatatgatccaatgta

SEQ ID NO: 228768 - DNA, 2016 bp, Cannabis indica
aacatacttgtgatgcaatttgaagaagaggaatagtggttggaagtgacttggaaacctagcacccagttgatgactcagtcaaaacccgattgaacatcaaacccctttattttactaggggtaggttgtgttaagatcaagggtcggtaagtttgggaaacaatgtgtttgaatttgtagaaggcaatttatgagataatcgaagctatcattcatttaccaataagaatatgggaggaaagtttggaattttttagtttgggctctgagaagaaagctctatttcggagtttgaaagcaaaggaatttgaaaagctcaaagatggtaaaaagagaaaccaaagaaaatatgcgcctatttataatgaaaggggcaattcattaaaatttaaaattaaaggtgtaaatcagccagcaaaaaagcatgagtaatctaatagttgaggaagtggaaagaccgcatttaatgtccctcagcaaaatcaaggcatttgttcatcatcatttgccttgggttccttacgtattaaagagtcatcacatcataactcagatgtcagttaggtttctctacgacaaacgcgcattcccaaatgcgtatgacccacgagttcgtaagatgaatgacacgaatgcatattcaaacattttgcatggaagtaattcaacttctcaactgacgagtgtcaaaaagatactattatcattttaggacctatccacgtgtattaaaggatatcccatccatccgggagaaaattgtaagcttccaccattctaaaatctcaaaagcttgatggtaaatattattcgtgtttctgtgtgagggacatgtggtaaaaaagtaaaaaaaaaacctctcaaattagcacaaattaaatctccttaatctcagaagaatagaggggaagtacacttgtctgggaaaggtctaatcctaaaaaagtcttcagggatttctcccaaacaagcctttgttcaggacccaaaagccttactgttgctcaggatgcaaagaagagtaacttacctatcatgaagcgaaagccggatagcttaagcgacgattataatttttctgacgcagaatcagatcttgttctttgcatcagactatgaaaatgcgcacgatttacctctgaatacactcttttttcctgacgatttgtctaggcattttatgttcaaggtgcgatcttttggcgacatgtgtcctgtaccaacaatggtctccattgtacagctgcctcatcgcataagaaagaactttcttggaatagtcagtattttatatgtatttttaccctaattgtgggttttttggtagaaatcctaaacgggtcatgagtatatccatacccatactttaccctataaataacttttttcatacaaatggggaataagaaaaagatagttgaagctctgctaaaatttctctaagctttcttcttctttaagagaaccaataatttttgtacaatagaattatattaaaaaaaataatatatatatttttttgctagagtttttatactgtactctacatgaactcttcaccaagtataaatatttttaattaatttctagatactattgtcctctcaatcattttgtatataaattcattttgaaatgaataaaaataaatgaaaaatatagtaagttaaataatataaagaaaaaaaaacaaataaactaatttatagaaatggaaatgagatatggacacatgaaatactattgctaagaaaatacaaaaggccaacattgatatatatatatactaaattattattaggtgcaatgcaagtatacttaattttaaggtaattagttttattttaattctgtattttaataagtaatcctctactatttttctttcgctacaacctagcagtcttcttttctatttactgtacgtaataagtaatctataacaaatattcttttgctaaattcgtgatcaacgatactcaatttgtgtacacatgtaaaaatcaataaaaa

SEQ ID NO: 228769 - DNA, 954 bp, Cannabis indica
gccactaaaatttagacataagtctttccatttctttactaagtatccacaggaagtaggaacacgctacatagcataattaggaagtgcttgagcaacagtcttcaaaagaacctccttaccaactctagacaacaagcgaccttcccacctttgaattcttttacgaaacttgtccttaagaaaacccaagataactgttttgcttttaaccatggtactaggccaagataggtaccattctcatccgcctcaaaaatgcccaacaaatcacaaatagaatccctcatagccacattagtattagtgatataaaaaatagaggacttaaagaaatttattcgttaaccagaggctaactcaaaaacccgtagcatctccataatcatacttgcctcttcctcggaggccctacaataaatataactgtcactcgcaaacaacatgtgagaaacaaaaggggctccacgagcaactctacaccccctaatcagaccacgcgtctcataagcatgaatgaggcttgaaaagccttcagcacagatgataaataagtatggagacaactgatctccctgtctaataccacggagtggtgttatcggccccataaccttgcccccatgaactagtgtgtagcagatcgatgtaacacatttcataaccaagtcaatccaacgatcctcaaaacccatcttagtaagaatatcacggatataaccccattgaagcctatcataggctttactcatatcgagtttaagagccatgtaaccatctcgacctcttgatttcagcttaagataatgcatcacttcataggcaatcatgatgttatccgagattaaatggccttgaagaaaagcactttgtgtatccgaaatcacccaaggaagaaccaccttcaatctatttgccaacacttttgaagtcactttgtagagcacattacat

SEQ ID NO: 228770 - DNA, 720 bp, Cannabis indica
taacctttgttggccactgctatcatttggtgcctccatgtgtaccatatttctgggaacccatgtaagaacaccaccacttttggacctgaatttcgtattaattaaccaaaaaactattagtgatcataaacattggaagacccatttagacactataaaagtacttaccacatccaatttcggctacatggagctttagtccttttacttccacatgcttatgctcaatgttttccatgtgtatctgtgtaaagtttccagagcagagaaagaaataatgtgttttcttttgttgcttctatgaattgattgttatttttgtttgtgaatggtgaggtgaggtgggtgtctttaaagtttttgtgtcgttgaatataaacccaaaatatatcaacacaacacaatcttgatagaatcaattttcgtcttttagtgaattgtctcttaacaataatgctaaacaaacactaatttaaaatgttgtaagttcgtctcaattggaggaattcattatctaagaactctgaaatacagtcaaattattaagccaaaaaccatgacataagcggttgaagaatagaatcaaagcaggtaaatgtgccttttaagaaagtttagcaaatataacaaaataaatatacaaaatcattaaatataattgtgtttaactttattataatataattaatacggtaacacaataaataaataaataaa

SEQ ID NO: 228771 - DNA, 839 bp, Cannabis indica
cacaaatatagataatttcataaacaagattaaaggaatggcaattatcattaactaagcaaaaactttaatcaacattcatcttcttcccccattgggaatttagttcataaaaattatattaacatccataattaaatctagaacagaaattaacataaggaaattcaagagttaagaaagaactagttggtgatttcgctccggatcatcacaatagcttcctctcctccttcattcactttttggggttgaattctgataatattagtcataaaatttgagtctcttatataggaattcggcttgctacctctgaatggcgaaaattcaaaacttgtcaaaaatcccgtgtttccctcctggtcgcgactacataatgccctagtcgcgactataggcaaattagaaaaaacacccattcttccaaaacctcctagtcgcgactatggtctggagtggttgcgactactagagccaaattggtagcttcagcagatttttctccagaatgtcccgtcttttcaccaattgataaaattcgaactgtaatgcatcgggaacctgaaataaggaaaaccaagcgtaaatccattccaaaaggcaacattaactgagaaaatgcttatgaaattgacccgaaacttaggctaaaaatagcctagaaaaattccctcaaacttgatccttactcgcccttgagtaagaccaagactactactaactatgctaactaataattataatgttgttggctcatgttccatttccttccattgattaaactagattttcaactctaaaaactctaacaattaattgggatgctcatcttatca

SEQ ID NO: 228772 - DNA, 772 bp, Cannabis indica
aaagattaaatttttaataagttacctttctcggttcgcttaattgagccacttgcaccaagtatgtcaccaatatcaacaagattcttaagctggtcaaattgatcacttaaaaacctccccttttcacaataaagctgtgttcaaacattcactaacttgagtgagaagatttttcattaccaaatgtgagaaaagatttaaagttacaaactttggaaaactcaaacccctaaaaatataccaatgacagaaaacttagttgaggatacctgaattgtcccagaatcatctcgtagagtgagaaacgcaagctttccaaatgctcggcgagccacaattcttcctgctatcgatacattgtctttctcactattcatttcttcaccattttctaaatttttataagtctcttgcaactgattagcagagtgagtcctgtcccacttataagcatatggttccaaccctttgcttctcaattcttctatctacacaaaacacatacatacattcactcaaacacctatatttatggaaaattggccaaactaactatatgaaaataattcaatgtggttattaatatatggtacaaaacgaccatgatcgcacagtgtaaagttattttgctaataaaaaaatttataatgattatttttaaaaagacattctttatttactaagcagtgttgtgaaagaaacatgaaatttgccaaactaacaacacaacaacataattaccacaatgaatttacacaacaagaaatat

SEQ ID NO: 228773 - DNA, 1056 bp, Cannabis indica
agaattcctctttgtccgtggcatgaggggggccgtaggtacccaagaccagccatttttctcctggggggtcagaactaatttctccgacaataaaaaacttatttgctgatagaattttgcattggacaccttttaaccaacataatccaagacccccagataaaccaataggcgggatataatgaatcccagtaaaatgcagcttaatacaaattgtaatgaacttactttgtggtatgcgagcttcagagatgagaagcatatccggttgatgctgacggatgagagccgtcagttgacgaactgtcgtggaactcccgagtccacgacagttccaagcgaggattttcatggcgattgtggagacttttgcaggcaagtctccgaagccccaaaacaaaaatccacatcgctggcgtgagcattgtctggcagttcttgtaatcgacaggaagaggttgggttagctgatttctcaatcaccacaaagtgattatttagatcaatttttaggtcaaagtctttcccgtgccactggttcttgattgaagagaagaaacctcctttcgccttagatgctttcgttttgaatttcttaggtgtggaggaaagcttagctgtagtacgaattgtttttcctcttcgtctctgagtaggactggtttcggtctcaggattaggcgtggttgtttttctgggtcttcctcgaagcctgggagtggattctacagaagcttgaccaagagcaaaagtgccagtaggttggggattacttgatgagtcgttgtgcgaggttaatgaattctgagattcattaatgattcgttcattactcctgtcttctgaggtgggagagaaagcctttttttcattatttggcattggtgctgggctgaggaggataccgtccgaggccttccttttccttgggccctccaagtgttcttggaccctaaagtcctcaatgttgaggatggggttgaagagttgaggtgttggaaatattttaccaggatctagacttactaccatgtatgtttcattaacatccta

SEQ ID NO: 228774 - DNA, 1738 bp, Cannabis indica
taattaatggataatatattagataatatatgaaatatattaataatatattaattacaaaactataattattaaatatccgaaaattccttattcatatagagaatgtataatcttgtaaggatgtacaagataattaagattacgcgatatcaataaaacaagttggtagtgtattaaagtttagggaatctttaatatggaactgctaagtacaatttactatacactgtacttctagtgtgtgtgattttgattcggatcacatatgtagatggaaatgtagtaaaggtactatgtataattaggttatgcatgattagaccgatatgtaataaacatcttttattaacttgttatttataatgaaaagagttattcatatcacaataatgatcaatagtagatcaacctaaatcctaagtatacatgaactcttatttatgttcattgagttctttgatcactcgttaaattttcttagagaagataattcttacgacttctattttgagagcttaataacatgagtggctaggaacatgttatacaatactggaatctaaagctttcctaacagatcgaatattagttcttttgtagtgttaattctagaaatgttaacagttggatcgaaatctataataagttatcgattaactgttcacattgaattaatggtacataaggaatcaagagataattagaagggtaaaatggtatttttaccaactctaattataaactaataaatagagggtgagctacttatcttgattacatcaatggactacaagtaagaattctgtaaatataatctatattgtcaaagagtgcaatttcatatttatagtggagtaataatagaattaataaccacatgattctattgatgagattaatattaatcttggattcattggagctttgaaatataggtccatgatctccgagtcacctctatacaatactgtataggagaaggttttatttgatgaatggatttcgagtgagaattaatttatatgggaaataaattcttaagggtaaaatagtaatttatgaaattactgctttaattaattatggcaattatgaattctataattaatagtatttaactatttaagttttattgaataaaactatattaattagttaaatctaatattattcttaaataatattagaaagaaatatattattttagagaaaataatatctattttaatccttgtaaaattagagattaatgagaaacattcaattattatttatttgcaaaataaataataaatcttatttatggtaaaattgagaaattaattttaaaccttaaaatatgtagcacatgtgtatgcccattctacatgtgtagggtgacatataaaggtacatgattaatttaatttaattattttattagtttaaaataataaattaatttaagctaattatcttttaattattaattaaatgaattattggataattattaaattaaaagatctattgatatttgatattcagttattagatatttatatttgaatttggattctaattcaaattaaattagatatttacttttattttaaataaaggaataaaaagttgtttataacactacatataggatatatagtatcataaatcaacaacaaaaatagcctaagatatacggtaacaaagagagagaaaataggaattgattttctcacttctactctctctctct

SEQ ID NO: 228775 - DNA, 1883 bp, Cannabis indica
aaacatttatttgtttgttagatttaggaacacaccctatacaatacattactaatacaatggttactttagattagataacaaaacagggagtttagattcgtacaggccactccaataagaagttcccttttcaaatcaaatcttacaaaaaagaaccctttcgaagaacaagaccccatcgccatcggaacccatttcttccttctaacttccaatctctgcaacaaccattccagtagtagcacacccatttacttcaatctataaattaataataataaaaaaccattttcataaaaaaagttcttctgattctgatctgggttccatgtcttctctgcttcggaatacgcttttgagtctctttctgctgagcttctttgggtggtcatcagcttcttcgggatcgcgttcgatcctcagagaaatcgatgccgaaaacggtgatcctcgtgactatggccttgatttgaatcttaccaactttgatttggtccttaaggataccccggcaacatatgccattgttgaattttttgctcactggtgagcttttctttttctccatattgaaagttttcctctttgattatctattgtttatacaaaattttttacgtgttatatatttgggtatgtgtttcaacgaatcacaacatgattcgcctcacattatggatctatattgaggaactccatacatatttttaattaaaaagtttgaatttgtgataacttcgaccatattcggttactttagagctgcttctccgtgatctcgagctagctaaccctgtttaatgatgtctcacttaatgaattataatttgcattctcttagacttgtattcaaggccttttgtagattgtcctttttaaggtttccatctttcttgctgtatgtgattgaaactttgcttcaattactggttctagtggtagattggtattgaattccacgggattggttcatgttggcacttttgtttgtgtgtaaattttaagttcattgttaagattttatggaaaagatggttaatttgaatatcaaagtatattggactggaaaatagcttaaattggtgaacaattttaagagttgattgatatgacgacgactttcagtaattatgttgtctgttatgcgcagaaaacattttcttgaatttccaatcagaaattccggaaatacaatagacccaaaatcatttctttgttttgtttctatgaaagaaaacacttttattgcatgacgttttttatggatacccatctactctctcttgcacttaatgttatcatttgaaaatgtgaagtttaatcttcttgtttcttacttgcttggtaggtgtcctgcatgcagaaattataaggtatacatccataaatcttgtttagatattgttgatgaatcaatgttatgaccattggttgctgactgaaattaactttgcagccccattatgaaaaagtagcaaggctttttaatggaccagatgccgttcatccagggatggtattgatggctagggtagactgtgcatctaaggtatttataatgttttctttttttcccttgtactgttattcactttttaagaacttccaaaacatttgtccattatttccaaagcgcttaaattgttttcaacagtttatgagaactagcaaaactcaaattaattaagataaccttattataatttcatgtctttaaattcttattacaataaaatccaagtaaattgcagatatggttattttggaaaaagtgtgagtctgcaatgtatcctcttataggattatatttttcctttgtcaccaattttgtatttatctgttgttgttccccatccttctgaagtttttctgttttgttt

SEQ ID NO: 228776 - DNA, 1052 bp, Cannabis indica
tatatatatatatatatccatgagttagaaaaaattatgaaaatgaactcaaaataagtattgaaattaatataaaataatttgaagaaaaaattttaaaaaaaattaagaataatttttaaaaattatttaagtttatatttttttttaataatgggtgtatttatcattttatggggtgtaaataaaactccccatggattaaacaactcatgacaaaatatataacaaaaaatttgtatatacaagtaaattggtacaacgtaaaaaaaaaagagaagaagttctacaactcaaagctataaagatcaaaaataatacgaacacaacaaacaaataagataaaaaaaaatgaacgcttacaacgtgagtagtacaagtagtgggcattagtgttgtaaattcgtacctgactcatattgaaatttcttattttaatattcctaattttattatttaattaaatacttaattaaatgtgaaataataaaactagtactaaaacagtttttctgtagctacagaaaataactctgtaactccagaagaaaccagaaaaacaaacagtgcagaaaagtaaaaatacacaaggtttttgtatgtagttttaacaaccttttcagattattacacacagctgaaattgaacaataaattaataaaataattttgtcaattaaatatgccaaaaatagaattaacaatcttctcctttggtattttgattgacaaaatattttaattggagaaaacctacatcaagtgttagaaacaaaaacaaaagaatatagaaaatactccgcctgcatgtaagtactctaacacattaaaataaaataactttttaaacagaaaagtttacaaaccacaaacaagacaactttttaaacggaaaagttcacaaaccacaaacaagataactttttaaacggaaaagttcacaaaccacaaataagacaacttcccctaaaaccaagggtccaaagttgtaacaaacaaaccaaaaataaatattactccccttttgtctatcaagagccaaatacaacaaa

SEQ ID NO: 228777 - DNA, 2054 bp, Cannabis indica
atctttattctttaacaccaaattcatcaatgagtttgtattgcctaacactatattaagtgatacatgaagagtggttatagtagtaattaatatccgatattactaaactaaaatatattagatgcagttaattttgatttgtacgaacaataatttcatgtgatggagcttcattgatgccttttaagaaataatctacatgaatagacagccatcctattatgagatgtactactgtagcatatattctaatattgtattatattaacaccccacaattttatcaaagcattattattattagatattttttaatttatacacacttttcctatttttttttatttcatattctaaaaaaataactttattttatgagataaataagatagattttaaatatgaagacagcaaacaaaaatgaagtgttattaaaataaatgtcaaaaaaacattactaattaatataaacatatgaaattatgaaattatgaaattcatggaaaaattatgaaataatgttaagagcaaattttaaaaaataatttaatttaattttttttaataataggggctatatatattcatctagaaagtaaaacatacgcattacgtattaacaaaaaaaaaaaggtacataactttacattcacatattttattatcaatcataaaattaaaagttaaatatttattatatgtacacatacaacgaactcatgcctttgcattgatatttaatttcttaaactttaatgttcattgataacttattaggtaccctatatggctatatttattaggatatagcattcgggtagaacattaattaataagatataattaattctaagattttaatttggagagatgatatttgtgatagggtgttacaaagtaaaagtaataagttacaattataagttcttataagcgaattattattatgattatttttgactttgacaggcacataagtgaattctaaggatccaaattaattaaattgtagctgattaaacaatcagagttagtaatacaattcttacataataataacaggaccactatatctagtacatggggtaaaaactttttaataaagtttaatttgataaggtaagtgcctgcaatccgtaagtgattttagagtgataaattctacaacattattaaaaaaaatttaataaggtgtatcggctttagaattataggtgtacttaattctacgacttttgtagatgatgtaatacattggatgaaattttatgactgaacttttcctaatagggttttttttttttttttttttctttgagagaaatttataaagctgtttttataaaagttctaccaacctatttcctacattgtattaacaatttaagcgcatagagttattagtaagaattttactactacattaattgatttatcagatctatttaatttagattcttggaatacgctttctcttacagtttgttatcaataaaatgttaaatgtcggaaccattattgacgaactattcaactaacacttaccaagttaacacgtttaaatatatagacaaacgaatttgtatgtagaatgaataatcttatatgcaaataaaattcgttgttgggatcaaactttgtagatgtatagaatatagtgttactaagagcttaaacacattgtaagttaaatgcgcaatatgtacgtcatattggaaaactgtgcattcgtaataaactaattattaggtagggattgaatcatttaaatcatattttttttaaaaaaaaaataaattaaccttcgaaacatatacacataagaaaacagaacatgtacatctccttaaaatggtttaagataacagttaatagttaagagcaattataggaacatgtacatgcaatctaataatatatataaataagttatatatgaaaaatgctaattaagagacaccaaagtgatgcttataatttttcctacaatcaagaaaacgtccaatgtggaagcaatgcacaaccatacttccatacatatatatatatat

SEQ ID NO: 228778 - DNA, 1403 bp, Cannabis indica
gcagagacgccatgaaatccatcaacggcttagcatagtcaaccaatgaaccgttgacttgggtgacttggatagggttgattcctgaggctgtgagatctattgttgtgactttgtgacctgtggattgtaataaattggccactttgtaccaacaccaagctccatgaccagccccatgaaccaacacaaaatgactactactaataattttggtattttcatcatcattacttggcaatattgttgacattattactacaataattattagattctagattttgtgtttgtgtttgtgtgtatatataataagttatatatgctaattaatgtgcatgcatttgttgttataatatgagaaacgtctttttagctatcacaaataaaatataatatacatatatatatatatatatgaaaaaaatattatttttatatattttaaattttgtaccaacttttactattttacattggcatcatatataaaatactaaatattgtatcgaatatatcacatcttttcttaactttttgaaacaattatataacaatatataaatattgtattattgtatatagtgtataataggtctatatttccttgtaaatgtcggattttaattaatattttgtaataaataccgtgcatattcgaatgcatattatgaatgaaacaaacaaaacaaaaatcatttcttattttcttattagtctgccaactatttaatcacacccgcataatcttattgtcataggactcgtttgatacgttatatttagttgtattgtattatattaaattaaattatttatcacatttttatataatattaaattaaacttgaatttatactaaaatattatatatttagatgtccataaaagtcaatactatatatatttttatataaaaatattgcataaaatataattcaatataatattatacaatacaatacaatgtaatactacataccaaacgaaccattaataattaattattgatttattatatactacatttttacattttggctttcctattttgtactagtatcttaatggtgttgataaaataaataattcaatccaattcgcacgattcaatctaatttaattcataaaatacggattgcattagataaaaaatctaaaagttcgcacttatacagattaaatgttaattgacatgaaaaaaaccgatccgatttaatctacatatatttatatatttttataaaaaaattatatacaataaatatttcaatttaaaaataataatataaaaatccaatacgtacgatatatataagaaaaatataatctaaaacaaaattaaatgttgtatacggaaatggtacgttttacatttatcaactcgcaagtgcacgaatctt

SEQ ID NO: 228779 - DNA, 2278 bp, Cannabis indica
atgccgagtgacttctcaagagtgcatgttgagtgacttctcaagagtgcatgccgagtgacttctcaagggtgcatgccgagtgacttctcaagagttcatgccgagtgacttctcaagagtgcatgttgattgacttttcaagagtgcatgtcgagtgacttctcaagagttcatgctgagtgacttcttaagggtgcatgccgagtgacttcttaagagtgcataccgagtgacgtctcaagagtgcatgccgagtgacttctcaagggtgcatgtcgagtgacttctcaagggtgcatgccgagtgacttctcaagagtgcatgccaagtgacttttcaagagtgcatgcccagtgaattctcaatggttcatgccgagttacttctcaagggtgcataccgagtgacttctcaatgcccttgctgagtgtttttttaatgccatggccgagtgatattgtcactttcaaggcttagtgacattgttactctcaaggccgagtgacattgtcactctcatggccaagtgacattgtaaatcttaaggtcgagtgacattgttgctctcaaggccgagttacattgtcagtgtcatggtcgagtgacagtcttgctctcaaggccgagtgatattagtcactctcaaggccaagtgatattagtcactctcaaggccgtctgatattgtcacttttaaggccgagtaacatttggtcatgatggggccgagtggcattagtcactctcaaggaagagtgacgttaattcactcttaggctgagtgactttcaccgtgtcatccctcatgccttggtcaactaaccttggaaattattagtgcaaatttgtgtggttaacaactttcttctttttatcttcacgctttggatatttattatttcctttaaagtttttcttgtagttatttttcaaaactcttgcataattccttattaacagggcaacagtgtcatctgttagacatccagatagatttgagatttgtttccatcctctttatgaacaaaagcatggttattctttggtttttctttctataattctttctgcttctacctttcaccttgtaagagtcatttcattctacagtgacccaattagcgtatccaagtcaagctcttcaacatctttcatatcttctatagaggtgactttggacttgaactttttgggaaaaaccctatcactttcgaacaactttagcattagagtaagtcttccctaatgcatgactcattcgaaatgtcacacaacttggcatggaattcagctattgtctcatcttcttccgtagataaattttcaaatgcctttgccaaataccgcaacctagaatttctcaaagcatcagtcccttcattttttatctcaatttttccaaagcgtatttggctacattgaatagtgcgtgcatagcttttgaattgtgattagccttctacatttcttcaggagtccatgtgctcattggtttggatttgatcattccttcttccacaatagaaggacattgccaaccatcttctacaaccatccaaactctcttatcaattactttgaaaaatgcactcatcttggttttccaataaggataattcgctccctccagcgttggaggtcgagaagtggatctacctaccctaaaaatttccataacaaacataaaaacacagtatatactcccagagatggatctgaaaggaggttagttccaactggatgttgcaaaaagggaaaaaatgcaaaaaaatttaaaaaattgcaacagtaacaaattttactataacacagcttggaagaaccctaaggatcaatatttctaacagaaaaggcccattcagataccaaatgtaaaccccaagtttttgtctaacctatatttatcatatttggattgattttatcttgatttatgcttgaatattaaaaataaaatcaaagattcaacactagaaatctacaagcttcacatgccctagaaacacattccaggcggctaatgcttggcttctttgaaccaagctaatgattcactaatccaaaaagtgtatcttacaattacaaatctaacatatacaagctttttcaaaatacagtgtagctttaccctaattaaccaaatccctcagttatatacacaagatccctttgtgtcaatcctaaactcccttcaacacttttctcaatctgaaattccttcagatttcaagcttaagactcaaattaaaatccttcagtgctttcatctcactt

SEQ ID NO: 228780 - DNA, 1241 bp, Cannabis indica
tttatttaagtgtgatcttgaatttaaaattataaaagttaattcctatgtatcagaattaaatttcctacaatcttggattctacttttttttccataaatattggagaatagataataattgattggacactcaatttgtacttattaattagtaaaaaaaaatactggttttcaactttaattgtttttcttataaaaaaacatcataattcctagagaaatgtgtataaaaaagagtaattctagtatagcttcctaattattttagcattcacgaaaactttttaaatcaattttttattttataattatatacattgtagttattttaaactatgtaatttttttaaatttttttaaatattttactttacaaaaatactgcagttattttttacttttttattgcatttttttttataagtttcatactgcagtatactgtgttaagttttcactggtgttctactggtgttttttagttgttctactattgttttcagttgttctgctttgtattttactggtgttttataaaaacacaatatttttgaaaagatttccgtgtaacagtatttttgtaaaagttaacccaaattcccgtatttttgtaagttttccattttttattttttattattctttttttgtcttattatatatacataaataaaaaattaataattgaaaatttatgaacgaatctttaaaaaatgctagtaatagaattgtagttttaatgtacacggttttttaaagagcccaattttaaaattttgcacaagatccgcaaaatacttgggccgaccctgctacgtatatgcacaatcttctttttttaaatcagaattatatattgctcaaaaaacatcatttacatcctatgcagcaccatccaaaacaagtccttctttaaatctattacaaactagcaaaccattcattatctattaattgtattttttttaggtataacacctctcactctatttttgtcatgttatttcattctctttattagcactattatcgtaaaaatcctttgactccataatgattcatttcggcatgaccatagatggtacaatgttgttgccagtgatgtagcaaacacctgtttctgaaacttggaaagcttcactcgagctatccatttcaacaatcgaggaccatagatgtaacgccctaaaataattaggcacgctacccaaaaatgtttatgaaaccctaatccccta

SEQ ID NO: 228781 - DNA, 1242 bp, Cannabis indica
ttattaataatttataaacaataaattaaatgcaaaatatatgaaatggaaacaaaggtgtaggtctttcatatatgtggaactatgttggtctatgcggggggccatggccccccctaacttcaactttatagtttatattgattattgattatttcaacttcttcctttattctttctaaaattttactatttggtgatgggaataccaaatttttccacgcgtctacggtaattcggagaagaagaaatgctattgatagtgtggaaaagaatggggagtggcttcatcaacgtgaggagattgggaactacttcagggagaattttatgcaagtttatgaatctcagaatccggttattggcatggactttgatactcttttcttggagagtgttacggatgaggaaaattcagtcataagcagatgtccgactgtggaagaaatcaaatctgtggtctttcagatgcatcctcttaaatctccggggcctgatggtttctcgggcatcttttatagaaaatattggcgaattgtcggagcaaaagtttgtgagatggtgcaaggtttctttgaagatcccacggtgagcaaaaatctgaaccataccttcttgtgcttaattcctaagataaacaatgccactcgttttgatcaatttcgccctattagcttgtgtaatttttgttataaaattattgcccgcattgttacggatcgattgaaggtggtcatcgatagattagtttctcccttccaatctacctttattccgggtagatggatagcagaatgctctatcatggctcaagaggttctccatagtttcaagagaaagaagggtaaacagggagtgatggcgattaaaactgatatgagtaaagcgtatgatcgcttggaatggagttttctccttcgagttttgaaagcgaatggctttagtgagcaggtgtgctccattattatgggatgtgtgacttctgtgtcttactcggtgcttctcaacggagcgccattggctcccttcaatcctaaacgttgtcttcgccaaggagatccgctctcgccgtatctctttattttgtgcagtgaggtgctatcgaaattaatctgtagagctgaacaaagaggagagctgtctggtgtcaaggtgtctcgtgaagcaatgcctaataaccacatcttttatacgcgatgatgatgatatacctttgcaaggctaatggttcaaatgcagagg

SEQ ID NO: 228782 - DNA, 930 bp, Cannabis indica
ctatcctcggatggcatactatactcgaaagagagagaatcatctgtaatagtttaggtctaaattatgaagctgtttcttgcaagttgtaatgttgtttataattatatgcctagctaggccaaaaataagatgggtgtcatatatatattttttttctttcataatgtcatcatatttattaattattttattcatttatatcccattcaatagcaaaatttgcagccagtgcactggcctccctcgctttatgttatgccatttcataaaaaataagtacaagcctaatttcaatttgaattttgtaaaattataagtcatggttttaatttcctaaaatgataatttaaatttaaacactatacttggtaaaataaaaatagtatataataatatctcgagtctaattttagtcagtttttttctttaatatcattaaaatgtaatcaacttcaagttagtctctagtacaaatatgtgtaaaaaaatatgtaaccaacatcgacataacacctttagattatatttagttttaaaattgtaaagtttgaattgtcttataatatagattatatttagtttgaaatgtctttagattatatttagttattcttctttttttactagttgtatatttagtgatattagtagaacttgtaattttgttggcataatgtgactaagtgggctttctctcatcaaaggtttggggttattccagttgactccattccttttgacttgttatgtaatgactgtgaggtctaatagtttttatttagtaatataatcacgcttttcattaaaaaaacagaagtatcttctaatataattaaaaggtacaattagatcaataaacaaatatatatgtatatatttgctgaataaatcttctccaaaaatccatggctagaaacattagtctgt

SEQ ID NO: 228783 - DNA, 1374 bp, Cannabis indica
attactgagcaggctgttgaagatatctttgaagtggtggcctaattctttaatgaaagaaaccttgttgaggctagcccgatggctggacttgaatataacgaagaactccatcagtagaagtatagtcaccaaccttcagaaatctaatggcttgagcttgctctattgggagactattcacatcaactggaaaattgtcataagagtgaggcccaccacatgactcatagattaccccggcttgttttacttgtgctgtcatcatcttggcacgggcttctacttgggctgttagctttgtaatggcatcaacttcatgtaaacctatcactttctttgattggcttctctcacttggccaatgttgggtattcattgccatctcatctaatagctcataagtttcattagaacttttctacatgaaggctccaccagaagctgcatcaatgagtgtacagtttgtacttgtcaacccattgtagaagttgtgaacttgcatgcacttctcaatcccgtgatgcggacactttctgatcaggtctttgaatctctcccaggtttcataaagagactcattgccgtgctgaatgaagttattgatctctgatctcattctgacaactttggccagaggaaagaacttggagagaaatttcagggccaattcctcccatgtgttaatggagttaggtagcaaagacaccaaccaattctttgctcgatgcctcagtgagaatgggaatagcttcaagtgaattgcatcatcactaacccctttcattttgaatgtttggcacagctcctcgaagtttgcaagatgcatattgggatcttctgatggcaatccctcaaactggactgtggattgaaccatctgcaatatgactggcttgatttcaaagttgttagcttcaatggcgggtggctttataaaagatcaagcccctatcaggtttgtagcaaacaatcccttaggctacagtcagatggattgggaccattagcctagtcttctgcgacacctttgttattgccattattagccatatccacttcttgttcaacccctactatcactctttctagcctcttatttcttttgtttcttctgcaagtcttctcaatttcaagatcaataggcactactgcgcttggtcctcgacgccgcataaaccacaaatacttgaaataagatgagaaaaatttaagaaaaataggttagcaagatgtagaaagataaacgaaagtacaattcaatctaattatagtaatatcaattttaaacaatttctcggcaactgcgccaaaaacttgttatttattttcctcgctacgcaagtatacgtatcgattgctagtatatatact

SEQ ID NO: 228784 - DNA, 593 bp, Cannabis indica
cggggttgagcggggttatagaatttgaccattttacccctaagcttaaaataggctaaaattaagcaccaagggtactttagtaatttgttaaggtgggtttaggtggttgtttagaattgtaacagctagccactagtgcattaattagccattagttatctaatttggaaaaaagatcaaatgaaaaaggaaaattaaaggaaaagcactttttctcttggaagctttctttctctctttcgactgagaaaaaactagaggaaaaccagttgatttcttgctatttttttggaattacagctagggattcaagtaagactcaagttgaggtaaaccctagaccattggttcttttgttttcaagcttttacttggtttgagtatgtgattttgagacataggggccgttagggttagaaatgtttagggttcaaatttttaggttcatttgagttaattttagcctctagtagctggtttggttgtgttgtgatagatttatgcaagtttgagctttgaactcaaaactttgatctttaattgcataaattgagttagtatgcttttcagtgaattactggttggattat

SEQ ID NO: 228785 - DNA, 1824 bp, Cannabis indica
aaataatttctcaattacggagattttattaaattttaggcgtgatatgcatgttatatatgaattattatatttttcatattttatacccggtaacaatgaaatgtgacgatttgtctattagtgtcactgtgatacaatagagtatctgagaattagtggagaaagtttatagacattaagaatgtcgagattatgcagggtaataattttttaccattttactcttaagcatttagattgcttaagaaggaatagaaaaagagtattttagtctttttgccctagatttattattaaggtaattaatggattttctggagttttttagtgtgtttgagatgatcctaaagtttgcataaaataaaatatctattggatagatattatcgttaagaaatcaaaactctctcttcatacatctctttctctctcttggccacattagaacccaaaggagccctagacatttcagaactaaaactaccatttcaactagcaattcatcaacaaattggaagcaagttgttagtcaagaacaagatagcctagttcctcacctcctctctttaaatttcaaggttaagttaagtttcagtgtgtgttttggtgagctcggttctataagacttttgagttgttataaactattttagaagtttattttaaagttgttgttggtgttttttatggctgtagtaaggttaagctgagtttgcatttatgaactcaaatttagctcaacagtagtgattttagtttcagagctttgatcatgcaattttcagttgaattatattcattgtgatgttattgggtgttttggaaggtttggtaagatttgaggtagaattgagtgagaagaatcgaggtttgtgattttttctaggaaatggttagttgtttttgtagaaacggttaatcgtttcgtctggcaggaccccaataaatagttaactgtttggggatcagtggaccaaatgtggtagttttgggtgactcagtttccatgttttatcaatatttagggtattgatatgctatttatcaataggaaaacttttggtttcaagtttagttccctgaaagtgttttagtaagacacttatctattttatgtaaatgtgacttagggcctttgatcgttcaacaacatactccactcaggttgaccggcacacctgattatgaagtagaggtaagattagtataaaaaaaataacatatttatgcatgtttaatgcatgcactatgaaatataagttggttctaccaacactagtacttttagagtactgagtgcatgtgttatagtgacttaaactaactctatcaacactagtaccttcggggtactgagtgcatgtgatataaaggttagttgaattattagaaaatataaattattcctaccaacactagtacattcaaggtactgagtgtatgtggcatagtatactttcaatggggtacgacctagtgctactaacactagtacttgtgtgatacttagtgcatgtggtatagatgtcatactattgtcaagaacatttaagactcattaatacgtgtcagacacatgttggatttatgaataggtgtatggatacctaagatgcaaatcagattatatgttatgttttatgcttttcttattgagtttgtcgactcatagatatactttcatgtgtaggtaaaggccaaagctgaactgtaaggtccagggcttcatgaagattgtacatatcaagatggttagacttggagagtttggttcttcaggatagcatgggctcagttatattagtcattgggcgacacttt

SEQ ID NO: 228786 - DNA, 792 bp, Cannabis indica
agggagagaatgtggatgttgtacggtgtgatgaagtgaatgagtatcgatgttggcaatattttagctaaggaaatttttgattgtgcacactgggagaaagggaagatgttccttcctgcactagtcacaggactttgcatggctactggtgtccctatgcgggatgatgaaagcacggtcacaaagaagtaggttattagttttgggcctccccgtgctcctaaacgccatcctgcagctgaatccacatccaatgatcaggtgctgaattacttggccaaccaaaaagctacgcagcatcagctagtgcaaaggcaagcacaactgtgtgagcggttgcatgcttactaggagtaggaaagagagagagatatgtgggtgaagcgtgcgttgcagaccaacatgcacaaagttatcccgggatatccagattttctagattagattcttacgccttggcatccgattgatggtgaagagtcagactcttgagggagttttcttctttccttaatctatttgatttactgtaaatttgtgtgatagttctgtttgtttagtttaaatgacgtaagttatgtgttgttgttatgtgtgtttttgtttaaatcatttgtttttattgttgtcttagttgtttgtgtagtaacattgtgtagttaaagtcgtgttagtaatgttatgttcgcatgtttgtgctatgttgtgttagcttgtaactaagaagtatatgtcattttgctttagcttggcttagcgtaccgctcgatgatgaaaaatatcctattt

SEQ ID NO: 228787 - DNA, 1237 bp, Cannabis indica
gcataaaacccaacagttatacagtgaagagtggttattggaacgccattagagttttgggtagaggataacaggattctcctttgggtccctcatcttggtagaagtatctttggagtcttaccatcccctctaaggtaaaggtgtttatctagagagcttgtttagattggtttcctaccaattctaaccttgcggctcataaggttccaatgattcttacttgccccgtttgtggcttagaaaatgaaacatcctttcatgctcttcggggatgtcctagtcttggatccattgtcagtttggtgaattttgctctcacttcttcctctcttgctcaagtgaacatgtagtcttttctttgagaacatttgagaacataaatttattctttgtaaagataaaatggaaaggttaatggttccttgttggcgcatttggtatcatcggaatcactgggttcatgatcataagcttcttaatgtcgaaggtgtgttggggtgggcattttccttggcgcgcaactaccaagaggccaactcaaaaattggaggagttgttggtatttcacctctctctgttagttcgatggttttccttttagagcccccgtggtcacctctgcctattggggtgtttaagctaaacatggatgacagattgaggtttagtgaatgtcgtatgggctttggagcagtcattcgtgatcataatggaacttgtgttgcttcaattgcttcttcgtcaagtgttctttctccatctgtggtcaaggctatggctattttggtgggtctccaactatgttctcgtcttggttatgtcaatgttgaagcgaaatagattcccaagttatttccaatttattgaacaaaaaagagttgtgcttgacggtatatgattcaattttacaagatatttacttagtttgtaataatctgaatgtttctaagtttttattttacaaccgctctgcgaattttattgctcataatcttgccaaactgactttctctcttgataatggaagagtttagtggtctggattaccagagttaatgtaattttctaattttgttttggcttaaggcctaacgaaaaatttctttcattaaaaaaaaatgcacagttacttatattataaatactattatattttctaattttattaataggttatatggtaagtacttatattttattgtacattattaaattctcaagaagattttaaatg

SEQ ID NO: 228788 - DNA, 5654 bp, Cannabis indica
attccattccattcctattcccattcccattcccattcctattcctatattttcattcctccaccaaacgcctagttttatggttcaatcgttcgagaccctatataaataatattttatctatatattagtaatttcttttacaatttcgagactttaagtatttaggagctcaagatgcactactcgtctcacctctggacttacctgcttacaataaatcagttagctcaatgaattacctacttatatataacctatttataaataaatatattatgatactattctttcaaaagaatatattatgatacatcataaagaaaaatttacataataaagtaaaaaattataaaaatacgttaatacggaaacaaatttacgtttactttttgaaattttttatttacaaaaataactcttcaataaaaataaaaaattgtttttttttgttggtttataatttatttatatttgtattatagttatcatgagattttttttttttttttattattattatttttagttattttataatttatttttagttgtcctgaagttgcttttcttattatattttatttatttattttttttttaagtaaagtgtatttttgtaatttttaaattttacaagcgcattattataattaaaaaatttaggtgtaaaattataaaatacttataaaggaagtgtatttttttttttttgaatggtaaaatgcaactttattaaccattaaaatccgctaccaaggaaggtagcaagtcgaatggaacagactccatatcgaagatacaaccaggatataatatagaagctcttgcacagttatgagctaccatattagctgatcgcttaacaaataaaacagaaacagttttcagagcagataacaactctttacattccaaaataacttgaccaaagggggaaatcatgtctatagtgcttctaagcgcttgaactaccgtaagacaatcggtttccactataacatgttgccacccatgaccttttatccaactcaacgcttcccgtatgccaattgattcagcaagctcgggcgaaggcgaaccggaaagcaaaagtgttttaccttggatgagcataccataatgatctctagcaacaacaccacaaccatacttattactactattaaacaacgcagcatctacgtttaccttgattgtatttatatttggaacgacccattgctcagctccgtcattagtcgtgcaacccgaccaagacgtctcgataagagtattctgagctttactccattgatcaaggaaactcatggctgtgttcaaaatagaagtagcagtagttgatttttgttgccacacgaagtcatttcgagcgctccatatcgcccagcaaagaaccggcagcagcttcctttgtgcggcatcagcagtagcaaatgcctggatgcaccagttcaggaagttactcgcaccagtagctgcagttgcagtcccgatgcccacacggtcccagaccagtttgggttgtgtacacagcagtaaagcatgctcgattgactcctcagcgacacggcagattggacaaagggcttgcacatctaccctccttaatctcaattgtttcaacgtaggtaagcattccctaccagcgcgccaaaccagatttttaaccttgggagggatttttaacttccaaaactttgtccaaaattttgtttgctcatcctctagctgctgccatctgccttgtaccttttgaaggagcttgtaagcactcttgacagaataaaagcccgatgtttcatgaatccagtgtagtttatctctgccttgagtactatgcaacggtatgtctaagataagcttcttatctcgctcctcaaacaaatcatccaaaatttccttgtcccaactcccacctcccacttccataaggttgcacaccttactgcccaacaaaccggggtgtgttgactcaataaaaggttgttcctcacagggcagccacggttcatgcagtacattaatatcttctcccgatccaacacaccaacgagttccttttcttaccaagtcttgtgcttcaagaaggctacgccaaacgaagcttggattgttacccaattccgccgaaaagaaagtgccattagggaagtatcgagctttgaaaacctttgcaaccaaggaattcggacgagtcatgagtctccacccttgttttccaagcatggaaagattaaaatctcgcaatgaacggaatcccatgcctcctttagatttatgcatgcaaagccgatcccaagagaaccaatggataccattttttgccttgttagaaccttgccaccaaaacttgttcattgttttctccatatcacgggtgatgtccaaaggtagcaaaaatacactcatcgcataacttgggagggactgcgccaccgttttgatcaatacttccttacccgcccgagaaaggaatttcatctcccacccctcaaccttctttcgaacccgttctttaagataacccaagaccgctgacttgtttctgcttagcgtactaggcagccccaaataaagacttccttcccctgctatgaccattccaagaagagcgctgatgttgtctcgaacatccgaggtagtgttggtgctatagaagatggatgacttcgtgaaattcactttttgcccagacgcagcttcaaatttgtgcaaaatttccttcattcttgaggcttctaacatagtggctttacagtataggtaactatcatcggcgaataacatatgggagatgcgaggcgcaccattagacactttacaaccatggatgagacctcttctttcatatttttggagcaaggccgaaagaccctcagcacaaagaataaagaggtatggagataaaggatcgccttggcgaatgcctcgagttgggacaatcggacccacctcgtggttaccatgaaccaccacataattagccgaagtcacacatttcatcaacaacccaatccaccagtcttcaaacccaagtttccttagcattgcttccaagaaaggccactcgatccgatcatacgctttactcatgtctagcttaagtgccatgtacccttcttttcctttcctttttctttttaggtaatgaagcacttcgaatgagatcaagatattatctgagatgagcctacccggtatgaaggcactttgggtgtcggctactatatcattcatgaaaggcttcatgcgattcaccatgacctttgtaatagttttatacaccacattacaaagagcaataggacggagttgagtcatgtcttccgggttcttcttcttcggtatcaacacaatgttagccttactacactcactccgaaggtctcctgaggtgaagaaattccgaaccacattaaccacatcacgcccaactattccccaacacttttgataaaatgccggggtcataccatcaggccctggactcttgtcgggatgcatttggaagattgcttttttaacttcttcttcagtgataggagcccgaagctctgtatgcacatagttttggaccgactggcttacacaatcaataacctcttggcaagacgagttagaagcttgaaaaagagatgtgaaataatcaaacattacttgagaaaggccatgctcccaatccacccgaaccccattttcattcttcaaactcacaatctgattattcctctttctagttgatgctgccttgtgaaagtaattactattttgatccccttcctttagccaaagttgtttggctcgttgcttccaaaaagtttcacgttggtcaaggatccgaaacagttcctccttagcttctttgtgtctttgaatggatgccgagtctcttttattagccaactgttttaactccttcttgcaccgattgatacgccctttaaaattaccagtgacctctcttccccacacactcagcttctcagcacaaagagataatttccttgaaagctcaacgtcacccacgctatcccaacaatcccgaactatctccatgcataaaggttctttaagccaagcattctcgaatttaaacttacggttggaagggaagacattgcaaggttctggttctagaaaaattgggtaatgatcggaagaagagatttccaagttagaaagagaagcaccttgaaaatgactattccatgtaggattaaccaaagcacgatccaatcttacttccacccagttatttgaccctctccctttctcccaagtgaatggatgaccccaaagttctaaatccacaagattgcaatcattaagagcctgttgaaagccgtttattagactttgcgggtacaaccttccccctctcttatcttcttgtctcacaatgttgtttaaatccccaataacacaccatggttgagtacggtcggttgctaaggtccgaagcaattgccatgtttgatgacgaagagttcgaactggttcaccataaataccggtcaatttccaagctcctttgtccgaagcctccacaagaaaatcgatatggttgttagagtaaccaagaattcttccatcatcttgatgtttccataataaggccaaacctcctgaactaccttgggcctccacacaaaacaccccttcaaattttagcattcggcccactccttctaccttcactttattacatttggtctcacacaaaaaaataacattgggattcttttgagaaacaatctcttttaggaattgaatagcccgttggttcccaagcccacggcaattccaacttagcacattcataattcctggcgggcctgtgcaccagaacccgccccaaacaagttttttgtgttatttttccttgcatcagtgtccataatatcctctacacactgattcggcccattagtaacatcactgcccaagcccacatcagcccattgaccctctacagtattagtcacactctccacgtttccctccccttccatacgtcttcttttagtatcaattactaagatacttttttccttaataatagcactttcctttccaaccatattttccacatttatctcctccacttcctcatagtcaactggtacagctctttgttgtgatccttccaccaaatcaattaccattttattcttgtcattactcttcataactggctgattggaagatgatcccacgattgtaggagcagattgataccgttgggaagaattcccagtcgcatgcatcgtcggagtccctgtgtgaacgctgttgttctcccctgccgccttgtgctctgagaaagcaacacctccatgtttagtggccaccccagttcttaaccaccgctcccccgaagcgtaattcctcctcctcggcgctgccttcagttcaagtgagaatggcttcttaatctgctccaaaggagtatggaacaactgctcgcagaatcgttccgagtgaccaagaacgccacatataaagcaaaatgtaggcagtccttcatatttaaaattagcataacaaaacatccctccttgcttctccacttttttcctccttttcaatgggcagtcaatattaattcgtacccgaacccgtagataatcccgccatacaccaataaaatt

SEQ ID NO: 228789 - DNA, 4056 bp, Cannabis indica
taaatgtgaaaagggtttggatgaatttataaatcaaatagacaagtaattgacaatgtgaaccaaaacatacacaaatgaatgaaaaaatacttctgtttcaccccctatattttagggcataaaacccaacacttctaagccacactcgctcactagattggtgagacttaatagtttgttgagcaattaataagagagacacaataatttacagtagttcaccccctatatcacaatagtaatggagatacgtatacttagagtttgtaataacagtaatagactaagtatcaaaaactcctaactctagtgagagaaagtctagagagagaaagtctgaccttgtgggtagttttctaaatgtgaaaaatgagctaagagatctttagaattttgactggggtgtgagacatgacttgatagatcctttaaatagcttataaacagaagttgaatcacgtcaataagataaaaaaatagtgagttatggttgttttactcaaggcagttcaggtctcagtgcctaaattgacatccagcgcccaagctaacatcccagctcccaagttgacatttgacgtcaacttggatgatgtacaagtgtagagacttccaattgatttcctttgagattcctaagtaattgtttgacaacacttattcttttataggttctcgcaaagctggtcactagttctcaaagatgttgttattttgtagaaatgggagactccaaactcttcattttcgggagtgctagaaatgagcaatgcaaagttgtttctttgactgcatatagatcattgtacttgtgaaaaactagatagaaggtcgaaactgaatcaaattcggataagtagaacctagcgaaccaagccattttttgacctgggtgttcggccctttaaacaaacttttgagattctaattttggtacttctaaggcttttgaacttgagatcggggtctcctctcctgtttttgaccattctagattcaatggtcacatcagatttggcatttaagcaattacaggcagtgtcccagattgattgtcaacctgggcactaggccatatatctagggactcgtgattgtagttttctccccaagtttgcttgaatcttcgttatttctgatgacagtaaaatgaccaaagcactttttgcttaattggattggaaataatccaagttgacaaaatgtcaacctcggcgctaggcctagccccagctatcaacctgggcactgagacccagttttaccccttcaaaaataacatttggtccccaaaaatagttgaatctcactattttctaaagatgaagatgatgcttgaatgaattcctaaaaaactccattttttgtggcctaggttggtgaattgtcaacctaggcacaaggccagccccaagtgtcaacttgggcgcagggggaaccccaggtgtcaacctaggcactgagccctgttatttatgctgaagaactaatttttttccttcagaaagacctattttcaatgtatatggattcaaatcaaaagttagatctctgatcgaacacatggaatgtgccaagattgatagattgtcaaactggacgctgggtgctcggggcctcaattgctcaaaaatcaacttgctttgaatttaattctgatgcctcacacatgtctgtggtatgtctagttcatatcaaaattagtcatttttcactaagatggtcccaaaaactaaaaccatagttaaggatgtcaacctgggcaccgaatggaaatcctaggtgcctaggttggcttctgggatacaagttcgtgaaatttcaactcttgaaccttggattaggttgctcgatatcttcatggtaaagaatactgaaagatattgagttggattcaagttattaaactccaaagtcccatcccagagatcccaaagtcaacctaagcatagggctagggtcccttcctaggttgaccgctatgactcgggtctactcaacttcgtgacgtcatccttcatgccatgtgtcaaacatttatgtctatgtcaccagggaaagtctctgggttaacactaagaatgtcaaaattgatgcccatctggtagtttcaagcgaaatggacttggttcacgtcatcaagccaactcaacacatttataaagttgacataggggaaaatgttcacctagaaaatttctttggtgatgtggatatcaatgtttaacacattgcatgaaggattatgtcacgaagttgagtagacccaagtcatagcagtcgacctgcaaggggaccctagccctgcgcctaggttgacttcggggtctctaggatggaagtttggaattcaataacttggatacaactcagtatcttttagtattttgtaccatgaagacacataggaacttaatccaaggcttaaaagttaaaattacacgaacctgggacctggaagccaacctagaaactatgctttcccctggtgcccaagttggcatatccaaatagggttttggttttcggggctgtctaagtgcaaaagggtcaaaacttgcattacaacatcaactagacacaccacagatatatttgaggcatcaaaataaaattttgagcaagttcatttttgagcactcagggccccgagcacccaatgcccaggttgacaatctgtcaacctgggtgccttcgaagtatcagatcagatattcaacttttatatcttctttgtctatatcaaaaatagggaaataggtcttttgaggaagaaaaaacactttccaagtgcaaaaaaatagggatcagcccccaagttgacacatggggcttgccctatgccaaggctgacattttgtcaacctgggccattttaaatggagttttttcttagaatgcttccgagcatcttctttatttttagaaaatattgagattcaactatttttgtggagtaaccagaatttttgaaggggaaaaactgggacctagtgcccaggttgacacttggcgctggacccagcgcccaggttgacatatggttaacttgggttagttctgatcaagttcaccaaaaagtgttctgggcatttttcccttcataaaaaataatgaatattcaagaaaacttggagggaaaaccacaaactttaacccctagaaaaggggctcatggcccggttgacttggtgttgggcctaatgcccagggcccaggttaactttgtgtgaggcccagtgcccaggtcgataattaacctgagacgttgccttcgattgctcaaatgccaaaactaatggggccactgtatttggaatttttgaaaataggttaggagaccttttcctcaagtttgaaagccttggaatcaaaacaagatcccaagagctcggaagtaagtacccaatgcccaggttgacaaaaggcctagtgcgctagtttctgcttattcaattctgatgtcgtttcgaccgtccatctagttttttataataacaaagtttcatgaagtcagagaattcaaattcacaactttgcatttctcatttctactcactcggaattgaaagtttccagtctctcatttccgcagaacagcaacatctccaaaaaactggtgaccagctttgccagagcacaaaaactgactaagtgatgtcaaaatatcactttggaatcttaaagtacatccccttgaaatttttaaactttctcattgccgaggttgacgtcatatgtcaacctgggcgctgggatatcaacatggacactgggtcatgaagtgccttcagtaaaacagccatagctcactcaattttgatctgattgatgcaattcaacttgcatttcgaagataattcaatgttctatcaagtcatgtgtgatacttcaattacaattctgaatctatcgtcatcaaatttcaccccaaggaagttattaaaataaactttgggttacccacagtaggttccgttgggcattagatcatcattaactgtcaaaaacatctttttttttctatttttgtgggtctccttcacctataaa

SEQ ID NO: 228790 - DNA, 969 bp, Cannabis indica
tttctttctagaatattattatgatttggatgcaaaatgccaaatttgttttctacattgaattattgggtacacagtgtaagaatataggaattaagtgattttatacttaactgaaccttgtcttgtaaggttaatttacccaggtctaaattatattggatattttaaaagtaatttatggtataaatatttaaatttaattttttataataaaatataattaagttatattttaaaatttttgtaagtatttaatattatttgttaagttaataattatagaaaatttttaattgattaagattattaaatttttattttatttaaatatatcaataatggcacgtagatatattgatttaatttgacacttaatgatcaagtacttacagaaattatagaagtataatttaagtattattaccgtaaaaatttaaatttaaatatttatctataactgaggagagttaaattattcattttttaaaccttttaatttttgataatcttattttgattttttttagtatttattaaaaatttattataattagaaggattacactcatacaaagttatattagtcaataaccactaaacttaatttaaaaaccgtatttttgtaatttagagttttattttgataaatattgtatgttaactttctaaattatgtataattgtttcaaaatagtcctctaaattctatatctagaaaacaatcattagaaaaaaaatgttttaagcgtttaaacagggcattttgaatcgatttgtaaaatatgagggctaaatatatagtattttattaaaaaaaaaaagctataaagtctaaataggtatttatataaggtctgaaatattagtatatatttgatataagattttttttttctgtctaaaactttgtataagatttaagtagttgtaatatgaacttgtggagcacaaattatgctatattaa

SEQ ID NO: 228791 - DNA, 1468 bp, Cannabis indica
ctagaaagaatgtgctttctgcgaagcaaaggttctttcaaattcttgaaagagaggtcaacttctttttttccttcttacccttcctccattattctcagcaacgatactagttatcaggtcagagagacgcctagcccgtaagctggcggcccccgattgattaaccccatttaactagtgccgaaataggtcgggaatctgaaatgacggcacagcacaatctctaatgaattgggtaaaatttatattaaatttggctaaaaaaagttaatgttgtatttcacctcaattttataattgtgctctaataaattaggtgtaaattaactttatttttaatagaaaaatgtaaaaactttaataaaagtattaaattctgattaaacgtgtataaatcttattaaatgtataaataaaatgtaaaaaaattagtaaattcattaatgagaagcaaacgagtaaatttaaaagttatatttattatggtgtaaaatttaacttatattatattttgtgttaaatttaaacgacatatgctaaaaaaatgtatatacactatatttatagtattccattaaagatcctagcatcaccatcacttactttaaaatacctaaaagcaaaaaatatatagctatgagcactctcaacagcttctactattttaaaatatatcattaaaattttaatttatctattttacatcataaatttacattatactatacatcagtttctttataattttttccaaactatttaaatacatatatttataatacacacaaataataaatattatatattacataatatttatttatttttacacttacagttaaataaaataaattataaaaataataaaaaactataattaagcattaaaaccaagataactcttagctacatttagctaaatactattcataatgtaaatttttgagttattttagctcatctattagatgtgtaactttttaaaaaaaaataaaaagagtaatttacggtgaaaatatctaagttttatataaagtagcacttaaatacctaagttatttttttggcagtaaaaataccttctgttacactttcgttgtagcagtaggtaccttgccattaactgccacatagattgccaattgtccacatcttattagcccaactcattcaaatcaatccatatcatcaaagttaagccatgtcactttgttaaaccaattttgtaataatattaaaattatataaaataaaaaacattaacaagtttaaaaataataaataaataaaaaatcttcttctcatgggcttgtttatctttcttcaatctatttagtcactaaactcactaactaccactttcagcaccaccgccggccaaatagatctgatcaccaccagtcaaatgaaaccctagaaaaaattgtctctccttcacctgctctctctctctctctctctctct

SEQ ID NO: 228792 - DNA, 1644 bp, Cannabis indica
ctttggaggcaagaaatttctttccttgtcaaaattgcaaatgaagatcaattaattacatattttcgatagttaaaatggcataacaaactgaactacatagtccaggatatgtacaattatttatagatatcttttggtattagattgtggtgcagatctcttgatagaagtttgagaaaagttatcttagacaaaatatgagattggtttacagtgtaagtttaaatatgagtatcaacactttgtttcattttcatatgcttaaacattctacttacatatttgctaaattgaactatatctctttctcattgaacctaggtatttgaatcaaaaccagcgggtagcttttgtcaagctccgcagcttattttatgctctctaacttgtatttggtgtatctattcatccccaacagttttacgaacaagattaccattgccatgtaaactcgctcgatgaaaagcataatagacataactgagcacaatgtcattgctaggtttagtagtggtgctatcatggaaaccctcaaagaatcccagttatagcttagacttgtagtaacatcatctgtcactttcacctcaggcttttggaaaacaagatttctcatgataatgagtttttctagcaagaaaaagacagagcctgaaagggattgtatcttgaatttgtgggacaagggcagcaatttaatgccaggggatgcaacaggcaggtataaagaatctcacagtaaaatgtgtacaataagtagaatgtgatgattgttgaagataagaggaagacatgaattggcttaggttgaagaatatagtacaatgaatgtaatgtattttgtactgttagaaaggaggtcttaacttatatggaagacaccaggtaatcatgccagtgacttactgcaaggtatttgatagcttgaaacctgggtagttccaacaatgcaaatacaagctttggaaattattttactatggatcgtgattgcctattttaaattatttactgagcttgctgtcttgtgaattttatgttggataggtgcaaaaatcaagttggcatatctagtttcttatctagtgcccaggtacttttctgtatcctttttaatttcttgtttcttaatgaagtataatactaaatgtcttctataactctggaatccttgctaacttttgtgaacttagtaaccgtagaacgtctattaggaaactagaagaaaatgtagaacactaactaattacaattaattttaatgaattttttacgaacaaaatgacaatcatatctcaatgtgtttaattcgctcctagaatacgggatttgtaacaatatgaagagcaacttgattatcacaccacaattttgctagaattgtagtctcaatcccaaattcagtcaatagataaatccacactatctctcacacaaaatgtaccataatttaattttttgattttgcactgaatctagacacaacattgtgcttcttacttttcgaagagatcagattgcccctaacaaagacacaataacatgaagtggatcttttatctaccttggaacttgcccaattgtaaacaatatctcgtcttggggctcctttcaagtaatacaaaatttgttttaatgctg

SEQ ID NO: 228793 - DNA, 1506 bp, Cannabis indica
taatgtagcatagctctcccaactaccctttgtggtccaaccttagtaggacatacaaatttcagtgcaaagtctgtaagcctatcttgtaacacaattttgagcctaatagcttcagaattatgctatgaacaagagacacgcataaagttaaatgaagtcatttggataaataattgagagagttatgtctattttaccaaagggctgtaagtacatttcagctccaaattcgacttgtgccacgtcatcatgcaaaaatgtggcagtgttcggccatgcatgttctcgaacacttttgggtgtgtttttaatttttttatggtgaataattttttaagttttcggatcctaaaacctcatctcgacctttaaaatccaaattacagacctcttccatcttttggttccaaaagatgacagtgctaggctgggctattgggaagcattttgtagtgtttcttccttggtttggtcacatggatgctagaaaactacacttatcaaattaattcttggccaattggtgggagagagcactgccatcttttaggacacaaagatggcagtggtcgaccatggggtttacacactctttggagacttttctcgcttatttttggtaccttgatattgaaaatatactttgactaaagaaattattcaccaattgatgtggccgactactgccctcttttgggacacaaagatggcactggtcgactaggtagttttctacactactttgcggcttttctcacttggttttgatgtcttgatgataaaaaattatatttgcaaataatctcattccccttacttgtggccgacctgtgccactttattatgtataaagatgacattggtcggccatgcttgatggtgcatgagaaatggttactttcaattgtgttatactccttggtattacaggaccgcatttggaaaagttcatttagtgatttggaagtagagagcactaccacctttttatgagaaaagatggatatggtcggcccggccatgcctcagggaatggtctcctagtgcaatgttgactttatgatcgagttttagcctttctatgcctaaatgtttcaattccttgttggattcattaccagattggggtctctaggatgaaaacccttccgtgggctcttaaactctaggtcgggcacccttgggtgcgagtcctggctccaaatgattggttagtattttctcgagtctcctagatgtgccatggggccctcaaatatgatgtcttaactcatttgtctttgttaagtcatggcaaagtcacatagttgacttttaatttctcaaaaatcggatataataagctatgacaaagagaatattagagtctttccaatgccttcaccaacaatagttgtggaacccgatgtgtttttgcgttcttgattcctcatttcttcaggatgcttggttaactctttacaattctgcctaacattttcttttttgtgacaatagtagcac

SEQ ID NO: 228794 - DNA, 1764 bp, Cannabis indica
ttttttccttttcctttcttttttctatttcttttttttatctatctttttattttggaaggggatcttcatttggtcaattttttagttgctttccaaattttggaccaccgccattgaaatcattattaagacacacactacttacattttgttgaagaaggaagtgcctgtagtgtcacgatagataaagctgactttccatacatatattaaacataaaacgacagacaataaatatgctcagtgtaattaagtcaatttaaagaaatgaaagttcaactgactcatccattttcattttctttcaacatctttgccattgctctcatatattaatcttgtaacattaatatgcatatatacataaatatataaaaatttgtttgtatcgtagaatatgatatatttccatgaagaatgatctgatttatggtgatgatgtacaggttcctgttagacagtgctgtgagattttggatcatggaagtgtaaaaaacggggtcatgcagattagaattagaaagtgcagaccaaaggaaactattactttttagagagagagagagagagagcactattttcataatattagagaagttagtgcctcaacctcaagtgaatatctactttacttcacaccactaaaaatggcctaagtgctcttagcaccacagcacctcgtataggctctaaatgtctacatccatttgaaatattgtcttatgtgacttttatgacagaaaaggtgctaaagctcgtgtataggattgaggttgcttacatatgagatgtaatggagaaggaaggtaagaaaaaggagctttcctgtagctttgaaatctctactttaagtggtatgtgactttatttttggggagagagatggttaaagaaaagaataatcaaagaataatttaacatgttatactctgtaatggcatctatgctacacacttgaattgtggtcctcgtttattatcactagggaattaatagcttatacagtgaattttggattatatggtactttttgtaaagatgaaaattagatgttacatggtatttatttagcttaataacgttccatttctttttcaatattgattactttacaggtgtttataaaatattcaatttaatataatttgcacaatttaattcaatttaatacgcaaagtccgtctacaatttgtgagttgaaaattttaaattcaatttttaaatatggattgaatgttgtttgacgtgtaaaaataaaagtaatttgcggcataaatacctaagtttaactttcagttgcaaataaatacataagtttaatttttggcggtaataatacttaagttatatttttggaactctgtaggtacctaaccgttaaatattaagtcattatctacgtgtcattttcttattgatatatttaaattaattttttttataaaaataaaaatttaataacttagaccaatcaagaattgccacgtggcaatttactttcttggttttgtaagcctcctccttgaacctcttgatgaattttttcaaggtttccattggtagttttttaatgttagttaagacactaacttcaaggtttatcttcctggctaccacattatgccttctaaaattagtttgtaatttattccaacaatttgcaaatctcggttctaactttctaaactattcctctatagatcctcctaatgttaatgggaaacactggcatttagcgttattactgaccctcataactgt

SEQ ID NO: 228795 - DNA, 1294 bp, Cannabis indica
tgttttacttactaaatatactgacacatattttatattaataaaacaaatcgttcaaataattatactattttaattattaattaaaataaaaaactaaaatattaaataaaactaacactacgtggcttggcatatatattatgatagtgacttagtattttaaactaagtaatttaatctaaaaataaacatacatttttactaatttaaaaatgaacatatattttagtaatttttataaagtgattgctatattaattttttttttttttgttttttaaagttgtttagttacactttagttgataaaaggtggccctatccaaattattacaaggtaaatcattttagtataataagtattatgttgttttgatgattatgattgaataatacatgtaattcccaaatatatatagtaaatatcaatttaaattattcttttagttttaagatcatgcttgcaattttacttattacaaatgaacttacaaaaggatgtaataatagcaagggtagcatgatagagctataatactgaatgttaatgataatagttgatggcatgttctctctataagacaataagaagtgtttccttagattattagttacatttcaattttccactaactaatctatttatttctttagaagctctaaaactttattaggaattttaaaatagttttgtgaaatttaaatagttcaattaaataattttatttagaaaaatttaaaaaattttaagttatgatattttcaaaatagatatatgatccgcttttagcgtgatgtgttattaaatttatactattttgtaccattaaaatattatcaataaaaaattaagtaaagagtcaaaccaaagggatttccctttgggagttgactctattacaactatattataatatttttcgagtttaaaaattaaaagtagttattacttttaaactattttgtttgcaggttctttttcagttttgcaggcaaaaacagttgctctactagtaggtctctgttagactcaagttgtgggattctttgctctcagttttggaggattagacagtgtatttgaatgaattgggagtacatcttttctgataaaaaagttttattgtttaattttccagagacatctctctcatatcagtcgcaactttaatattgaagctcataaataaacatgcccttaagataatcaatcaactttcttgaatagaaaaaactcccccacttactgtgtaattttatttccttggttattttacaaaaaaaatatata

SEQ ID NO: 228796 - DNA, 1613 bp, Cannabis indica
aaaaaaaaaacaaaatttaataaaacaaaaggaaaaaccctaatttttgaaaattatgaggacatgattagagtatggctaaggaacacgaaacgagcgtccaaccatggtgcacgttagaggaactcttgctagcgtgcgccgttaaccggcacggcaccaagaactgggactccatcgccatggaactctccaaccgaactgaatccccatggactccagatacctgtaaacacaggtttgatgaactcaaacgacgtttcacttcacgaaacgacgatgaatcaacgagtttccttcttattgttgaccaactcaagaagattcgcctcgaggagctccgccgcgaggttcggcgacgcgacgtttcgatcgtgtaaatatcttcgttacagttcgagatctgagtcaggagtttcggtttttgtttcagatctaagaagtcgagtgtttgttttttttttctcaacaggtcgttggagttgaaggtgaagagattggaagaagagagagaaaagagtttgaaagaagaaaacgaagataagatcaatctcgaagaaaacgaacgtagattgaactcaccggagaataatctcgccgtgaaatcgaattccgattcttgcgaccgcgagaatcgatcttccgacgagtctaattccacctctcgacgaaacggcgccgtgaaatccgaaacggaacccgaaccagagaggataaatgattcggatcctccacgacccgaatccgaacccggaaaagtcgttaacggtgatgagaatgagactatggcggcgcgaggagaagataatacgaaacagagtagcgatgttcagagctccatgagtttatcgaagagtaaacgaagccgtaaaaggagcggcgccgaagctggagccggagccggaagcggagccgccgctgtaagcagtagcggcggggaagagccagaaggtggtgatgaggtttctcccgccaccaaaaatcgagtctcgggtcttaaatctgagccgttggttaaatttctcgggaccgttcgatctcaccggttcggttctgttttccatcgacggcttcgtacccaggtacttcctctctttctttatttttaatttgatataatttagtatttaattatgtttttttcaagaaaaaatatttaattgaagatagagtaaatttttttgttttcttgtagtaatattaattaagttcgatttttttactgtaataatattttatttatctggccgttaaagcattaaatttttattttttttaaatttttttaaaatatacaaaaaaaaaaaaaacttaaaaacaacaaattatttaaactaaaattaaaaataaataaaagtaaacatcataatcaaaaaaaattagaaccctaacttgtctatctacttgattaatcaatcctctttcttaactcattcctataattaaaaaacgaaattattaatttggacgaatgacacgtaaatatttacgtaacacaaaacggttgagtgcagaaatataatttaaattaattactgttaaaaattaaatttaattaaacaaatatttacatgcaaagtctcggtaagaaataagataataagatggttcga

SEQ ID NO: 228797 - DNA, 956 bp, Cannabis indica
acatccaacaatcacaagcttcattggggtaattggaagaaattgtgtaaacttaaggagcatggaggtatgggttttagagatctagaagattttaactaagctatgttggcgaagcaaggttggaagctaatgaccgatcctaattgcttaatgtctagagtgatcaaagctctatattaccctcatggtacttttttagaagcaagcttaggtcactaagggtctatagtttggcaaagcattatttgggggagagagatattacttaaaggctcccggtggtgtgttggaaatgggtgctctattcgagtcaatgaagatgcttggatcccaaggggaatcccgttcactcttcgttctaaagtctttcttccggaaggaaccactttagactagttgattaacaatgaaggaaattggaagatagatgaaatttatagctggtttcatattgatgacatccattgggtgttgggcatcattcccatcatctcccaacccgattggctctcttggagttcgaataagaatggacaatattctgttgctagtggatataagttacgttttcttgacccaaacattgctggctgttcaaacattacccctttaaaagcttggtggcagtttatttggacttctaaactcataccaaagatgaaaaacttcatttggcgggtgttcaatcaatggattcctacgaaaaaggagcttacaaagagaggtatgtctttagatactacttgtgtttggtgtaaagaacatgaggagaatatatgtcatgccttatggttttgtcctaaagttcaaaagatttggaagctagttgggtttgataccaagttgtttgtgaaaattacaacaactcctgattttttgtttttcttatgggaatatctctctaaggacaaactaatacactttataggaatgtcttggctcatttggcagcg

SEQ ID NO: 228798 - DNA, 1460 bp, Cannabis indica
aagctcatcaataaaacattagtgaaattaagttttttttgagtttgtagatattttgagactttaaatttaaatttttttttttcaaattatttgaatttctatattgacatttgacctttttagtttaatttatattctataagttaaattattacctcattttttttatatatatattgaaaattgtttaattatttttctaagtagaaaagttcgtacattcaagcagaagctgtaaatttaatgataatttcttagtcattcaagcagaagtattagcattaatgatcataacattcgattttgatcacacgcgcttggtcttcctttttgttatgtggatagatcaaattgtttagctttaatttttgctctttcaagcgctcatccttttataatgagttagattgttttttaaatgatattactagtttgtttttcagtttttatgtggcaattttagttcaccttcattgtataattagtaacattgtttataaattaattgtgcatgcattaaggtagatgagaaatttgattgagaattaccttttctcattagatgtattaatcttgttgttgtaaataggagattaatttttattaaaaaaataattgtaataagctataatatataatttttgcttgaattaaacttcaaatcaaaaaaataattttggttgaaacatgacttttcaacgtattttttggggccaaaagattagaaagtatggtctagtttacgtgtttttgattggttgtcattattttgtatgtacgtgtaaagtcctcttaagaaaatttatccctatattattcaaagttgttcaattgatcctctaaaaaattggtgattaattttataataatactcccgttacaatctctcatactatcataatatatcttcaataataaattatataaaataaagttacacatttatcaaatttgaaaccaatatagtccccttccaatcattcaaaatgtcttttattattgttaattaatccatttaattaagacttctttcattatcagctgtctgctagttgttacccaaaactacccagcaccgtggtcaaaataattttactttcgtcaatcgaaaatagatcacaaaataatgagaaatgcaagtaccaggaaaagagagtcctctaacttcttaattgatccatgtagccgaagtctttataattgtgtcacaggacatacatcgaccagaccattatcaacatatggcgaaaatttcgttacttatctcttttcttctgtgtaatatattccttctagttgctcaacaaaccacagcccaaccgccaagcttcttattccaattttgtctaaacgacaaaggtaattacaccctcaacagtacctaccaagcaaatctcaatcacctcctcacaacacttcccacctcccaaaacgacaatggttacggcttttacaat

SEQ ID NO: 228799 - DNA, 1800 bp, Cannabis indica
tttaaaaaaaaaaacagaattttgtcagctaaaaacataagattgaaataaactaacatgtataagaaggtaaaagaaatgaaaattcattactaagttactaacaacataattatcattgacattttagcgagaagttcaaacatatgcatacataaattaatacctttgtacagattctgcagtattttgatgacaagagcaacctcaaccatatttttgcgactctgcccatcatcatctttctcctctcttccaccaataacatttataaaagaataagtaccgaacattgatcctggaagataatgtttttcatagcttttccttgtaacattaggtgcatccagaatctggttatgataaaattttgaatttgggaaagaactaattgaaggatgcattctgtactgaatatttaggagatgccttgaatggttttgggagctcaacctctgaaacaaacttcttccaaaactagcttcctccgaaatctgttaaagagagagcaatgcggacaataaaatatacattaattttttaaaaataaaaaacaaaaagagtagcaattggaataatatacatactttgctgttaacagtagctggtaactgccattcatcaccaaaaagaaccgcatgctttataccaggaagttgtagaggtatagttgactcacactctttcagttgtgcagcttcatcaatgaccaaaacgtccaatggctcgatttttatatggtgcagcttaaaagaactcgatgcagtggaaaatatcaatgaagctctttgaaaacagaactctgttattgcttccttagatatgaaatttggaaaagtaagttgtttaagggaaccatgaagggttctcaacatagaaaggcacacatttctgacagacagcaaataagaattattcgcaaatgaatcagtagaatcatcaattacttcagcacaagaaaatatcttttctaggtcttcagaaatcaaactatcttcaaacaaaagtgtttcaaaacgatcaagtaactcagcaaggtttgtcatgttgtgaaagttttgatccaaaatgtaactttgtggtaaatgtgtacataagatccaaatgcatttctcaactgctcaacaatggaaacaaatctttttcttcacatagtcaagaaatgattctaacttctctgtgctccctttctctttaattttactttcagagctttgttcttgttcttttatcaattcattttccaagaaaacatggtactgagaaacacaattttcaagaaagttaatcatggaagtgaagcaattgttccaaccaagtggtcctaaacactctgtgagcctttggattcgatgttccaaaaatatatcctcaatatctgacccaactttgagtctctccttattgccaaacagaagaatatctcctaatgaacagaacatggattcagattctgtaactatcttcaatacccgagaagccacttcggttattgcaacatttgttggtgcacaaacaagcgttctatagttcaacttcattagggaaacaagaagagtagcattagttttcgtcttccctgtcccagggggaccccatataagctcaaaagcatctctgttctcacagtgcatcatgtgaagacaggaaagaactgcactagtctgagactcattcatattggaagatagactcttcaccaacttctcatcagatatgcaacaattctcctcaaaacaggtatcacaatctttctttacctgttataaacatatataaacaaatcaagtgaggaagttt

SEQ ID NO: 228800 - DNA, 3574 bp, Cannabis indica
tagtagttttttttttttttttttaaaaaaaaaaaaacaaatactatctgaaatattgaattcaggaaattcttcttttcttaactccagaagactttgtggcgaaattagtgctgttttgaaacaaatatttgcaagggagagatggtagagccaatttcggttataatatgtcaattaattaggaattagataaacaaaaacaagtgagcaaaaaagatctaaatcgggatcaaatcaagttgttggtgtaatttgttggcttggccccttctaccaaatgggttgtgcagtgtgttgtttatttttctctctctctctctaataaatatatattttgtagaatatgtgcaatattacattgcatgcatcccctttataataattccaaattatagcatcacccatcaaaaggtatcattgtctatgaaggaatcttcaacaggaatggttatacttgatggggccaagtgcttattgtgttgctttgagctaagccatgtgactactactattgctactagccaatgaaattaattagaagatgcacatgttattctattctctatgctactaataaaaacgacaaaagaaaaagaattactccccctaataagatttgaaagctaatcagtgagagtgtactaaaaaacaacaagtagaatcataattaatacgattaaaaagataagaaaaaatatcgtttgttatttaatgagaggttccatcattttcattcacctctgtcaccaaacaattaccaattcacataaaaatattgcaatggagccatcaaagggtgggctctttaatgatttacattgtctataagattctctccattattttgtttgtgagagtgactgttttgccatgcatccagataaacataataacaactgattgtgttttcttagtgggatatgccttggttaggtaaagatataaaatcttaagcaaatttagacaattggacgaataggcagtgcttgaagaccacataatatagtcaaacctaatgaaataaagaaaaatcatacatcctatttgtttttgacttgattataccaccttttagatattacatattatgtgttttagttttgggggtattcaatcataatgttcttctcaaagtagtaaagattaggcaccattatgtaatttatatgttcaaatagaaatatatttagacttctggttatatatgataatagttaaagtacagattattgattcaaagtattagaataaagacatataataatcaactatttcttttatttaattttgggtgaaaactgaaaacatcgagttaaaatattttgtagccgaaaaagttgtggcaacaaattgattgtctctatgataattttgctttaaaataatattttgcaaaattgtatcagtattccaaattcctattacaagtgcttacaagtcctaatctttttttaagcatataaatataattaggacagatgtcacaatcgattttggccagattctcttttgtgtacctgttctgaaaaggaaaaccaaaaaatgaggtaccttgttgatgtggtggtgtgaggataatgttgattttactagtgtcaacttttaaaaaagaaaatttaataaataaataatttcttaaagcattgaccataattgcaaggaataacgaaggaatatatagaattgtattttattctcacaaagataagtccggatcttgtcctatatgttgtacaaccaaaatccaaaacactaccacctactaattttaacaatattgaatttaatctctccttcacacttaaactttcaatttgctcctataagtacaatagtagcttttatctgagggaatcatttccaaaaactacactcatgagcctaaaccaaaagtctacacataaaactaaaaataaaattaaaagttataaaaagtcataatgcctattccattttgactcattctcaatggtatttttttttctctctcaaactccaagtactcattctcattcatatgagggcaagaatcgagcatcggatacgtcaaatatattatatattgtacataaggaaaaatatctttaagaacacatttggtaggtgttaaacacgtcatatgtactatataagtaaactccatcatatttagttcataaaaatttccacggttgcaattatgtaatgtaaattccttcatatttagttcataaaaatttccacggttgcaattgggtaatgtgaacgttaaccctgccatattatatatagatttttgcacaatatttcagtcaatttcgcttgcatacagtagatgtgaaacccaatcaaccaaaaagaataatagactttcaactatgttgtgttgtgattaccacttatgccaagttcttggtagctgaatacaaagcattcattttctttatttgagagtcccacatatggggcatttataattggtcttcctcgtgacaattacaccaccctcttcatcacatcatgccttgcaatgaatctgaaagctccaaaacaaggattagcttcttcaactagaggcagtcttgtttattgtcaaatttgtatgagttattttcaagagtaataattattaattaggcaaaaccagacatatggtttgttattgatatcgcttcttagcaacgaattcggacattaagagttggattatgattctacatttagcatgcaaacaatgtgaacctgaggagggtacccctgaaggagtcatccgtgaacggaatactaaggggtgtccgggatcacttggtgtctcaaaagctatcccatgtgacactttctgacacgatcttgtgaaattaaacagcttgtcccatgtatcagaccttggaaaggcacaatgtaagaaagaaaattagttttttaagtgaacacccattattctaacattccttcctccccacaatgacacatgcatcgcttgtcattgtcaacattacaacaaggtagctcaaactaacttgcgcttcatctatctaacccaatagctcaaattatattgtatgttactctatcagtggattttttacacaaaaatagccctaatgggtctagattagtgcgctccatctaggaaaaatgcctataaatttagaattaaacttgcatgcaaagggttacgaattttagtttttaaaaccaaaaaatatattgtaatctccataaccaagagcccaataacagtctcgtagactaaggctcattagtactccaaccacataaaaattttgtcttattttcttctagtcatacattttttagcttaatcttcattatatttggttttgaaaaacttagtagatattttagtattttcattgagagctgaagaaattcatcaccatttttgtcatttacaaatattgtagcaacaagaaacacaatcgtacaaccagtcggtcaaatggcatgcaacaatggtgaaaaccctaacatcgtggaccttcctcctccgtcggatgctcaggcagtcgttgtgagagagggagaagccttagcagtgggtgacgatcatatataaggtttcattttt

SEQ ID NO: 228801 - DNA, 1275 bp, Cannabis indica
tgttggtaacactgtaactacccttaaataccttacattgtactaacacccttggtactacaactattccagtgttagtagtgtaaacaaataataatatgcattcattcaattatatatatacttaatgctaatcttaccttgtttccgtgctcaggtgtagcggtcagcctgtgtggtcagcaactcgacgctttacgggccctataacacaacactcgtaattctaatgagaaacacgctaaaacactattcgggaacttaaagtcaaaactagaaatttccctatcgatgaataacatggcaacatcctaaatgtcacaaaaaaggaaaaagctagagtttgcaaaactgccccaactggtagaccggttccccaaccggaattccagttcggtggggttttctaaggaccagtcggtcgaccgattcctacagggccccctgaactggaattccagttcagtgcaggaaccaccaaaaatgtccccaacacctcaaatcaaccccaatcttcacaataacttccaaaatacctgcatatacctcaaataacccaattcaagcaatagaacccaacaattcacccagaaactcaaaacaccattagagaaccaagttgagttctctaacctcaattttgtacaaaccacaccacaacctactaattcagcttaaaaaaactctcataaacctaacattactctagaacacaaaattaaacaagcttcattaccacagaaccctaattctccaagtcttgcactaaaagttaacttgagcttaagaaaatcaaggagaaggagactaggatattataccttagattggagtacacaactctgctagaattacattgaaatgagctgaatttctcagttggtttcttggtgtatcggagagaattgtagagaaattctaggtttttctaaagttatgtgtatctaatatcaattacttaaatttagtttattaaatttgaatattaatgtccacaaaagacaaaattcccatagtaaaagactaatatgccccttgacataaaataaaggtaaacgtgccacctaagggcaatttagtcattttcaaaccccaataatttcccgacactctcaatgtctaaccatgtcgccctgctactaacaaaagtataaaccatataaaaacgtgactctttagtggctcaacatcgcattccactactaccagacaaaacacgatagacaagaaattcacacatataacttaattgacacattctgaattcaaataatt

SEQ ID NO: 228802 - DNA, 1550 bp, Cannabis indica
gaaaccctagtgtttcttgggactactacctatttataggctcattatataatgagttttaggtatttataatttggcccctcaacaaattataaattaatttatggtatcgacgcattatttccatgacaatttaatacccttttgatatccataatataattggtcacttaattttatatcacattttataataacatatacattatacatatgtgcccacgataaaattttaatctaacataaattataatatttaaataacgactgatgattttaatttcaataaatcaatttatgtcacactatatgctttttaaatatatattttttttccataattatttaaatataattaataaaactaaaatatataattataacttacatattttatccgaaattaagtctatatcacattcttcacacgcctagtattaaatagaaatggataagagaagagaagtgtagtgagtggtcacagctcatttaagtgtgtgtggaaacatattaataataataagtagatatacaggggtttaaccgatagagagagatatcatggcacgtggtttgtttattagtttgagacatttatgaagattgttggcagtgagtccacgtgttgggtgctttaacagcagggtctttgatgagagagagagatccttaattaatttgttgtttctatggttgtgctgctaatgatacatcattcttcttcttcttcttacatttcaatcacctcactcaactccccaatgacttccttctacgacatgcaggccatacaaaatattgataatgtagaaaactaattttatatataagatatacaataattctttttattcttaattaattttaagataaaatccggtatattttattatatactcactttcattttactttttaaatcttatttttactgctttcaaattcaaaaattgtatcaaagtcaaaataaaaattttcaaaaccaataacgaatttgttaaaatttgaaataagatgtataagatttcatttcaaaactaattagcaatgagataagtaacttattcatcttatagatgacaatttatttccatacattaacaatgtgagactaactctaatataccctcttcatatttgggtgtggaaagtgagtatataacgatcaacctttaagagaccacaagaccgaacgtgacatttgataaaatcccacaagactaaatattgagaaattcgtgggtatacacattgagaaatttttaaattttgaaacaggtcaaagaccctaaccctagaaattaccacacaatggctaaatggccaatggagattaaaggaaaacaatagaagttttgctcgtctttttggactggcaatactttagactcatatcacatcacaagtggctctgatatcatgtttgaattgttggaatatttttaccatgatctagatttactaccatgtatgtttttaacatcctaatatgaatttctaaaacaatgtaatttaaacacataaaagttatgagaaaccttacagtgggt

SEQ ID NO: 228803 - DNA, 4481 bp, Cannabis indica
gcgcatgcctcgtactatttcctgatataggagactgaactgacattataccaaaaaaaaaagcattgatgtcacttgtgtaatctgacagatatggaaggagacctttcgtgacatcatatggggacaaaactcatcctaagtcttttggcaacccacataagcgtactcaaggaagtccttggcttttgtagggtgcttccgttccctaaggacgcacttgagctttcattcttgggaataagaaatgtcatgcatactgatgctccatgtccccgccttgcaatagatatatccttcgcggaagcccctcacaggagccaaagtcgaatgcactaattagtagaagattgacttggcttcttccgttagatcccacgtgtcacacttacaaaaatctagacaacatttaccccccaagctttcgagatgatttgcgatccgagagcttgcagtgtttccttgctttatcatgattgattcttgacacgtggcgctgcttaagatctcattatgtcatgcaaatggtcatcaactgatatgtcacagatggaggatatcatcagcattgtaaactaacagcgctctaaattcagactcttacaatgtgcacgtactgggctcgtgcctttggagatgtcgaaattgtggcaagttgattgaatagatccctcatttaataaacactcttcacgagacatgccataatgaatgttaaatgttttggctgatacagtcttctcaactatccatttgttagatctttggatgctattttggtaaatgatctagttcgtttgctttgcgtgtaaggcactccacctagtacatattaaatacccatggcatcttcctcgcttcttaagtttcaaaattttcacttttcgcattagaggtttagtatctcgattcaaccaacttcttactaggaaaagctttatcagttaagccagcctcaaaatgcaacccggcaagacgcggctaattcgttccacatgacaccattgtccatcatttagtcagtgtttttgttgcttttgctagttgcatgaaacttcatacttaatgtaagaatattgaggtttgattagtgtgtattgtatacgagtccctgtactctgaaaatgtcgatctcatttgaataatcttgtaacgccttaactctcagggaggccacgtgtttacttttacaaacttatctctgactaatctattagtttaggaaaaagtgtagtttaattaaaaactttttgattaaaatagagtaaaactttcatacaaacagcactataatacgaggatcccctgtttataaattcttttacaacaagttataaaactgctattacaaaagtaaggttatatttccaaaaataggcaaagggttgatcctgcttcccggaagcgaagacacaacggctgatatgtacatcgctgggagacctttgactcatgggcaaacacaaattccatccttcttacctgcaccacgaagcacacgtgagtcagaataactcagcaagaaaagctactaaatcaaaagcatttaaaatgcaagaattttcatcacaacatagtatacctactcatgattcattacatattcagcatgcatgcgtattttaacgtctatacaaacacattcattacacattataagaaaatcatagcaactcataatcaacaattttatcatttcactaaatagatattcattcaatacataatcacatagtttcagtgcttcaaatatcactcttaccactcgttatccatgagctatgtatgtcactatcgttgcccgataaagcaaacgataagtaagaaacctaactgcggtttcaacgagtaattactcataatagtaatgactgtttccaaccctccccacttgttatgcacaagctatgtatgtcactattgttgcttgatatagcgaacgataagtaagaaacctaaccacagtttctggagtaatcactcataacggtaatgaccatttccaaccctcggtcataaccgaggcataacaaacacataaacaagatctcaatcataatcaagactataacaatcataatcgttcatcatttaatcataagtggtgcgaaacacttttcttacctcagtccaatagttaggtgtatgggtcaacctgagtggaactacgctcgacaatcttgggtcctatgttacaaaaataaagctcgataaacaacttattcaaaactccaaaataaccctaactttgtaaccggacatatctaactccccactagttcaaaataacttaaacatcactaaaataccctaacctaggctctgaaaaacagcctgaacaaaatcagttttgaggcttaaaactagagtttttcccctgctggcaaaaccagttgatcggtttcacagcacctgtaaaaccggttaatcggtttctctgcttgtggaatcaggaactctggtttttcacaccaaaaacaaccaaatctcctccaaacttgtcaaacttcccagaatagttcaaaaccataaataaatgtatcccaagcaccaatttacaataatacatccatttactcaaaatggcacactcaaatgaaatcaaactcaataatcttcacctaaaccaattcaaatcaaacagtcactatttctaaccaattaaagcttaaacaaattttaaatcaagcctaaaaacacattcttaactaaccttcacatctaagccctaaaatcttagaaccctaccccaaaactcaacctatatcataagaaattcaatgagaagggaaataaatcttaactccaagcctgcacagcttctaaacctcactacttcaaccaaattttgcttgaaatggagttaaaatttcttgttatgcttgctctctagggctattgagagaagggaacgagaagaagaggttttctttatttttggttcattattcttatttatctctatcttgataaacttaataaagaaaaaaaaacttaattaatttaacctaaagttcagcataaaaaacactaaaggacaaattctaacattccaccataatgaccactttttccctccttaaaaacttaaacctagaataaaacctaagggtaatttagccttttttactcaatcccgtcaaaccgttaacttaaagttctaaattaatctagtacaaatccaacataacacaacctgattgccgtaacatttctgaccaccctattgagtttccatgactaacgaacccgaaaatattttattttgaaaatagtatctacaacacccctataatctgataaaatctccgtaattaataaattacgctttatttattcatttactcatatttcactaattaactcgtaattaggttaagtaagattataatcgtactcaaatgcccacataatcacatatttaataaaatatgtctgattaaatatcattatattttctgagatattacaactatcccctccttatagaaattttaccctcaaaatttatctaaacaactcgggatacagctcccgcgtctgcgactttaacttcgaagtcggctttcaatcttgttgttcttccacaacactttaactagcgacataatctttgtcccgcaacactttctcttttctattcaaaaatctggaacgtctgttcctcatacgacaagtctgtttaaaatttaataatctcgtaactccatatgtggatcgtatctacctcatacttttgaaacattgagatacatgtgtaatctccagatatagcagggagcatggctagctgataagctacctgacctaccctttctagacactcaaacggaccgataaatctgggatttaactttcctttctttccaatttctgtgttcccttcatttccttctataaaatatattgtacggtgccacatcaacagtactcttataactattattgtatgaaaactcaatcagagggagatgctcatttcaagaactctcaaaatctaatacacacgcccccgtagcatatccccaaacatttgagtaattctctgactgactatcagtctgacaatgaaaaactatactgcaacctatcttggtacctagtgctcgttgcagactcctctagtatttggatgtaaactttagatctcgatctgaagcgatcgacctaggagtaccatatagttgaaatattctcgctgacctttgacactctgccttaacttgttgaaaagttagacatttgacacatattccacaatgtcactcttcatacttgaccaccgactacaggcttttctttatactcctgtagttatggatcacttttttgggttgtcttgtttctttctaataaatcatactatattgtaatattgattcactttagtgaagttctcttcatttcataggcttgccctagacccttttcaacttggagcatcccctaccacatttacttttctagggtggtagagaatc

SEQ ID NO: 228804 - DNA, 888 bp, Cannabis indica
tcaacctagtgtgttggtttcaatcacttaattgcaaattctaccccgagaattctttctgaaatggttaaaaatagagtaagagacctcattctcaagttaaagaaccttagaagtgagaaaatagcatcccaaaagctccaaaagaagcctctaatgtctaggttgacatatggctttgtgcattgggttctgtttatttgattttgattccatctcgatcgtttgtctagtttttcatagtgactaagagttatgaactcagaagagtcaaattcataacttcatattttcatttttttggcaaagtgacattcagaaatcagggagttttgaggttcccatttctacgaaacaacaacatctaaccaacttcaccaaaacacagaaattgcctaagatatgcccaaatatcacctaagcatcaaaaaatacatcaccaatacattttcttactcacccagcatctaggttgacgtcacatgtcaacctgggcactagatatcaacctgggtgctgggatgtcaacatgggcattcgacccagaacaacctttagtaaaatagccataagtccaatgatattgatctcattctcacgattcaagtttagtttcacagctatttcaatgctttatcaagtaatgtctcacactccaataaaaattataaatttatcaattctaaatttcatctttaagagagttacaaatttaagcaacaacttacctgaagtggatctcccggacgcaactcatgtttcgaaagttgatgaacgacttcgagagttaatttcaccgctagatcatcatcaacagtcaaaaataacctaaatgctttttttttccatattttttggattattatattattattttaataggacctc

SEQ ID NO: 228805 - DNA, 991 bp, Cannabis indica
cctcctcctcctacagagaaggtgatttattattatttatattgtggggggttcttgaagttggttactcatattttggttatggtttaatggattcctctactgttatgcattttgatttgtcattttgcttcagttacttgtattgggtggaaacggatttgttggctcacatgtttgtaaagaagctctagatcgtggtttgtcggtgtcaagcttgagcaggtatgcttctttaccatgatcaattttatcctgtataactttttaggtttttttgggagtagaatttcaaaataagtactcaattgtttagtttataaaaatttgaaatagaatcatttggctttttttctatgaatatttaaatttatctaatgtagtcaatgatgtgcattctgtcgattttgggttgagatatcaccaagataatttagaacaacaaaatgaggtaatatgctaataatgttgatgaataaaatagcataatatgctgatatgctttttaaaaaatttatattatggatctactctcataatataaattattctcttgacgaacaatgatagcttatcaggtcagataagattatacttctttccaataactggagtttcaagtgagcacatgggtatttagaatagggaaatttgaaaaactatactttaaaaaccttaatattttattcttaaaccaatacatttcaaaccaaaaaaatatatgacacttttatctaaaatccaaaaatacccgtctcataactcaaccccattttttcccaacccacacatgcatcggaccccccattggacccgtcggacccccctaggttgcaatcatcggactggtgtcggccagaggtggggctcgactcgtggtgggcggggcggtggggggttcggttcgtggttgtgtgaggtggctggggttcgggcgaagtcgtagtcgcctgggcttgtatgaggcagctgggatcgggcgaagcaaaga

SEQ ID NO: 228806 - DNA, 3010 bp, Cannabis indica
cttgttttgaacatttaggagcaactgtacaaagacagtaaaatgaaaagctagcttcacatctgacatcatataacaatcaaaagagttatggccatagttaagagaaatacatcaatactatcatgccaaaaaagcattgtgtcacgctgagaccaatttgagtgattcaagacaatattaagattaaaagactagtcgaaaacgggaaattgagttaataggaacttttgttttcataagaaataaaatatgaggtgattgttgtttgacaagcaatcgaaggtgtttgaacgcactcgggttccccaaactctgtgtattccaactcaatatttttatgatgagttgcaagattgcaatgcaatctccgttgagttgtcaacaaacccatatgaatctatgtcatcataggaaacaaaatgactagagctttctccttgtgacgggggagaagcgtctatggtggagtattggtaacgtcatttaagaaattatctcattgttagagactcacattgtctctttggtaagttggaagggggacatttttgttatccatagtttgtgaaaaacttgtgttttgtgatcaatggagtaaatgttattaaaggtgtggacaaggggaaggggtcctagtgaagatgttatttgagatggatattgctgtcgggttggaggataggtggctatagggaagataggacttgttgcagttccaatatttagtgtgaaaatgtttgaaaggttagtggttggtgattggttgctatcatggataatggttatagttggtgtagagttataatgcaatggtttgtgaaagagttgggtagtgaggagggtctgttttgtgaatttgttgggttagtattggtgtctaaagtttgtagtgcaggtcgtggaggagcagtctgaggagggggaacaaggttcgtagatgactctcccccaagcaggacctgaggttgtggttgagtaatattgtgtaaacgaggtatagttgaatgaagagtggttagtgtaagacatgtcaaaagaagtcaagcatttcctatagagaaatcagttctatatttgtcgtaacacgtagtaggaagtttggctcctttcatccaaggtccataaagaaagtcgtcatcattacccatatccatacgctccatgaatttaatttaaaggtgtgataaagtaaaccacattcaaaataaaatttcggaagacgctcataacggaagcctatccaaaattcgtttctaatctttgggagacttatcattcgacccgaggaagtggcttgacaataaaaagttcaactctaatatgaaggaaaggacctcatccttcattaaacgaatcttcttgtatctctatgaattcaccgataagttcactcaaagcttttgccagagccttggacttacttagaaaatgcaagcaataaatctgaacctaaaatggagtagagattaaactgttgattgaaacattttgcaaaacatctggtgtgtgcattacaataagatgattttggaagtgctaatgttctttattcatcaccttgaatttgtcccctacacaactgaaagagactttgaacaaatcatcaccatagtcagaaattacagcagggtaatgatccttccaatgtccgctcatctgatcaatgaatgccgacttatggaaatagttgtccgtgagtactctgactagaaaaacatgattggaatgtggagtcggagttggcgcgacatcttctggaagagcaaagaccatgctctcttcctcagttagagatagtgttgtgctcaaaaaaaattaatgagaggatccataatcaaaagacagcagttaagggggtgtaatacggaaaaaataaggaaaactaaaaaaaattgggtatgaatcgaagaacagagaaccaaaggaagatgaaccgtaaagaaaaaagagaaggagatgaggaaattcgaaaaagaattagttaccaagagaaagtttgttaaaaaatcgtaactgctatatacccattaaggcacttttggtgtgggatttagactataaaaggagatttatgatgattattagcttggattaaggagtatccttcttttctatatattaaactctaattgctactaataaaagcttactttcaaagagaaagaaaaaatgtgacattaattacatggaatttcaaaattctatatttatatattttgtgttatttaagaggcacaacaagttcatttgtctcctttaaaccaaccttttttttctttcttgaaacttccttttaaccaacctttataatttaactagtatgaccagttcccaatttatttattaataatatattattataaatgttaccatgttagctaacacaccctccaaacataattaatgaaagacaaccataaacaaattgaatcaaataagacaatccaatttatttagtttattaggcggtgggataagaaattaaaatagtagaccgacaacatataatttgactatgcatatcgacaggctttcatagctttgtttccatgtgatgtgttgcgagtatatcttcatttagattttttctcagataattgaacttgagagaaaggtatctccagtgagcactaccaagagcttctttattctataatttaaaattcatgctctgctgcaactcctttgaaggtaccctcaggtagctaaagttgctgctgttcttcaatggatgctcacaagggaaaatcaacctctttcccttgctctgtactgttggtgtttggcaataaaattacctctcttcctcattgcaacagataagattgcctccaacttgttcaaaaaataaagcacaagccgacccagccttattcagtttaatctcaaacatttgttgatgtcttatcttcatatcctaatgtatttctctattttgtcccaaggaatggaaatgttagataaattaacaattaacccaagatctatttgtatataacatagaaca

SEQ ID NO: 228807 - DNA, 596 bp, Cannabis indica
ggaatctttgtcaaggagcctgcgtttctgttgtacaagcttgaagttaaatttgtttatgctgagggcatgacagatgacctgggggttgatcccaatcatgtccttatgcgaccgagaaaagatgtcttgatttcttctaaggcaagcaatgggcatcttactcaacatctccgtcaggtttgttccaatcttaacaaccttggtcgggtctgatgtgttgaggggaagttctctaagttccttggccagagcaactcccgagtcaatttcccaaagcaagggtcaatgttgtcttcgtcttaagcacaccttcaagtggttttaggtgctgtctacaccttctttacagtttgatctctagaggtctttgtcgtctctctggcttttctgggagagtccttgctcatcccctctggtgttataacatcaaatgaggtctttttcgtcccctttaaagtcgtggcagtagaggaggtcttcttggtgattgacaatgaggcattgtagcactcgcgggcagttccttgattgccaaggagacaaccaataaaaaccgttattgcaaacctgacggaaaagtggcacactaagga

SEQ ID NO: 228808 - DNA, 2619 bp, Cannabis indica
tttttttcaattctaatcttttttttttttgaaaaaatgcgtttataaataaaattgaagttagaccttatggtcattacaaaaaattttgtaaaacttaaattttgtgttaaatcaacaccaaaaaattactatttaagcattaatttttttttttttcaattctaatctttttgttttttgaaaaatgcgtttataaataaaattgaagttagaccttatggtcattacaaaagatattaacaggtatagtagatatctctaatcacaataccaaaaattacaccagattttatattttatattattctattatttttttaatataataaaaatattttgatactaaatatatataatttttttttcgtattaagtattatctaattgttaaaaacttaaaaaaaaatagtatggtttacaatgcttactaaatttggtgagacactatagataaatttatttattaaaactaaaagctaagaaatcaataggatcctaaatcggatatggtattatcatcattattatcgtaaaaaaattaaaagcacgttgtgctgcaaaatatttttctaaggttttaattaagtcaactaatttggtgtggtcattatcattatatattttaagtaccaatcaaacaaaaaaaaaaaaatggcttaaattggtccaattaatcatgatatttcatttttactttgtttctactaatgatatgattttattttgtgttgatagtacaaacacttcttttgagttgattgggatagctcaaaagaagaaagaatgttataaaattatgtatacaataattttcataatgaaaaaagaaaaaatatagaagggcttcttttagactttggacccatctttgaatgattatttgtaagtaaacacatgcaaaatgcaatgacttttttcttcatcttcttcttcttttacttcatcaactcaaagttaaatgatgacattagaaggtgcactatttgtagtggtatgattgcatttgcaattgttactgtttttctataatttgtcttagtttgagttgaattttgtaataacaagcacatgttaaaaaattatattttatttttcacttgtgatcatcattaaccctttatgtctaaggaaaatatgttcttctttgggaagattcaaagtcatatgaagggagttggccctaccctccaaattctactttactcatcatcatacctaatacacatcaaatgtttttctttcttcctttacttttgtcccaacatgctctaaatttgtgtaaaaaacatacccaaatttttcaatgaaactattatgataaaataaaatcatatgtatgttttttcaaattctcaattaagttttattaacatagatttggtatgagtttttgaataagaaaacatgcatctcaatatatttttaggcagtcgattttgtgtcccgaaaagtaaaacacggaatgtattgcgttgtacgacaggtgagtcccagggtacgtaataatgtgtgtgaatttatttatgggtcccagggtacgtaataatgggtctcagggtacattaccattttttaaccttaattacccctagatcaactccaaccctcaaatcaaataattactccatctaacggttgccgtacatcacaaaatacatccctctaaagtacactaacggaacaaaatcgtgtccttatatttttattactaaaagtaaagaagagaatggtcaaatttggtgaaataagataagaatgtgctccaaaatctgcagagttcattataatcattgcttgtaatgttcaaagctgaaataaaagataatattaatagtggtgtccttctcatgaaaggtagtgaatagtagttggtgtttggttgctaatttgctacagatatgagcaaccaaattaaaggtgaataatctatggtcattttggggttatgcatttgagtaaccatattctatatttagtgaagtacaattgtagcttttgagtgctcacgccaactaagaataatcaatcattaaaagtgtagtataataggtcatgacaatgcaaagcaaataatcattcaagagtgtttacagggagttttagagaaatactaaaaggatttagtaacaccatcatgcagctgcactagatatgaacatagcacaacaaaaaaatcacatgaaaataacatcaaaacaacaataaaaatataaataataaaaatcaataataaaataataagaatacaatataaaaatacattaaaaacactgtattttaagtaaataaaatttaaaaaccgtaaaaattaatcataattttgtatttttttttccttttttgtttatttttgtgtgatttttttttaattatctctaaaataaaggaaaacttacaaaaatattagaatttgggttaacttttacaaaaatattgtcacatagaatttttttcaaaaatactgtatttttataaaacaataatagaacacaaaacagaaaaactaaaaataacaatggaacaactaaaaaagaaccgtctaataacagtataaagtttacacaatttttttgggaaacttacaaaaatactggaatttggattaacttttacaaa

SEQ ID NO: 228809 - DNA, 2421 bp, Cannabis indica
aagttgtggctatactttaaggcacattctattaaagtgttcaccaaccatttgctctggcaagtcctctggaaaccaaaagactccttaagtgggaaatggaacttagccaatttgacatatagtatgcccctcgcgtcttgattaaaggaaagctctgacagatttcatggttgaatgcaatgaaaaggacgaaattgtggacttaccagacctagttactcccacatggaaggtatatgtggatggtgcgtcaaatgagaatggagtaggagcagggatagcaatgatacctctcagaagggttgaggcttcaagctacctagtgattcaaatttctaatttttaataatgaagttaagcatgaagccctactagcagggttgaaagtggctaaacttatgagagcccaaagaatagaagtcttcagtgattcctaattggttgtcaaccaattgtttggagaatatcaaaaccgcaaagaaaagatggttgcttatgtctttgccgcaagggaattccttacaaattgaacaaattcctcgagaaaagaatgctcatgcagactgcctagccaagctaacataagaacaagaaatggaaaaactgggggtagttcctatcgagtacctcccagagccaagtatcttgtggaaactgatcaagtatcacgttggatggatttgattatcaacgatttaacaaagagagagttaccctaaggccaggaagcctccaggaggatccattatcaatccccccattacctcataatcgaaggcatcctctactagagaggtttaagcatgccatgcttaagatgcatctcggactctgaagctaaacaaatcatacaagaaatccatgaaggattttgcggacaccacattgggggtccaagcctctctaagaaagttttaagacaaggctacttttagctcactatgaagaaagattgcgtagactacagtcaaaagtgtgacccatgtcaaaggttcacaaacatcctaaaggctcctctgaatgaaatcactttgatgacgagcccttagacctccgcagtatagggtactgatctcattaggtctctcgtgatgggaaaaggtagagtcaagtatgtaatagttgcagtagattacttcataaaatggacggaagcggagccaatgaaatcaatgatggccaagaaagccttggattttgtaataaaaaacattgtctttcggtacagactaccccataagataatcttagacaatggcaagcaattttattgtgcatgcattcacagagtgttgcgagaaatacagagttattaaaagtttctccgcagtggcaagaccccaaatgaatggtcaagcagaagttgtgaacaaaatatattaaaagtcaccctcaagaaaaaactcttactgtaaaaaaaattgaccgaatgagttgccacgagtactctgggcatacagaatcactgcccagaccaccattggacattctctatttttaatggtttatggatgtgaagccatggtccctgtggagaatatagtcccctcccatagaagaactacttatgaccaaccacaaactaagcattgctacgagagtcactagatcttgtagaagaactccaggaggagtcccaaatatgcgtggcagcatactaaagaaaggtggcaaaagaatgcaacttaaaagtcaaagaccgaaagtttgtaattggagaactggtcctaaggagagtatttcctacttcccaagatccgaaagttggggtactagactcaaattgggaaggaccataaaaaattgaagatgaaataggcttttggacctacaagctaaagcatatggatggatccctaatcccaagagcatggaatgtcaatcacctccgtaagtactatcaatagttaggagcttggtatttaatttcatctttaaattttcaagttaagaatacctttttcaaactaaaaacataatgtagtatattatccttttgaattcagactaagtgacccaaaatttaactcacttaccgggtagtgaggcatatatgcataagcaaaaatagcaaagcatgattaaacatatgtactcatagatgcccataaaatgtacttatcaaagtatgtccaaaaagagaaaaggaagaaggataatagaagcctagggaaaggctcttaaatgtctccccaacatgcagaaaaataaaaacaaaatataaagagcgtgttgttgacccagaatttggccaactaacaacagagtcgtgtttatgattgaaatcaccacgtgtaaacaacgagaacaattaaataaaaaggacacaataattttatagaggttcggcccccttagttagcgggtaacgacctactcccctttttagttgtatttgatatgagagataataccact

SEQ ID NO: 228810 - DNA, 2066 bp, Cannabis indica
ttttttttttttaattcttaattcttaaggcataaagggtcaatgcactcgtgtgaaattaatttaaaggtaaatagctacataattactcaaaaatttaagtttgtaagtgtcataatctcaatatttatttttagcggcataagtacctaatatttgtaaaattgtaatttttctctaattttgttagtacaaactttattattttttaaacagaccgcatataaggtccaaattctagagtattgggtctagacagaaacatgtagtatcagttacttttaaatgttcttttaataaattcaaaacggagtctgtactgataaaactagaagaaaattacagttttacgaatattggatacttataccgctaaaaataaacattgagtttatgccacttataaacttaaaactttaagtacgtatgccgctatttaccataatttaaaataatagtcatttccacgtgacttctgtgctctcttttatttatttattaatttttgaataaatcatacaagtttataaatagcaatctattttttctaaaaaaaaaaactagcaatcagttaaaataataccccataatttagagatacgatcaagattaaaatttaaaaaatgaatcaaacaattaaccgtctaattcttaaacaatttaacaaaaaaaaaactaaaaaacaaatctgattaaagagattgcagcatcacagataaccttaacaacatctatattcagtttcatctataactcaaaggatacaacaatagaaattcttccagcaagtttattgaggttgagcactcaactattgtgcaaagtacgtaattggactactaacaaccccttcagtcgtagagaacttgttattttcaaccactaatagcgatttgatggtgagtcatcaaagaacaaaaaaaaaaccaacaacgaaacaaacaaaacaaaagcatgtcacacaaacaacactaaaacactcaaaatcatgtcacatagataagactaatcgtaatagcaaaaattgaatcgcaatagcaacacaatcccaaccatatcattttcttattggtatatttaaattaatttttaaataaaaatttaatgacctagactaataatggattgccatgtgaccattaatttaacaatttgcaattaagtaccaacgaaatttcaaatatataacttaaatattattaccgtaaaaaattaaggtaattactcttttgctttaagggccatgtattattgtattgtatcttaataaatatctcattttcctttctattccaactcccttttcaaattcttaatagagtaatttgcggtataaatacttaaatttaattttcggttgtaaataaatactaaatttaattgttagttgtaataatacctaagttataattctgaaacttctataagtacttgactcttaaattgtcatgtgataattcctgattggtataaattattaaatgtttattttttatttaaaaattaatataaatataccaataaaaaaaatgacatgggaataatgtcttgacatttaataaccaagtacctacagacattttaaaaatataacttaaggattatctacaatcgaaagttaaacttaaatatttacgccgcaaattactttttttaatattgtacaaaaacacaacacacttgtttcctatgctctcgatcctaaaatatgaactcaaatgaaacagattaatttaatcaaagacaaaagcaatttaagacaaacacgtgggattatgatttcttggtccacatccaattttggaatcactattaagttaagcatcgaattaaattaagttaaagtaactcatcatagaataacaattaacaaaaaatgaaaataatgccattcttaaatttttccaagaccatttcttaggctgctcatggggtttgaaatgtccattcagaaaattagaagacgactcttattattaacacaaaagaaacaagtaaactctattatttggctattcctcaaatcatgaaagataaaaaaattagttttgcctagagtcaaagag

SEQ ID NO: 228811 - DNA, 4187 bp, Cannabis indica
aaaaaaaaaaaaaaaaagaatgctacgccattaattatgcttttgaaaaagctttcgcctttgctttagaaaaaataaacgaggaccaacaaaaggctacttcatatttacaataccaaagtcaatactgagtcaactaactttattataaagaaaataaatttaattaaaacccacaaaaaaatatcaacaacagattacggattattatcctgtttattaggttttgaatatatgatcctaaatttggttacttatttttaaattcaaaatccattcctaatattttggtgataatttatgaaatcatgaataatatcaaatttcactaattaaaaaataaatggaaattatctaatatactattttttttttaatttttttcaaatttatgatttaggttcgtttaggtttctaaggtgggtgcaggtgcaatgagggtttttatacaatttttttttgttacaatttaggttattctatgtagaatttagtaaaattgccaaaaaaaactagtttgagtgtaagaatgaaacattttgtttaaataatctaattggtgaagtacttttcataataaggcataaagcaaagctaataaaaataacagatataaaattaaatattaataattaagaaaaataggaaacacaagagttaaaataatttatgataaactgactaaaacacaatgttttatcgtcaaaaaataaaaacgactaaaataaaaaactaaacgacattataatcatcctagaaaaaaacaaaaaaaaacgatatcataatcaagcgctaaaaatagaaagaaagatccgatcaaatcagatccacaagcctacatggacaaaacggtggcggcgcagagagcgactgcaaccgatccggagaaagcaagtctgttgagaacagcgccatttttagacggagcaggtgcttcagttggaggagaagagatcgacgagggaccttccgccggagaggatgccggtgaatcgctcgaagagggaggaggagacggaggagagtcgacggtggaaggagtaggagcgatcgcagcaggtgaaggtacgattgcagacggagaaggtgcgattgcaggaggaggtgaagatttcggtggtttcgctaccggagatggaggagtagcgaccggagcaagagccggtggaggagtggccgccggtggagatttagtcggtgatgctgctggagatatggccggagactgagcaatcgataagctgaaaaacaaagtggctaccatgaaagtagcgaagattgcgcttgactgagacattttagagagagaaagagtgagaaaaatctcgagagagagagagagttgagaaggcgatagtttctgtttcaagaataaaataacaaaagttaggtggaagcagtatttatagggggagtagtgatagtgagtgagtgagttgactcgaggtcaactcagcgagtttaaaaatttactatccttttttaaatttacgtcgtaaatttgttaagattacctataacttcgggacacgaatctcaagattgatcgatcggttgatattaatctttgattaacacgtggcatgattttaatgacggtaatgatgatcgagttcgataaaagagacgatctatcatcgtttcctgttttaagagtatgatttgtactcctccactaaggtacagatgtcgaattcatctcagccgtccacgttgaagacatagaatgctttggttgatctgaagcgttggatttatttaattaatatatgcctaacggtcgataatgggaaagaaaaagaaggttttgttttggaacaacgggtagtattggtggggaccacttttttggaagaataaggaacacgttattacttttgtttttgtcttttaatttgtttattatatttattttatatgtgtgggcccaattaatgtgctaattttcttcttaaaaatgaaataaataaatcagggtcaacattcaatattttttagtattcgattttgtttcagcaaaataaataaataaaaaaaactacctcaaaaataaataaataaataaataaacttgcttttgaaaggtgggttttttaatcatttgccacatactaataattaagtttttttttttaagaaaaaaaataattaacttttttaagaaattaaattttctaggctaaacacaaagttgttaactaagtttgaaattgaaacgaagaaatttcgatttagttgtcagaaaggctatcattgatatatattattttttttaaaataaatatagtgcatgacggttctaaaaactggagagtaacatgcaactcgtgatttttttttaataaccttgtaactcatgaatttattctcctgaaaataaatgaatcgttaatttaaatttgggctccttttttatgtaactgattctttgaaatatttaaatttgaaattttgaaatgaaaatatatatatataatttcttggtaaaaggccctacaaaagctataaaactcatcattagaaaaaataattacttgattttttaattaaagttttttttttggaaagaataaaaagcatatttcgctatttgatttggaaggtcaaatatatatgcgacatttattcgtaatctttttatttatgactaaataaaaaccatttgctattttatttgatattttttactgaataaaaggagatcttaaaaaatttcacatttgtaaaaacttacataaaaacaataaaataacattaaacctctaagatatattttaaacacaattcataaagaagactttttttttcaaatgtttaatctatcataataaatttacatgcaattgaatatctttttaaaatgcgtgattgaattttttaaagcctaaattcgttatgtttcattggtgctagtaaagtttatttactaaaaaaacatacaaaaccatataaacaaaaatggaaatactgcctccttcattaaataaaaataaatatagataatatatatcgtgaatcaaataaatggatacatataaatatcgtaataatataaatatatatatatatataaaaaatcaatggtaataaatctataaacatcaactaataaatccagtgaactctctacatgacgaaaactgaagcaaaaacgacaacggccatggatccaacgacagtgaaagaagccgaaacggcaccgttttgagctggagagggagcctcggtaggagaatcggagatcgcagaaggagaaccggatggagaatcagagatcgatgatggagtgggagcagtctctggagttgttgaggttgctgccggagcaggggcggcggatttcggagattgaggcggagcaggagaaatcttcctcggtgtttgtagggaaggtgaaggtgctggggactgagcaaaggtggagaccactagcattgcggccattactgctaccaaagcaaagcttacacgagccatttttagagagagaaaagtgagagtttagagagagaaactgatagtcttttggggacagtttgctttgctctgatagtagaaaagagaagaattgagctgttttgagttatgaattagagaatgggtttgaggctatttatagaaaagagtgagggacttatgtgtaaaaatagctaaaagttgagatccgaccgtttgatttttgatacgtttccttttcgaatgatctggcgaaaataaacggtctagatttatttagctttacagttaaattaacctatacaaagacgagtaaccgactcggtctggaaagacaagtcacgcggttaaggctattggccattgagccgtttccagttttttttgacaatataacctacacgtggccgaatatgaaccgtaggatgaaacgaagggcgctttgtttgcaattaacgccctcacttttctaattatcatcataaaacgccttattgggaaattatatatacaccccaacaaattatataataaatttaggggtaaataccattttagaccctgtgttttgtcaagagttacagattggaccctgtgttttattaaatgataaaatggacacagtattttctaaatagtaaaaataggaccttgagtttagtttttgacaactttttttttaacttacaaccaacttgaagacaatacttaatacgaacagatacaaaaaa

SEQ ID NO: 228812 - DNA, 2015 bp, Cannabis indica
aaaattaaaaattaaaaaatattgtaacattaagatagtatttgaattaggagtgatcatatagaaaaaaaaaattttaaatttttgtaaacctaatgatattttttatgaattttctactcttaaaactcaacaaaatgaacttgaattgatattagaatattctatattttctacaagatgggccttggaacaactggctcccaaatgctttgaaaaggaagctcgctctgttggccgaacagatcaggtgaaccactaaagggctggtcggccaaaggtgaaccaagtggggatcgatggttgttgaaccagagatccctggcgaccccctagccattagttgccagagtttggctgcttccgccactagatttgtatggcaggatgacttgtccaccttcgctcagggggaggtctgtcctagtccttgcagaacttggttggaccgtttgtctgtaaaccctactcgatttgtcgactagtctcccttagagaggatctctgatcagatcctgacctctcccaacagttctttcattggaccgccttatcaggcccctagcttctctgttacggcagtctagctccgcctgatgagattggaggatgtactcctggtcatctatccatctcaaaaatttgcgtctttgttatgcgaatacatcgcaaccaacaacgcgtggttcttcaatttggctgacttggcaaacaacctctctaagtctagccaatttgaatcttcttccaagtacataaggctcaccaatagttggctcgccaattcttagccccgtttccccagcataataccggggaccagattcacttctggtgcttggagattgctccatgttgcctaaaccctcagtccaaggtgccagaggctgatcattgggatcagccgggttgttagggtcgacttaaccaattgtgttggtcaagttttttgtgactgctgggttggtagggttggccacatctgttggattcgtggagatttcagcattggctggaacatgaacgtcaggattaacagtcatggggtcttgaggaagacccgatgaggcaggagttgtagccagagttctccttgttatagccatggtgatagaacaaatcaatcaatgctctcaatgaaagcactaaattattgacttcatatttggccaaccgacagtggagtcgtatttatgactgatatcaccacgtgtatacaataagaacaagttaataataaaaagagacacaatattttatagaagtttgacccccttagataacaggcaatgatctactcccattttagttgtatataccattcagatcacatgtgttgtagattctgaaatggctctcttaagattattaattacaatagtaagaatcaagaagtcaagtaggtgagatgagggagactttgtctgttttacactgctaggggcatgtagaagagagagagctacggcttagagcttcagagtagagagcttagaacttaaggcttcatacttagatagattaggtttagtttagtgctttttatataggaaacttacaagagatgataggttgatatcccttaaaatgaagagatatcatctatttattatatattaaagtaataaatacataacatattaattagtccccaagaataggtaaataactgaagtttatctcttatatttgtgaatttttgaagcctcatacgtaactagaagtattgtccaggctgaaagctgtaaggtacaaaaagtgcttgccaagggaaaagctggccaacccttcctttgttggaggctggctggcctatgaggaaaaaagggccaggcagggggggggggggtccgaccgacaccccttgagttggccagttcattatctctttatcttgcttaagtatttgaactcttcgtcaactgatgtgttgtttcatgatagtgataagctatactccacgtggtatcaatcttgcccacgtgaatatatcacgtcatgtggataaaaattag

SEQ ID NO: 228813 - DNA, 916 bp, Cannabis indica
ttgtacaagtttagttaatcttcgcccgataagatttcacaatatttttgatgatccagataaagaatctcaagtgaagtacggatataattctttgatggatcagttatttataaattgtgataaaaaggttgaagaccaaatgtctgaatggatgcccgaggagttatctactaactcgcttgatcttaatgggtgctccaatctcacaattcttccaaagatttccggttatatcaaatttatatgtttacgtaaaacagcaatcaagaaatggcacccatcctttttctgtctaaaaaatcttcttgtacttgatctaagtatgtgtaaacatctaaggaaacttccgaatgatatttgtgagttagagtcattggaatacttggatttgggtggatgtgtatcctttgaaaagtttcccaggcttccaaaaagtataaaaggattaaatttgaacgaaacatccatacaacaagttgattcgtcattattcgactgtctaccttctctcaatgtcttattcatggaggcttgcgagaagcttgaaagcctcccagctaccattagtaagttgaagtctcttgtgcttcttagtcttaaaggttgctggcaattgaaaagctttccagaaatctcggagcctatggagaaactagagacacttttgttaagtggaactgggattgaagtgctcccattatcaatagagaatctagttgtgcttgaaagcttaaacttgatggattgcaaaaatctcaagtttattccaactaccattagtaagttgaagtctcttcaagcacttactcttgaagattgctcacaattgaaaagctttccagaaatctcggagcctatggagaaactagatacacttttgttaaatggatctgggattgaagtgcttccatca

SEQ ID NO: 228814 - DNA, 1431 bp, Cannabis indica
aagaacaagaagaagaacaggggtttgaacatcttgtgaatgtctgtaccagaaaaagaaaatcaattggacagaccagaagggaaacggtggagttaacagttgaagaaatctattttgaggggtaggaggctgatgtagttacaattgaagattaaatgttggggctaagttctgacagtgaatgttcggagggggatgaggcagagtctgaggctgataataacgaagagcaagaagatactattggtgatatcaaagaattgtagaaacagaatgaacatgaaattcagtcgattactgagtcgcacgaggaaggacagaacgtaaaacgaaattcttatgaggatcggtcgtggtctaacattgtccaatccatggcggagatgggaatggagattgcaaaacaatgatgaaaacaatctaattgaaggagaagggaagccatcgagaaagtagacaactgaataatttgactttcaatgtaaactatgataaaagcctcaaaaaattggggttggtcaagaaagcttaatgaagattctctcgtgaaatataagaggtagtggggacaaggagaagagaagtgcaatcaaagtgacaatatgcaaggccaatccggatttggtgatcttacaagaagtgaagaaggaacttgttgatagaaggttcattagcagtatttggagctcgcgatttaaggcttggattttaagtccagccattagaagatctggaggcacattgttaatatgggacatgagaaatatcaaggtattggattcattaatgattggtaatttgtctatctcaatcttgattcaagcagaaagtatagaaccatggtggtttttgggagtatatggaccttgtttatataaattaaggccagatttttgggatgagttggctggcctttattctatttgtggagattcatggtgtttggggggggggggacttcaatgtggtgcgaagagtgggggagaagttgaatagtagttcatgtactaagaatataaaagttttcgatgagttgattcgggaaatgagattgattgatcctaatctaaataatgggaggttcacatggtctaattttagagctacccctatttgcagtaggttggatagattccttttcacttacaaatggaatggattatttccatttgtgcgccaagaaatgttggtgagattagtttcagaccataacccagttgttattgattctaatcctcctaaatggggacctggcctgtttcgcttcgataatctttggttggaacacaactcattctctaagctccttgaaggttggtggaaaaatgcaagtgcaattggctggccaggtactaaacttatgtgcaagctgaaaaaagtgcaaaaaaatatcaaggaatggagtaagtcggtttatggaaacaacaa

SEQ ID NO: 228815 - DNA, 767 bp, Cannabis indica
taaaaatagtgagtattataatttaatgtaataaaggatcaataataataaatatatgataatataacaatgataatattatggtaaagtatataattattaattaaagaaattaaaattaaactataactcttaaatctaataacattaactaaacaatgaatatgcattttaaagaatatgacaaaagtcacttataattttttttacgagataaattgaggaatacctcttttttatatctattaatcaaaaatacttttatattatattttaataaaatgtactcatttttgtgaatgagttattcaatataccctcattctccacttgagtctagcatataatttacattaacttaagagatataataggcacattatctataaaagtggatatatcttaaaaaatatagaaataaaaataaaaattaaaacaaataaaataaagtgagtatacaatgtaattagctattcttttgaagacagctattttaaagatactagtataagtgcacttaaaataccatcaagcaaaaaaaaaaaaaactaatagaatatcagtgatacacaattaattaaaattataaatttatttattatttgatttaatatcaaagttactatttacttattaacaaaaattttagggtaaggtggctcatgccgttgcctaaggcccctcagctcaagaggccacccaatttctttttgttttatgaatttcgcttaacattaaaccttaagaccaaaaaaaaaaattgttta

SEQ ID NO: 228816 - DNA, 5002 bp, Cannabis indica
tctataataaccccaaaagaaaaaacatagataataaatttcgaatagtttggactaccactaagtaatttgactccaactttacttttcgccataattgagttttgatcccgtttaacacttcctttataccaattgtttcagccaaattcgtactagcaaaattccctgacttattcatcactaattctccttgagagtatcgaaggattatgccataaccaaactcagctcaatcacgaaaaatgacagcatcaacaattaccttaattgtattctcttatgacttaactcgaaattcagctctatcactaactttaaaaattagaaaaaaaaaaaaacatttgaacgtctattttgaactgacttccattgtacaagacaactcataaataaagtaagaacaccatccattgtaacatacttttagttccaaactaactaatttcgagtcttctataaccccaacacaaaataacaacctcctcatacttatccatacttttgcaaaatttgataaaccaactaccaaaatcagcagcaacaatcttaatgcattgcaatttacacgtccacataccattaatttatttaattcaatcttaatatatacacgactctatatacataaaaccatcaagttcaagatcattaatttcaattgtgattccacataaaattacaatatttaaagtaaatattacaattgacctatgtcatttatatcatttaataagttcaataaattgatgaatttttatattacaaataatattaagtaacaaaagtcccaataaaccctaaaaataactaaacaaaaattgtttatgaagagaacatgaaacatgttcagtgaatttccttgaacatgaagacaactaagatcaagacaaatatttataaaaagatttaacatttatattttttatacacttttcattccaagtgggactcacacaaagagtgatttaatactaaaataaaatggaatgaagacgaacacactaaacaaaaatttagcaactttttagaattttatggataaaaattacatttgtattatttagttatttttttataactaagtgaataaataaataaaatgtaattttcaccctttagaagacaaaaaagataggaattttggacaaaaattaccattttttttttggaaaaatgaaaattacatattaagttagttataattaaaatcaagcaatcaatttattattttttttgtcaacatcaaaaaaaaaagttagttataaataataattatttttataattagtgttatgagacgagtgttaactccggcaaaggtagtgtttttattttttcctcaaattcacgcagtaaaccctaaactttctctgtgccgccgctccagttgtcttctccggccaaccctcgtctccggctctctaccctttatcaggtatctcatctcactctttcttcattcttcaattctacaaatattttcccttgaaaatttacaatgtagaacacacacacacttactgaactttgattcttctaagtctaaatcaattcctcgttggttaccattctctgtactaaaagtgaagtttttggcttttgttttggtagagttgatttcccaaggggatgaatgataaggttatctatttgctacgcttccaagattatatggattattttgctttttattggtttttgaaattaatataaaatttatattaaaacaatttatacaatcatatgcccccactggacctttcatagctacacctctggtcatgggatgttcttaattaccaattagttgttgtttaagaaaaacatgatgtgattgttttcatgtttattggttctgtaattgcatcaattttcaaatcttctttcagctttaaaatattggggttgtttctttattccaattttcttcaatatagtgtattttagtttcaggctaaataataaaggaatttctttgaagtatttgtaactaataagactaggctgagctgaaaccaataaaatgtatattaaaaccaattaagacccttcatagctcaactctgctcatgggatgttcttaattaccaatgagttgttgtttaagaaaaaaagcataatgtgacttactcatgtttatttggtttgcaattgcatcaatttttgtttttgttttgttttttttttcccaaatcttcttatcattatgctgattttcctcaatatagtgtattttggcttcaggctaaatatataaaggaatttctttgaagtatttgtaactagcaagactaggttctttgggatgtctcctgctcaaccattaatgaatattggaggagcaaaccgtaaaccaaatatttttgcacctgaaaagagaaataagggtttggcagcaagattagctatgaagggcataggttgcagtagtaattgtgaggacaatatgattggatttgaagattttatcaatagccaaaataaggcggctgccagggaggtagaggttgacataactgaatggaaaaataattctgacatgagattagctgagagagatgaccctgatgctactgaatattcaagctcatttcaagacactgcttctgaagctgacaattgttccgggttcagtgaaggcgaagtggaatcacaatttttcggagataatggatttggatcttcatttaatgcatttggtagcgtatttcatatgaggtgtgtcaatattgtttgtctcacatgattatggtgaacttctcattcttgatatactcatctcaattggttaccttttcaggaagaagaaattgacaaatcattggaggagcttcatacgccctgtgatgtggcgttgcaaatggacggaattaaggatcaaagaaattgattctcaagtgtcaaagtatgcaagagatcttgcagcatatgatgagggtaaacatttgggatcagaacaaattacgacgacagatgggttttgttcaaagtcattgccatattcgcgtccatatggcagaagaaaggctatgaagaggaggaagcggaagaaagttgaagacactgatgcaacatcatacatgtcacaacataatcttttctcttatcttggtaagacttatacaatggtttctatactttttaattttttttattcccctcttttacttttccccccaatttatgactcccctttgtgacttgatgcagaaaataagaggtcagatcctgatagcagctctttggctgaagaattcggtaatgcaggtaatatttttctaatattcaagttctgaaagtattattatctgtatcctatcaaaaagacctttattataaataaaaaaattatttctgattttccaatttttacattttatcatgcatcaacatttcctattatttttcaatattagtcactagtcagtattgttcaagtatttctcatttaaattagtctttctatgaggcagtgaccactgagcagaatgttgattgcaatgacaaacttggtaccagtgatgattgggcatcgtttgagttcagagatagtgatgcttccatggagcaagttctttctaatattgagaaagtgcacgcttgggttcagaagttgaagggtcaaatagacacggtgatgtccaagaatgctcctaagttctcttcatcagagaacttgagccttcttgcacctttagatgttcagaccagctcagctcacagtcctgcattttctactggcaatgcagatgcagtatctgctgggcctatgtacactgaaaaccaacatataacggactatgatattggcgatctagttcttcccgaaagtgttgtgtcaagtttcggagaagctgtctctgttcctgatattattgaaagcactgtaggactgctgtcttctgctgatgtcacccttcatcagccacaatttggagactcaagtgaagatgtaagtgttacataccttatcaatcctttagtctcatttctttatgtctaagtttttttaactcgataaacaacacaacaaactcaaattttgggaaagtatcaacagcatgcaccaaactcttatccatgcatctttggcagtgtcacatatagatttgaagggacactaattaagtcttgctgatagtgaaccatatcattagcagctgaactcaactccatttgtttaatttgtttccccctagccaatatcgaaactaggactaatttacctttctcaaccacattcaccagccatttgtgtcttacattgtcgtaatatgcagattgtggataacgtcctgatacatgaagaggcagcggaaggagagagaagcactttcctaaggccaaaacttgaaccacttttaatatgtaaacaagaacccatgaatccttctagttcaattccaccatcagaacaacctgacccggtgttgaatggcattgctcctcacgagcaatcaactctgaaatcgtgtctagcttctgatgtccatttccccagaagtaaaagaaagagaggggagcggaaagctggctcggttgtttggaacaagcgttgctcaggtgacaccgaaagccaatgagctataaaagcgttcctctaatctatgtaatgtatctgtacatagtttttttcattcttttttccttaacttcatggaaatgacaatttgttctcaggtgaaaaataacatcagcattgtgaaagtaaggagttaattacttaatttagtcaactaatgtagattgttcctcgttattattgatgttggtgataatgtcaactgggaatgtaaacaacaagagcttagtgttataaatatgttgtgtcattggattcgttacttgttgaaaaccatgccataattgtcaccaagttgtaaagaaaaacatgttagaatgatgattagttaagaagaaaagaattatggctgatacgtacatgtgattaattggtctgagaaattggatttgtggcataattattattattattatt

SEQ ID NO: 228817 - DNA, 1312 bp, Cannabis indica
aataataataatattgaaaatgaccatgatatatatttaatgcaatgatgagttttctgattattacatacggaaaatgaatatgattaaaattatatgggaccagtacagtaaataggaaagtaattgaggttatgttgtgagaaaaaaataactgtggtttaaaaaaaaattgtgctaattatttgataaattacagattttaaattgatgttaattattaagattttaattataataataatgatagatgttattatctaagtcactataattataattatataaaaatttatgttatttaaaaatttcattttctatctttataatatataggtttttttttttctttttcactagaaaatattagattgttgaggtttattaacataaaattcttaaaataaaatctcacaaaaataaaatatttttttattataaaaataaaataacaaaaattaaagctttaaatattatttatattattatagtactaagcaaaattttacatttagaatattaaaaataaatgcaaatataattttacttatgccaaatttatagcataagaatttaattaatttatttaagttcgacctattctagattataagaataatttcttcattgtaatttttttttaaggaaacaccatttcattccaattaaaatgatattaaaaaataaaagagtgtgtgcccattatgagtgctctgtagcagttatagtttttcttcttcagtttttttctgtattcttctttctggtttgtaacttctcttgtgcacccatggatgctttaactgatcggatgaaatcaaccatctccttcacagacaatgaaagaacagtggctgccattactgatgatgataacttctctccaattgaatttctagaacttgtccttgttattcgaattttgacccctatcaacacttcaaatgcagatggtgttggaatttatttttaccaggatcttagatctactcacaagtatgttgattaacaacctaaatatgaacttctaaaacgataaaaagaaaacacatataaagttaagaaaacctcatacattgattgcagcggaataatatgtctccttccactcagatctctaacccttgattcctttctgttgcagagtataatcaagatctgagcccgaatgtccttcagttggatgtgatccttcacagtcttccaatctatgattgaggtactgtttgctgtgtgtgggcactactctctcactagggaattcgaaattgtatctctctctcttgtgtgttgtgttgaattcgtgtgtcac

SEQ ID NO: 228818 - DNA, 830 bp, Cannabis indica
tgaaagcccttggctacaagatgcgctttgaatctgctgtgtgttctatcagagttttcttttttttcaaaaaacccatttacatcctatgggagtccttccttctggtaatggaacaagagggtaagtcccatttcttgttaatgcaagcatctcataggtcatagcttgatttcattgttcttgttgtaaagcctctttgacatttcgtggaatctttgtagttaaatagactttgggtttgtgaattccagactttccccttgtttgcattgcatgagtgtttgttggaatggctggttgagttacagcagacactgttgctggtgtggtaatggatgctggttctggtgcaacagttgaagctggttctggtgcagtgacagtaacagattcatgaacaatagcaggtggtgaggcaatatgaggaatgctgatgggtactggtagtgaagcactgctgtgatgagtctgtgaaggagcagaagtgaccaaacttgtgtcctgaaatggctcaggtgggtttgaggcagatgcaacttgttcctgtgttgggacatcagtacttgccacatgtggcacagaattattagtgtaatcaggaacattatgcatgcaagagttgctaaaagtgcttgtgagaggaatgagtacagatgtagcaaattcagcatatgaatatgaatcagtggacaacttgggaattgttgtgaagggaaatgatgtttcatcaaagatgacatcacgggaaatgtataatctgccagatgagtctaaacacttgtatcccttatgattgagactataccctaggaatgtacatggagaag

SEQ ID NO: 228819 - DNA, 949 bp, Cannabis indica
ttgtatcacactttataatagcatatacattatacatatgtgcccacataggatttttaatccaacattagactcaaaaaaaaaaatagtgttaaaaaaaatcacgaaaattaggggtacactcaaactataaatataacaagtgttattattaaaaatagaaaataacaacgacacgtcggaaaccatgcatttaattataaatcttatgtacaactctttaagattaaataataattaaaaaaatcattattatatttatcatgtgtaattaagtttttggttgtttcaatacattgtattgatctagctatatctacccttttatatcttggcaactagttcaagttctaattctaatttttttagtatatctattatattttatgtttgtagaatttccccaaattttctgatgatatagggaaagagaaatgcattaatattatagatattttaattatatttaatgcaatttacgttaactttttaatgttaccaaatcttattttgttttcagaatcttatgtgtgccctctacaataattattgtctcttaataacatacattagcactaataatcatgtctattttaacaacacgtactaatttaataatgttaataaacagtaatattagtaatatttttcttaaaaggaaaatagaaatatccaatattgattggtaaatcagactaactttattacatagtatatgatatggctcatagagcggactaaacaataatagattaaccaactcgtttacaaaataataaagaaagaaaccctaacaaaattatcaacaaaagaacaactaaaatgccaattatgaatctatattgtttggtattaaaaatgaaattggaaggcactgtggccgctaaacttctctactgtggccgctccaattgggtcctctggcctgcccacttcgccggttcccttc

SEQ ID NO: 228820 - DNA, 2370 bp, Cannabis indica
gataattaaaggcactaatgaatcgacaaatggaaaacagaaaaatattaaggcaaagtaaacaaaataaaacacaaaatgatgtacttattttggatcattgaaactacttttctaagaatggttacaactaacaatatgaactgaaatattaaacagtcgtttatgtcgtcagccataattgtcatatatttctttatagttttttaattttaattttatgtttatttgaaagggatatttctagtaagtaggagtgtttattggattacacttcaatgtttttaggcaaacccaagtccgatctaattatatattagatgttagattttatcatccgatctgatccaattaatttcagtcatctaatcgatccaatactcattagatgttggattgaatcagtttctatccgttggatgtatttcatatatatttattggtttaatttaagtttattcaatattttagatttagtatttttttttttagattggattggatccatctaatattgtaagtccagtatgaatccaatccaagaaaaaaagaatgaaaatttaaagttaatttttatatatacatatatattttacgtataacaatataacttctaaatttttatccaaactaaatgaaaatactaattggtttgatcagatgttggatgtattggatttttggacaccccatctattatccaattcgatccaattagatattcaaaaataataattcaatccgatccaatcacaattgaatattcaatgtttgatggtcaattatatttagatcggtcagtttctattgaattagattgatttatacatataaacacaaaagaaaaagaaaatatgaaaatcatgtcagtactagtagcgcaacaacctttcaagcagttgatataatagtcacttaacaagcccaaaagtcaataacaaaatacacctaacaattaattaccattaattaacaattagggaagaaagaaaataatccattgtttactttaaatttatctctccctttctatatactatatgattccaccaactctgtttcaaataattactttgatttcaaatctttacttaatctatcatgtacaggatgaataactttttttctaactaaacataattgattatcatagcaataattgcgggcataagtatttaaaaatttgaatttataaacgacataattattaaatattaataaaaactgtaattttcgtcatgttttgtcaatacaaattcccttttaaatatattaaaagatatagatgtaactcatactacatgtttcctcacaaacccaatgatttagaattttggtcttaaatgtgtcatgtttaaaacactaatgtggaatggaaacaatttttattctattcttttgtttagttacattttaaaatattggaatatcatcccactattttagtagaatgactatttcatttgaaaaaattcaataaattttttattaatttttttatgcattttaaattttattccatgctattcctgttccaattctcattcttatattttcattcatctcaaccaaacgccacctaacaaaacctgtactaacgaaactgaacgagaattacagtacaattttactaaatacgataaaaaaaattattaaattaactccgctcacaaactcaaaactttaaatacttataacccaattgtccttaattataataaattagcaaataaagatgactttacagaagaaagaaagtgataaatctcacggcataaagaaagggtcatcgtttcaacaaaataacttttgagctatactcattttaagacaagtaattattttattcagataaaaataattaaaatatccttacaaaataataataattagaatatactaagcgtcattattgtgacattaaatataatattcacaataagtacacagataatcataaaaatctcagcatgataatataacatgctttggaacatatatattaataagggtgagttatagttggtcaaatgcaacacaatgatgatctacaatgataattataaagaagaggaataatttttaacaatttgaaaattagtttacgatatttatttgtaaccagatttgtaagcatacagtgtaaacaggggtaatttattagtgcatacaaagttcatattcataaaaataaaggcatatccagaaactcagtacagggccagccctgagctaagacgaaagaggcggccaccccccaccactcagggtctcatttcgaaaaaaaaattaaaattatagttagtaataaaataaataataatacttttaatgttaaatacgtgttgtagcttagtggtaatttaatta

SEQ ID NO: 228821 - DNA, 2339 bp, Cannabis indica
ctttttttttccttttctaaaaaattaaaaaaaaaaataaggaaaaaacttttgatttatctttatagcgatgattaattatattaatttatgttaagtttatgtttgtacgtacttttgtttttcttggttaattatatattaatcagttttttcccctttaatacttaacagtcatcaatcactgttttttttagtcctctctcaaaccaagattacataaacaatgatcatctaattctagttatagatctcagctcttttaaactatctatataaacatacatatatatatatatatattatatataatatatttgtggaagacatgcatggaccaaccacaaactgatgaaacttgttcaatatgccaactatgtaaataatgtgtttccactaagtgtcaaaataatacatatacatatatataatcaatcattaagagtaataacaagcataaaacgacatggttgtacattatatttaattgttctaatattataaattttaaaatagtccttatataataatataaatatgagcattctaattgataaccccaacagtaccatgtatggatgtcatattttttaaaaaaaaatgataactttatatattaaaatactttaaccattacaataaataatatgtagaaacaatggtttcactaaaaatagaatattatgatgaatatatatatagaaacaagagtgacgatcgatattgagttgaggcatattcaatgaaccatgcacagcttaaacaatcaccaaccaataattaaattaatttccatcttttcttttattcatccaattatattcaaagtctctctcatactaccaccccagaccccatcatttttacatatacggaaaaagcttgaaccctatttttataaattaataaattgtaatttatatttttatatttatacattcaaacaaaatatgtcataaattattttaattcttatttccgcatctaaaaatattctaaatttatatgatacgtaatgctatagtatttgaacaacagagtactttcaaacataattaaaattaattaataaaatctaatatatatatatagagagagagagagagagagagagagatgacgttttaacagccatatctataacaagacgaataagagtgccctccaattacggaaattaaggagttaagattattagagaatactttgtacattttaaaatgatataattaattaatagctttaatggttacatatccttttatttgtcttttgtttaaatacctatttatattaatttagtttcaataatatcaattaaattaaatatttgtgttttaccaaataatatgaaacatctttttttgttgttgatacaaatacgtacggtgagatcgaactctatttcctcagttggtaatatgatactatttttaagactaaatgatggatattagaaaaaaaaaaaaaagaaaaaaaaaaactgatttcaaacaaaagaatttaaagcataataacttaatttaattctgatttatcatgtgttgatttttttgggtcaagatgcaaaatgatcctaaatttaacaattaaattaataaatgtctcttttttaaaaaattaacaaaatgttcttttattaaaaaatttaattctgatttatcatgtgttgattttttttttacaccggggagatctagaaggactaaaaattaaaaatgtctttgtgaaaggtcactaccacaacttattagcttcatggaaagttgattcataagttaattaatattaagagataatacttacagctagagtacattcataatatgtacacaactacacatattacataactaacacatttgttgtacttagttttggattttagcacttttctaataaaaacaaaagccatttcactattcttgagataaaaaaaaatgaaattctttatacaaaaagaacataaaattcaattggccaattaattcaccataaacagagcatcattaattaactgtatttatcaaaaattttaaaaaccaattataaattaaattaagcatgaagaaacaaggatttttatataattggagcgttgataagtcttagtccacatgttaaatactattgagctgaaaaacgctttgaagtattcttacataagagtgctcttgctaaagttcaagaactctaatttttagcccttaatttgataaatgattttcccacactttgcatgaagagataatgttctatttataggtttgagtcgggaatgggaaacctggacccaagaatttaaaagtgttaaccatgcccacagatgagataaaata

SEQ ID NO: 228822 - DNA, 3060 bp, Cannabis indica
attgttccattgaacattagagagaacttaggagtcctaacacaattacataataagctttatgaaatggataggaaacttaaaagccctcaacatctcttctaggaattcccaatcaatggtatcatacgccttttggaaatccagtttgatcatgcaactaggctttgtgtgtctcctcccatagtgcctgattagatcttggcaaatcataatattacgtgctataaatcttccctgtacttaaccccttgattctgagccactaattcaggaagcacatgtttcaaccttaaacagatcaacttagttgcaatttcgtaaatgacattgcaacaagcaataggtctgaaatcacttacagtatttgggcatttaacttttggatgagagtaagcacaatgaaattaatctcctttaaaatctatcccgagtgcaagaaattctgaacttcagcacatacatctccttgaatgagctcccaattatcctaaaaaaagtagcttgaatacccatcaggacctggtgccttgattcctagtattgcaaagacaacaacctttatttctccacaagaatagtcctgacaaagccaactagcaagctggtctaacaatacagcccctgattgcgccaagcttgttatcacagttcttctcccctgcattttagtgcccagcagacctttatagtatgacagaaaggcctctgaaatttttgcttcctcttcaagtctctccccatcttgattctgtattgaaaacactctattctgtcttcttctggctttaatacttgcatgaaataaagctgtgtttttatctccatttttaagccatgtgaccttagctttttgttgtaaataagtctggtagttctttagcaaggctgtgtaatctttcctggctgctaattcttcttgctgcaacatctggtttaacggatcctgatgcaatttattctgcatctcagctaaagtgtcttttgcctgctgtgtagacatttgaatgtccgaaaaagcttgcttattcaactcctttaacacacctttcaaccttttaagcttggtcaccacttggaacattttaagtccctgagtttgttgattccaagatgctaccactcttgctgcataatccgaatgtgtattccacattctaaagtacctaaatggcttcttgccactaggaaccatattatggaatgtcataacagctggagtatggtccattaactcttcattcatgaaattcaccccagcattagtaaattttcccatccaactctgattttccatggcccctgtcaaaatcttcgaaaagattctattatctccttgctgtttattactccaagtgtagaaattgccacaagacttgacatcctccaaaaggcaactagaaacacagtcaataaaatcctttgaaggatgatatttaactttgtttcctattctttcttccttggctagcatgtcattgaagtcccccatgactaaccaaggttcgggttgtgcaacctgctgcaagtctttccacaaagctttcctcccctcttcatcattataggcatacacaaagcttagtgcaaattgatgattcccatccattgtttctaccccacatgaattagttgacttgaacactttagaacacttacattatagctacttggattccacgtaatcacaattctaccccctttgtgacatgatatatttgttgtgaagcaccatccttgaaagacatttaagtacaagtctcctaatttaggagccttgactctcgtctcgaggagaccaacaaaaccaaccttattcttactaataaactgtctaaccatgtgtttcttttgttggttgttgattccccagacgatccaacataaaattttatctattggatagaggaggatctccccctcctcctatgttaaccttttttctctttcccgaagcatccttctcatttatggtctcattgatggcctccatatctgcttcttctaagatctggtatgagttgtctgtttcagtcatctcaggttgttgagtctcctttggtctccagcccttttgaactggctggaagccattagagtttgctgaattcatttgcatcctgtttgtcccatttggctcctcaggctttttcttcacaacctattcttgtggaccacctgtctttttctacattcaatcgctttatgccccattcctttacaatgctcacaaaacactgttttccactcataattaactccaaccgaagtgttgtagccatgttcatcttcaaaatcaataagctcaggtagatcctaatgtgtctagacttcaataagaattctcagatacattagtttacctctctctttggtaattgagtccaccattattggctttcccaattgacctatgattttgaataatgacctctctccccagtacttcaactctagattttccaattgaacccaaattgggatcacattgagattctcctttttaaaattaccatctgaattccatggtttcatgccaacagggcgcttgttgaagaagatgtaccctccgtttaacacattatccctgtcttctatggtgtaaaaacgtatcaagaaaactccatatgaaatcattcctaccttgtcaatcctatctttccatacacgtcttgcaaatccatcaataatagaaaggggaggattagctccaagaacatagcaaacgattgttgagttccataagttaacctcctcttctatatcctcatcagttatcttcaccttttccttctccaaattcttaaatgagttgtccaaatttcgttgaatgttaccagatcgcagtattggaggaatagaggtcttaccttgtgagatgttacttttacattgagcatttgcctccatgaaagtggcgaagtcagatctaatttcttcttgcctttggatcgagtgaagtggggattttggagataaaggcgcttgaaaaagatcagcatcaggttcacgaccatcccctttgtcgacactcttttcatccgtgaaatggatcggttc

SEQ ID NO: 228823 - DNA, 1841 bp, Cannabis indica
tttccctttggtagctgttctatcagatcaatcccccatatagaaaatggccttggactttgcatctggattaatttgttgggtggagccctaggaactttgaaaaatctttggcaattgtcatatttctttacataagcttttgaatcttctattatggtcggccaaaaatatccttgtcaaaggattttcttagataaactttgtgtaatatctcaattagcctattgattaataattagggtttatatttttattatgggctaatcaggtaataagtgggattatgatcctactagtctatttcagcataaattttaaatgtgttataagttgataaataagcgtggtttattaattacggagaattatatagtatgtgtaaatttaatatgaggtatttgtgtaataaagatatttttcgggtttaaaaaccatggagagccgatcgagggcaaaaaattatcataacaggtttaattaatagatttgatgcgaatattataataagtttatagtgtaagtattgaggtaattagatgtatgtggaatttgacctagtttcctagaagtagaaattttttagtggctaagaaattataagataactattaataataatattttattaatattaattttattattattttaatattatgttattattaataaagtttattagaaaaacttatatgattatatgtgtatatatgttatgttttaaaatatatacagttacgaacgaaatactcctccttcgctgcaacgaaaccctcttcttttttaatctattttcgttgattttcaatccaaaacctattaatttaagctgtagctgtagcgggatagtaaatcattgaagaggcaaatcttgaggtaaggattagttttgttttaagttgaaaatgattagttttatattgtgactttgtgatttagagtagttatggagattctgacttcatagaatttttctttggtagttatgagacgagtttcgatgtttacttgttgaatttgaggtgattgtgagttaaaaatcaagtttggaactttttaaagattaagtccgagcttcagtggcattttttgtttaaaggctcgatctttaatttctgttatgtcaggattgttgtatatatggtgtatatgtgtcatgtgaagtttagaatgatttagataggtttcggtactatttcaaagagagaaatttgagattttagtgcccaaaaatggtctgccatttttgaaaattcctgggtgatcagaattggtatttttgtcttaactttttatttggatgtccattttagacgttctatataccgcttcaaagcatatgacgagctctacaatatggtgtatgctttagagccaaaatatatgttttattttagtgtatttataatgtggggttttgtagaaaaccctagattgtcttataagaatattaagtagtgttttgggatagacacttattggtttaccattgttatgacataaggcccgagatcatcaatcattctccaagcaggtcggccaacatacctaaaccaaaacttgaggtaagaaaagtataatgtaccacatggcatgacaggtttcgaaattattgattgcctgactaggcaacgacaatgtgaatatgatacaagctcacctaattaggtgatgcaatatatagtttccatgttatggccaaggcttgcctgattaggcaatgtgatatacaagctcacttaattaggtgatgtgatatattgatgccaggatatggcatgggcttgcttgtttatgcaatcttatgtatcgataccattattcaggttgttcctgtg

SEQ ID NO: 228824 - DNA, 3051 bp, Cannabis indica
aaaactgcctctctgacttcgctttcatcaaacggtctttctaaatgcctggcggagtcatctggtattgcatgccaatcaattccttcaatactcctacccactcttctttcagaagtatacaaacttgagaaaaaagaagttatctccttgactatttcttccttctcctcaataatcgatccatcttctctctcaagtcgtgatattgtgttcctggatttccttgcattcagcaggttatgaaagaatcttgaatttgcatcgccttccttagcccacttgcattttgatttcaaccatacagctctttcctcttcgaagaccaattgctgccattcttttttgattgcccttctttcctccattaatgattggttccactcatcagaggcttccaaactgtctagcttcatcagtcttctttccattgcaatttttgtcaagtgtttattaccgtatatctttttgctccattccttaatgttgcctttgacttccctcaatttactcataaacttagtgccctcccaaccagctccttcagccttctgccaccaactctcaaaattcttggagaacgtactgtgctctagccattgattatcaaagcgaaaagggctaggaccccaggaagggggattagaatcaagtacaactggactatggtccgaaacaatcctgaccaacatctcttgtctcacaaaagtgaacgcattactccagctattggtgaataaaaatctatccagcctgcagcaaataggcttgtttcgaaaattcgaccaagtaaattttccattattcaactgcggatccattaacttcaattctcgcaccaattgatcaaacatcttcatactcttagtccaagagttactattaagtttctcttgcactctcctcaccacattaaaatcccctcctaaacaccacatatcaccacaaattgcacttagacccgccatctcatcccaaaatactgacctctctttatatgaacatggtccgtagacccccgagaaccaccacggtcttcgaccttctgcttcaattaatactgaaatggaaaactcaccgaccatggactccaacacattgatacttctagtatcccatactaccaacgtacctcctgatcttcctatggcaggcatcaaaatccatgctttaaaccgggatctccagatactgccaatgaactttctgtcaacagatgccttcttcacttcttgtaacaccaaatccggattcaccttactgattgtagccttgattgcctttctcttcatcttgtctccacttcctctacattccaagttgaattctcatattgatctttttggaagcccctctgatttctgacctttctcataatttatgttaaaggtcaaatttttaagctctctattgctcttccttccacctttggaacactgattcttttgattctcttccttctctttaagtattagattcatgcccaattctgccatggattcaactagctccgattcagaaaacaacaaattatctctctcgtctggatcggccatttccattctagcttgctcagtaactagctcatgaggctctgaatcacctttaaatctatcatcctcttgccaaagctccttgatatgacataaaatatcttcattttcttccgcttcttcttcttctacttcttcttcttcgtcttcctcttcagtacaagaaccatcttcctcttccgaattgtcatcttctgagctgaatttgttaattgcttccacacttgggtttcatccttgtccaactcctcaaggtgatcttccccacctatctgctccattacatcaacgctgccagaagaaatgaattttcttttgctaatgtatactttcagcatttttttgctaataatttcctccccaagtaaaactttttctgatgcttgtaatactgagtttgaaataagtcttcctgtagccatgaagtcttcccataaattaatagctgtatttttaaaatcctctcttctcttcggtctaactttcttgagaatgccttcaaaaattacatttagctcattcaaggcagcttttgattgatctgctaagggcacccgaactgcccttttatccagtaaaattgtatatgggcccaaatgtctgtaatttgggtgacccatgtcactgctcaacacctccaatcccaataaaggggcagccacaccaaccggcccactaacaatctgtcccaagccttcctttggccctaccccctccaaataattaatcttgggcctctccccagcatatattcggcccacctcaggtacaatactatcctggcccattttaataaagatatcatcttcatatagctgccacatgtactttaaattaataaaagtactaggtatgaaggacaacctaacacgtggcccttctaggtccctcaccagcctcctaaaaatactatgaatagttatcattcccatagattcttgtgatttctttttgaaaataccaaccgcctccacaccattaatctgcgcatgaaaatcagtctcgatagtcacaaaatcgtttctgcccattaaaatcttccctgaatgagcaccggccaccatgatccccggagctactgagttctccgatgccgactcccctattttttctgaaaaagttgttgcagattctctatcgatctcatcttcgttcatgaaccagttctcagcctcttggtgaacaggaggctcggctccaccatgattctcaacactgccagccactgccaatatttcttcttcatccctaccatctccaaccttttcaactacctccactccatttactccattttttccttctaccgcaggctcattaccatccccaaacaccttgttgtgatcaaaatcttgataccaacaagtaccaaaatatccatgaaacctataacttaaatcattaagtttgaacattttcaattccacccgtttaccttcgtgctctaagaccacagattctggtacaaaaccagtatcatcacccctcaactgaagtc

SEQ ID NO: 228825 - DNA, 577 bp, Cannabis indica
agtagtggtggtacgcgcactaccatgcttgagtgtaggagacaagatctgattttcgttagaaaaagcataaccatcactttggtaacctggcatgcataaaaggttgacgtccgcgacacttcatgatggtcggtatccgctttaaacctttcgaatacctaaatggatatcatatcttgtaagcttccctgttagacccctccggttccaagagaaaccatttgccttctgcgtctgggaaactgaggtaagattaagtaggcttcagtgcatccttttatctcgaataattcttagttccaggaggcttttccatggcagagttgtacgaaaagacttcaattaaggaaggattaaattggtcttcctcattaaataccacgtgtcatacttcataaaaacgctaataacagatagtaaataaaattacactaataaaattgtgttttatgtaaggcataaaaccataatttgcatatataaaatattaatatggtctaaattataaagttcaattttaatatttaaacacaatcaaaattaattactatagttctaattttaatttaattat

SEQ ID NO: 228826 - DNA, 1514 bp, Cannabis indica
atagcttttatccacacgagaaaatttagaagacttagaaataactggttggctttgaaaccaaataaacacttaaataaatggcaacagaaaaactaggagaaaactgtcataagagatgaaatttgagatgagatgtgaagtaaaaaaactcataaagaccggtgttggagatgaggcggacaaataaacatatttttttgtgacattggggccactcgaaggggctgaagcagccgctagtggtggcagtactattgtatttaaaatggctggaatgaccacttgtttgggcagcaatgaagggtggacagtggttggaataagcactattgtgggcaccggtgccactgcttgggaaggaacctgtgatgtatcattagttgagacgttagtttgagaaaaaaaaatcattaaaacatgtatttttaagaggaaaaatatattcataaaaaatgacatctcttgagtgaaatttttggtgagtttcaagatcaagtaaagtataagctttcataccaatcgggtatccaatgaacacacaagcccgagatctcagagaaaatttgtaccttgagttgttcaaggtggaagcataggcaagataaccaaagatacagagatgatcaaaagaaggtaacatgttgtacaacaactcaaggaagatttaaattgaagtaaaatagatggtgtgtggttcattaaatacacagcaacattaataaaataactctaatatccaagagataagcgagattgaaaagtaagagaacgagtgacattcaatatatgttgatgctttctttcaacaacagagttttgttgaggtctttcaatacatgagtgataaggaaatacctttggttgtaaagaaagagggcaagtttagttcttttgcattgtcacatcttatccctttgatggaggtagaaaactgatttagtacataagcataaaactgaggtatgatagtgttgacatcagatatatttttaagcaaataaacccaagtaaatctacatactctatgagctaatattatttctggatttcttttgagaaattactttgagtacagaggaataaatatgaatattcactcaatctaactagatctctccttctaaaaaatgatcgatcattttccttttagcttctgtccctatttatagggtatctaggattaactgttattcttctttgatcttatctaggtaaccgttcatgaaagtaaataatcctcacattttatatttacaataagtggataaaataaaataactactagtaacctcattttttcttttctggaagcagttttgcttttaccaaaataatgcattctagttatggcttgcattactcggtgatgcttagagataactggttgtattctacgagatgttagtttaagtatttgtcctcgctatagacttccaaggcagctctttaggacttggtctctcgaaataagttttaatcatgcttatttctcttagtctttcaacatactc

SEQ ID NO: 228827 - DNA, 1890 bp, Cannabis indica
aaacagaaagatcgtgtgatcaatgctgaatgcaaggatcgtgggattgaggttgagtacactgatagtgggatcgtgtgtatgccatatccacgtaagttgatccctgagttgtagggattgagctgatgactcatgatgcgaaagctaaattcgctaagtgttgattgccctgcacggctcgctgaatatctcattctggatgtgccagcgaggcatcctgttcggtctatcgttccgagcagatgctccaagtggactccacgtgtcaccattctcgtgatgccaaatcagaatgcaaaatttgggataacaccatataattcaatcctaaccctaagtgaagtgatcactatcaaattacttcccattgttagacacactcttgtgaggaaggtcgtactgacatattatgttcttcacaacaaagtccaagactttctttgaggtgacagtatttattggttctgcctccacccacttggtgaagtagttgatggccatagaatatttgactcctccctgtcctgttggaagagatcctacaaggtctatctcccaaactacaaatggccacgaactacttatgagagtgattttattagtggagcccgtggaacgttagcataacattgacactgtttacacttacagacgtaatcaatacaatccttttttattgtagatcaaaagtatccctaacaaatatcccttacagatgaacttatttgacaagttgagctcaaatataatctccgcaaaaggcttcattttgtgagtaactgtactagtattctatttctatttattaaactatgtatatgtagagttatttatatgaatggagagatcatttcttacaactcttttatggtatataaaatcttagctggacatggcatatatatatggaacacttcttaatagatattagttattgatggatactaaataaatttaattataaatattaattttaaaaatattaagctattattcaaatcaaatttgaatctaatggaattttatatagccaatcatatatagtaatatgcataatacaaaataataataaattcaaagaaaaaaaaaatacaactatcttcttctaccttgtttacattattataaattgccctcataaaattaatttttcaattcgaatcttctaaagtagcgtttagttgggaggaataaaaatataggaatagggataagaatgggaattagaatagaaatagaataaaattaaaatgcataaaaaaaattaataaaaaaacttattaaattttttcaagtcttgcattagaatagtctttccttccattttaaaatagaatagtcattccaccaaaatgatgaaaatatcaccatcggattggtattccaatagttttaaatgcaaccaaacaaaggaatggaatgaaaattattgcctttccattccattctatttcattatctcaaaccaaacgccacctaagtacaacaagaaaccaagatatagtaatataagaataagggatattggcggctaaactatctaaactttacgttttgtaacacttaaccacaaaaatcaaaattttggtggcaaaacctactgaactttcattctgttttgctctgtacccctccgtccaaaaatcacagttaagtgttacggtggactgtccacgtatacacacttgtatacgtgacaaatttttagtggtccacgtaatattaattttaaaaaaataattataaatattttaaaaaaaaaacttaaaaataaaaaaaaaaaacttaaaaatattttttttttaactttttttactttttttttaaaaaaaaataattttaaaataatttaaaaattataaaaataaaaaattataaaaaaattat

SEQ ID NO: 228828 - DNA, 1199 bp, Cannabis indica
atgtgcatgtttcaatacttgactcattgtatatttgaatttcaaaggttgaattgagcaactggggtttggtgtataatatgaggtacaatgtgatttatgttatctaggttaatatagttcgttcattattaagcatgttaatgatatgaataaacaagacataaaatcttgatttgggtgtttaagtagaagaaaaatgtcctctaaaaataaacttattgctaatgttgtgaaatattgtcttaacttttgaggtaataatgttatttaatttaatgagaataaaataaagtacttatattctcctattttgtggaatgtagtgaatatgcgtggaataaaatattatacacatatttaagaagttagaaaaacataataagaagttgctttaagaaagtaaaacgtggagaagatctattacgggtcaaccaaacacccttcttttggctttttatataataattaatacacaaataaaaattatacaatattcttacaatatatagtaaacgagatcatgttgaacattctcaacaaatattagtaatagtattctatacgtgcacattatcactattcatatatttgtcaaaaagaatatttgttttgattatttctaaagggtatataaggctatttcaaagtgttcagagatttatcgtgaaatttatattctgatttttttttataaaaatttaaaataaatattatttaaattttaatataatataaattttaaatttttatctccatataataaataatttttttcgccacgtaaactaacttgataatgtaatatttaatcaataataatatctttattgaatgctatatattttagtaataatatgtcaaaaattatgtcaaaatttttttttactagtttgtatctttaaatgctacattatatatcagagtatttcataaaaaaaaaaagagcttttacgctacatactaattttttttttttttattgtaaggttagattttttttaaaaaaaaactgtgtaccgtgttaaatttttgctgttgttctacgattgtttttttagttgttttcactgttgttttaattgttatatttttgttgtttttacaatttatttttataaaaaagacagtatttttataaaaaatttgtgtgacaataaaattgtgaactttttatgttatttgtttaccactaatgc

SEQ ID NO: 228829 - DNA, 2129 bp, Cannabis indica
tctacaaagtttgtgatggaagaggattttagaaaagcaatgaagaagtcaactttaattaaaaatcttaaagacaatttatttagctttattattctaaattttagtttcacatttaaattttattttatttaaataattttattttgaacactttatgttcttcaataaaatttatttaatattcaatcttacgtgtgcaaagttaactaaagacttcaatactcataatatatagaattttaaaatcaagtttaaatgtgtaaattatttatttgttatttattttgactaaataataaataagtaactattttctatattaacttatcaatatttctacagttaacttatatgtatttttggtaatgctaaagatagattagatggtatgttacgtgcctactttaatcatagcacctaagttaactttcctttcctttttgaagcgctccacactcttcataaatgaggttcgtaggtttataatttcctacctacgctttaaatccatataacttttctgtcaaagagttccacacctctgataggtgaggcttgtaagattatgatctcctacctatgctttgtattcataaaatatttttattgtggtagaactctgatgatctaaacaaattttgattgaacatatcagggctttataactcaaatcatgagtcagatctaacaagtactttcttagcatctcaacatgagtacattacttgctccaccttcttaaggttccaatagccccaacacttagagtttacttacccttcttcctaaaatgcttcacctctgcattggtgaaccttgtaagaaaatatgttctccttcctaaaactcaatgtctctgtgcttaggaccaaaatgacttttctacttactttttgaaggaagcatccgagtcttgatcttatctattgtctcattagtcctctgaactaactaaggacccaaatatttcctttctcccaatgaattgaggaatgatattatttccaaccatacaacatgtcatagggattcattcctattgtattcttatagcaattattgtaagaaaattctattaaaggcaaatatttattccatgaaccctcaatgttcatgacacaagctcgtaacaaatttaatttctagtatctatatcatccctctcagactgtccatcaatctgacggtgaaaagttatactaaacttcatcttttgcccatagctctctgaagacatacctaaaactttgatataacttcggatctctattcaaaatgatagatttcgaagctttatggagacgaactatctcttttacatacaactttgcttactgatccatcgtataagttgtctttactggcaaaacgtgtgttgactttgtgaaatggtccactatgatgacctaaactgaatcatacattcatgtggttctgggtaaacacaccacaaagtgtattgtaacatcttcccacctccactcaggaagtgttagggtttatagtaaccctgccagttttttatgttctgccaagatttattgacatgtcaaatacttggactcatattctaccacatctctcttcattttgcaccaccaataatacggtttcaaatcctggtacatcttggtagtaaccaggtgcaaagaatacggtgtagtatgagcttcatctagtatttttttcttaaattcaccactgcttggtacacacaccctagccttataaagtaacatcccattgctcgagattgagaaatccttaggtcgactagctaagacctcttctcgacactaaattaactctgcatcttctaactgaacacttttgaatcctttatagtaagtctaattgaagtgttaagttatgaagtttcccaactacaaattcaataccagctttgaccatatctaaagccaactgaggtgagatcactatggtactaaaaacttacccataaccttttctgctcataacatctgccactacattgacttttctatggtgacagaaaatctcataatcataatttttgactaattctaaccaccgtctttatcttatattcaaatttttttgagtgaagaagtacttgagactcttgtggtcagtatagatctcac

SEQ ID NO: 228830 - DNA, 1048 bp, Cannabis indica
aatggtatttaccctataataattcattttatattattgacaagtcctcaattcttaatatttatctataataatttatgatgtagagtcttatatattttaatttaataaataataaaaaattattattattgtatcacattcatgtggtgtttcacactttaaaatactatcataacaaacactccatatattcaaatgttataagttcaaatttgagtctgatagcttagacatcttaattaatttttctctataaacaatttggaaactaattttatgtgtcaataatgagtcattgtcatatgtatgactacatcgaattgaataagtcctttgtaccaaaactaatatgtggtgcacaacacatagtccttacttttgattgcattaaaaaacaaatacataatatgtggtgcacagctttgcatgagatattcatgtaaaataagaaattttgttccaataatactctatgaaaatcatgacattaacttatgcaagagtttacatcttatagttttgagaaatgctaaaatacacttatagtgtctaacactcttataaaatataatatcattattgatgtaatttaatatcagattctacttgctatattttaaaaaatattataaaaaatcgctagctaattataaaacaacacttcatcatagtgcctcataataatgctccataatttttcaagaagaagacttagatcaccaatgcaaagtaatttcttcgagagattttttattgaaatgtcaattcggggctattttatcggtaagcaatgcctattgcctaccccgtaagcacttttattggagttgttcttacaaactcaaagtaataagtgtaatatagattagcctaccaatgtactaactaatgtaaaaagagtcattaaagtgtcgtgtaaaggattggagaccgttatatctgttagtgacttattagttaagttaattgctaagctggattggaccgaaggctttacataggtctcttctctaccccaattcacttcactcaatcttgtaagatt

SEQ ID NO: 228831 - DNA, 1533 bp, Cannabis indica
actattactttatcatcatagtgagactgagaccaaagattcatataaaataaatttcctaaaattacttttaatattgactagacagttacattaatcatatattcaacaatgaatatcaggaatcaaatcaaaaatagcacataagaaactatatatataaataatatataaatatataactatatacattctctattttccaaagttagtgacgttggaaaaaaatatcagaatacacattagaaaaataataaaaggagagtttatgtgtgtaacattaactcaaataatctcctcacctcatataaaaaaatcccttacacaagcacaaaaaaataatttgctgcacgcatgaacaaaagggtacaaataaaataaataaaaactagtcaaacataaatgttcataataattaaaaggataatttgcagctacactatttatacatttagatttggtaggattataatcttgtagactgaaattttgagagtaaaattctccaaatttcacatttgttttgatttccactatttcattcactttgatttataaagctataaaggatgcttgaggagatagacacacttttagcattttttaattagtgcttaccattagaataaaaaagaaagacacaaaaaaattgtcataccataatattatttatatctttttctttcttatttttttattattatttatcataaagtaagaaaatttatttgtttattatatattaaataataatataatattatttttaataatttttaaaaatgcttattattgtattattttagaacaaaaagtgccaaatgatagtcaaaccaaaaaaaaaaacaatctcttctcctaaaaaacaaatctcatgaaaccacctcctaaaagcctttaatagtcaaaccaacaatctctttgtatacggtcgttggcgacaggtttgaatttgctatggtttgctttgtcagaagctcgagcaaaaaattgggcaagagtttcgaagagaaatcgctcaaatgatacatggctattgacgatcttaatcgccgtaatcgactcaatcgcacctttgggccaaatagaatgggttgtcaaccattattatttgtttaaatttgattttagttttgtttattatttgtttttgttgatttgggtttgaaaaataggaaatgatggtggtgttagtgggtagtggtggtttcagtgatggtaagtggttgtttcgatggtggtgtgtggtggtttcagtggatatggtggtggtgaggtgataatggtggttgtgttgtgatggtagtgatattgataatggatggttttatagaattaacatgttggaatttattttaccaagattttaatttattaataacaaatatatttgtttatattcattataatttaatatcctaaaatatataaaattcataaaacaataattaaacacataaaatgaatagaatcctcacattggttgcagcagaaattaatgactctttccattcaaggagtgttcattaactg

SEQ ID NO: 228832 - DNA, 2283 bp, Cannabis indica
attttagaattgggggttagttgcaaaaacttccatactttaggaggttttgccgcaaataaccctaaatagttttgaagaattggagccattatatgtcaaagagtacaagaagttgaagaatggtaagctttggtgtgttggtctggcttccttatgcaacaaaaatgagttagataacgctcaaagaggtaaaaagtcttctattgatgaacatgagtgccttaaatggcttgattcatggagaccatcttctgtcatttatgtttgttttggaagcatatttactctaacacttgcacagttgatagagcttggtttaggtttggaagcctcagataaaccattcatttgggttgtaagggaatcaaagactaatagatatgaagaactagagaattggtttaaggaatatgaatttaaagaaaggactaaaggaagaggtgtggtgatccggggccaggctccacaagtgttaatcttatcacacccttcaattggagcattcttaactcattgtggatggaattcaactcttgaagcgataagtgttggggttcccatggtgacatggccactatttgctaaccagcttctaaatgagaaattggttgcacaagttttgaaaatagctgtaacattggggtcaaagtatatagaacaaggagaagaggaccgaataatggtaaagaatgagacaattaagttgctatagagaaagtgttggatgaccaaggagaagaaagtatagagagaaggaaaagagctaaaaagttaggggagatgggcaaaagagttgttgaagaaagtgggtcttcacaccacaatatgactttgtttctagaagaattaggtgccaaaagttattagcatacatgggaatgtaaaaatttaaattaaaaaaaaaaaggacggatgtacttcttctgtttcttaagaaaattttgtgacataatgtccctttgttaaattgaaaacaataatttatttccacaattttttttttgttttgtgattgagtgatatcgtttatttcgtggttttgaactaatttgaattgtgatttgaggtccttaaaaaatacaaagtatgattgcaaagaacgttaatgaattacaaaaagtaccaaaataattataattcattttcaattttttagtaaataaaaaatagtaattgttcaatctagtaagtagtagctaatttttccgacgatttagaaccgatagaaaaaattgttagttttacgttattaaattaagtacgttgattatcattgtaccatagctcaatagatgtatactttaaattagaaaataatatatacatcttgatgactatcaggtatcctcaaaacttattgtaagttgtattcttttggttgattagtgtggaatctcaacacatgatctagaactgtttgagataaaaaaaaataattttccttttctcctcttggtatttcgaaaatagcagtatgaaaaaatttattttgatttctcaaattaggcttctatttatagtagttaattcctaattaattaaatcatatttaattatttaaataaatatctataacaaataaataacccaacgactgcagtagcaggcgctgatgtctctctctctatctgattatcggaccatcatcgccatctccttggaccaccatcaatagatctctccctccctccctctctctcgtgttaatcgtaaactctctcctatcttctttttgtttttctcaagcgtggggtggtggtggcttgtctcagatgtgatgagattactgttgtattattgttgttgtggatctgaaattattatgcattattttgtatgtgttagtttgacattgatggataaagtattagcgaccatgtagaacagttacctatattccttactgtcggttccaaaagatcgataatgctcaataatgatcgtttgtaactgacacctattctgtcccattttgtgtcgatactctgtagcataggcatcaatcttatgaactaacataaaccaacacctattccatctcattttgtgtcgatactcagtagcatagacatcagttttacgaactaacgtatatccaattatttaaaatagtcacataaatcctttttttagtagtgcaatctgactgagaatgaaagagtttcataagaaatctagtgatagcctgtttggcgttatagtttaaaaatagtttttactttttaaaatgagaaaattgcattttaaaaataagtggaggtgtttggctataatttttaa

SEQ ID NO: 228833 - DNA, 974 bp, Cannabis indica
gatcaacttatatggcatcatgagactaatggcatgtattcagtcaaatctggttacacactggctaccaaacttgaagaacagtagcctacttcaaacaaatctctcctttggtggaaaaagttctggtccttgtcattgccttcaaaaatcaagatttttctatggcgtgcaatgcatgagtgtttcccagttgctggaatccttcacactagacatatcagtgattctgcaacttgctctttatgtcactgcggcaatgagtccatcactcatgctctatttttttgcaagagaccacaaaaaatctggcaactattctccttttcaataaacgaattcatgtcacataacatgtctcttatggatctaatgcagaatgtgtcttcgatatggtcttctaaacaaatcgagcagtttgctactatcctttggaccatttggaatgagaagaacaaggaaagacatggatcaaaaacaaagccacctgaaattgctttgtattttgcagtagattatttggaagaatatcaagttgttcggcccaaaccagttactgctactacttctgcagcttctactttaaatctacaacaacaggattctccttggatgaatcctccctcaggccgactgaagttaaacactgatgcagcagttagcacaatggaaaataaatctggtttcggtactgtccttcgcaacaacacaggagacatcatagctgccatggctatgccttttcaaggacagtttaaaccagaaattatggaagccatggctttgatttacagcttgcaatggctaaaagactttcaaataccagtccactatatagaaacagattctttattagtggtcaaaggagtgcaagcatctcaaagacatacttcagattttcattgtctgttaaataatatttctcttttagtttccaatttccctggggctcagatctctcacatttatagatc

SEQ ID NO: 228834 - DNA, 3374 bp, Cannabis indica
ttttgacctgccaagttacttgctggcagatttgatgcacagatgcatcctgctgattccacattttgtcatttctggctaaccataatcggtaaaccagggcagcaagagatgaggcatacacctgcttcttaaacctgctcattttgctccttcctatccaccttagcagcccctgtacataattggtttttgcatgccaattcagccattgcttgagctgagagacgcatgaactaggaacccccacaatcaaaaaacaagtggtctcttgtttctactgcaacattgcagaaaatacacaaaggactctctattattttgaatttgaacagccgattcctagtttttaatctgtcaagtgtagctagccacaacacaaaactatgttttgggatattaagtttgcaccatacctctttgcatcaatgaagttgctgctgatggggagtcaacatcttgtagccatctgctattttgtactctcctttagtaaattgatcacaatctgccataatcttcaccttctctttggcctcgaccacctttttccagtaccagctgcaatttgatggagctttatagctccaccaatcctcttgcttaatatagacacaatggatccactttatccaaagattatctttcttgttcgccacaactcatacatgcttcataatagctgctaagttccattctttaatatccaacagctctaaacctccttctttctttgttttacacaatgtttcccaggctacactacccgatccatccatatagctttgacccttccataagaagcacctacagattttctcaatttcagatattaccttctttaggaggatcagaatttgggtccaatatgtgtggatagtcaataaaacaacattgatgagcaccactcgacctgcaaaggacatattccttgagctccatgtgtgaattcttgctgtcattttttgaatgagacttgtacattcatcagctgagattttttaagcacaaataggtatgccaagatacctaaaaggcacattctgcctgctgaatcctgaacagtccaacacccttttgacctctgattctagcattccacaacagtatatagcagattttgatttgttaggctgcaaacctgatgtctcagaaaaaagtttcagcccttggagcatgtaataaatactcttgaaatcacccttgcaaaataataaaacatcatctgcaaaactaaggtgattgagttttagttcagcacatcttccatgaaaataaaagtcctctttctgtccaaccaatttcaaaatcctgctgaggtactccattcccaatacaaaaagtaggggagacatagggtccccttgtctcaatcctttcttagattcaaagaaaccatgggaggttccattgaacataagagaaaacttaggagtcctaacacaagtcattaccagacaaatgaatttagatggaaaattaagagcattcagcatctcctctcggaagtcccaatctaatgtatgtatcataagctttttgcaagtcgagcttaatcatacaattcggccttgtagatttcctaccataatgtcttatcaagtcctgacatatcataatattatgagctatatatctaactctaacaaaccctccttgattttgagaaacaatatcagagagaattagtttgagcctagaacatataagctttgtagctattttgtacaggacattgcaacaagcaattgggcgatagtcacttacagtgttaggacatctgacttttggaatgagagtaaggactgttgaattgatctcctttagcagcttcccagagtgtaaaaaggaggtaattgcttcaggtatatcattgcctacaagatctcaattatcctggaagaaaaagctactatatccatttggcccaggcgcttttgttccaggaatgctaaatatagcagccttcacttcctcttttgaaaattctgcttccaacaaggatatatgctgatttgatagaaccggcccctgcctaataactttcatttgtaccctcttccttgtttccatcttaacattgagaaaacttgtgtaatgttgcagaaaaacatcagtaactgctatcgggtcatcaactcgttccccatctgctttttcaatagagatgatgttgttttgcattctcctctgcctgatagaagaatgaaataaacttgtattcaaatctctattttgaacccaattcagtttagccttctgatgcaaaaaagagctgtaggctgcttgtttcaatacttactcattccttgttgctagctccatctcttgaagctcaaagtttagtggatctgcttgcagcgctttctgagcttcagttagcctgtctctagcttgcttttcagcaatgtggatctcattaaagccctccttattaatctctttaaagacacttttcaattccttcaactttgtgactacttgaaacattctcgtaccctttttctcctgctgccaaatttccttgattctttgatcatattgcgggtgttgcttccacatttgaaaatacttaaagggttttcccccgctgaagtatccggatatatactcaacacaacaggtgtatgatcaaaaattccttcacagagaaaaacagcctcagcattcttgaatctgtctagccaagcctgattagctaagacccgatcaatttttgagaaaatacagtccgatccctgctgcttattactccaagtgaaaaaacttccactaaattttacatcttccagctgacaaatatttatacaactctgaaaatccaaagcaataaaccgagctttatcaccaatcctttcctcttttgacagaatttcattaaaatcccctaatattaagtattaaccacggctcaactgtattacatctttgtagctcttcccacagtacagacctcccattagcattgttaaaaccgtaaacaaaggaaacaaagaaactacctcctttatctaccattgtaacaaacaaatgaactagctgactagagcagctaataatgttgactgtgaacttatgagaattccaagctactataattcgacctcccttatgccacgcattattcgccgtaaaacaccatccttgaaacatatttaagtataaggctcccaactttgaagccttaattcttgtctcgagcagaccaactagcccaattttctgatgagcaataaattgcttaaccagattttgtttattaaggctattgatgccccggacattccaactaagaattctatccattaagaagaggaggatctccccctccttttgtactatcactacaagaaaatgtgtttttgccggcgcat

SEQ ID NO: 228835 - DNA, 1463 bp, Cannabis indica
aaaaaaaaaacttataaaaaaaaacttataaaactttatgttcacaatacatatgattttaaaatttttatttattatttttttttaaaaaaaaaaaaactaagtatatataattttactataaatatttaaaagaattcatgaaggatttctcttttttttaaaaaaataaaaaaaataaaaagcttaattttaatttttcacccaaattaaatttccaaactgcttagattgctctggctagacacagacctaacccacctcaatcaaaattaactttattaaaaaattactatatatttaagtaataataataataataataaaatatgcaaaagaaatttttattattaatattattaatttttttataatattattattattactagtatggaggcagtgcgttgcactgagctgattttttatatgcgaattagtagttaatacaataatttggagacagaaaattcagaacattgcataatatataatcaaagttactactctttcaacttctttctgaaaaagacaataatgtaatttaagaatataaatttgtgagtttgaaaaagaagaatgaataataataatgcatgggaacgtctctttgttttaaacgctatattgagattgattattccttcagtgacaattttttggagccaaaaataaacattgtatagacactgtgttaaagcatatttatagaatttctctagttgttgatgtatttgcaattcaatctcttctataaatacaatatgagaactacagataagaaatagaatctaatagaatctcctataagtgtagaatctaagattggctacaacttgaaatttccaataccatttctctttgtaattaatctattcttgaagtcatatcaattatgttatgaaacagtaatgaataaactgaacacttctttaaattcatatattgtacaaataaaattcacaatattattgatcacttgaatcacttccttgttagcttaaggactgaagcagcaatttcttataatttatgaaaaccaaaatcatatcaaaatacatctatataaaaaagacaatagtaaaatattacaaagttcttcataaaaaattgaaatagaagaccatgaaatgaatcagaagacattgtgttgatgatctctatctggagaagaaataccccaaggaagcaaagattacaaaaagaaaatagctctatacccagttgattctatcactcgaccttaaaaataaatataatattgtaactaattggaacaagaacaataacattgtacatagaccaaaccgaaatggccttaaatctcaaacacaataacaataaactaaattcctaacaagtgttacacgtactttagattcacaattttacgaaatatacaattacctctttcttgttaatctcatgcactttcgattaaatatgtagaaacgctgaggtaa

SEQ ID NO: 228836 - DNA, 995 bp, Cannabis indica
aaatttgacatgtactaaatcatgctttttgaattttagtttgcaggttaaaaatttccttgaactattaagattagttggattttaaagactttttaatctaattttattgaattttactaattcagtgattgtttatgaactaaatcatgcttcctagactttgatatctaccaagtcatgtccttgaacttcaacatgtactaaattatgtcccatgaactttcatccatgttagatttttctattaagattggattaaatctaacaatctcaatagttcaagtggcatgatttgttacaaatgaaaattcgggagacaaaaatcctaattagccttttttaaaatagtacaaactagtaccataatatcatatttcgtaattttttttaacataactaacttgaagtcaatttatagcacaaataaatgtaaaacatgtaaccaacttacttaagcttagggtaaccaatttacttattagtttctagcacgatagatattacatcagatttgctttctctagtgacaggtattaacaagagaaatgtgtatttcaatgagttaggtgtgttgtttcgagaatattatagttttattatctaaatttttgggaggcagttttatcccatgtggctcgtgacaagaactctacaactaatggtttggcaaagtatgtccttcgattagacgatgagctattctggttcgataaggttctaaaaccgattgcagatatttgcatcataaattcttgagtaattatgatcatttcgtaaaaaaaaataatatgcttaggatattatcttaagaaatgctaaaaggcactcatgtcgcatagcattctttttgtgggttatgatatcattattgatacaaattaatatcgaatcttaatttaacaaactttataaaaaattgcttattataagatatcattttgtaatgttgacaaagatcttggtgtccagtaacaatgttgtattattttata

SEQ ID NO: 228837 - DNA, 1754 bp, Cannabis indica
ttggaaagaaggatccaacaagcaattaatattgtagattattacagaatatttgctatccttgctgtctttattaaaaatccgacataagtatattgatttcaactatatttgggataatttgacctccaaactttaaaggtggaaggttaaaactattcaaggggggaagagcttctctcatcaaattggttggtcttttctttgctagtttacactatgcaaataactaagttgccttcccactttggagctaagattgatagtaaagctttttgccttgaatctttgctagtttacagatttttggtgggacaataagaaaggaaacaaagccttttgccttgaatcttagggtagcttgtgcttgtcgaagtctcgtggtgatttgaggtttcgtaaaattgatgagatgaagtaggactttttggctaaatagggttggcaattcctctcgggcgagaactcacattgttctcaaattttgagggccaaatatttgacacattcttcgttcttcagctgtcactacaagaactctttttcttagttttggaagaatgtgatcaaggcagaagatactcttagtagaggagcatgtaagattgtgggttcaggctataacataacatctaggagcacatgtgggagaaaatttgattatctatgcatacattagtgggaaattaattccctaagcttatatgtatcaaaaaaaaaataaactctcatctctctacctccattttctctctcgctctcttcgtctaatccactgcccaacccacaaccaacgatgatccaccgctccaacaatgctcacgaccacccaataatgggacccacgaccatcgatgacactgacgaccatcccaatgtctaaggtaagttaatgtgttgaattttttagtaaaagagtttataggtttcttgatttagggtagaaatttataggtttattaatttgtttgtgatttgttagtttgggttagatttaggtttgatttggggttagatatgtgttattggcaagaaatctaattttttaggttgggcccaatgtaggcccggtgtagggaccgatggaccgataccatgtgttgtaaaaataaaaacaaaggttgaaggtaaaggcccgatgtaggctcgataccaccttaaatcttgataatttttacttagacccaatgtaaatctaattaagggcgatggtgggcctaatacctcttattattataattattattttataaggtggttttaggtccgataggggacgataggagatcgatagtgggtttgataggggataataggagcccgacttctagttcaaaaaataaaaaattatcccttattaaattcactatccgccctctatcaaacaaaaatttaagtttaaattaatgttgatattcacttaaaataattttttttcaatccacacggaaatgagtctatgacaagatgcataaaatcttcaccatagcagaaaatatgcaagtgagttttaaaaacaacaatccttattataacaacaatattcttaaaaggagacaacaatgtttggtaagatattatgtcttcttctcttcaagccaattttacagtacttgttctattgatttattatttacatgatactttcataatactatattgaagatgctaaggtgtcgtttgataacacttttttaatcagtaatttatttttaaaattaaaaagtaaaaatattttttaaaaacatgttcta

SEQ ID NO: 228838 - DNA, 726 bp, Cannabis indica
tctaaataacaaacaatctaacttaattactcaaaaccagtagcaaaacacacacaaaaagcaacaagaatagtatccaaaacagtaggaattgagccaattatacaaagtatgggagccttagcccctctgatgcaaagagtaatttgctcaatacattgcatacccaatctttcacttacatacctatatgaatagtttctattctcactcacaaacccaccctcaatagaatgactcaattaccctttttatttaatatattctaacaaaattgaaaaggttttgatcactagctttaaatttgttctgttctcctactaaagatggaacttgaaactaatgcaataaacctggagacaaagctaataagcatgtaccaggattatttataacattcaggaacatgggtttaggtgttgaagagcaaatattatgttggctaagatgagaattaagtactagagttcaaaacattgaagagtgtcacaaccaaataagtataaaattcttctggcaactcatacctcaggtccctcgcatcaaacataacaattgatcataacaccttgaaacagcatttaatgacaaactaaccaatcttttcacagatggttacacttatggattatattctagatttgatctttcactatctatcttattatgccatgacaatcattaaagaacaccacagatagtcatattaatcaatcaataagaata

SEQ ID NO: 228839 - DNA, 2046 bp, Cannabis indica
agatatttgatctaatggtctaagaataaaatacccatacatgggtaatacccattaagagcatacccatatatatatatatatattacatatatacttaaatttaaatcccaatataattttgaaaaaaatatctattacgtttgaaatttttatcgatcaagttaaaatttttaattttagattatttgtgatgatatttttttcgatatttatttttctaagggcttgaatttaaattataaaatattatctttaatttaaaaaacaatcgtctaactcatttgactttctatatatatatataaatacatatatattgggttttcaaccaaattaagctagggtactacgtacaatccatacatattctaaacctacgctagcaccaaagtctttgagctgatcattgtgaaaaactaattaactcttcgtttgtttcctaatacaagggtttgttattgggtatatatatgtttgttttgtacgattaatcacaactttcttcattccctcaaaagtagtctttctttgagattgatcaagttgttgcatcccctcaatcaaactctctttgccttttcttcttcccttaattattttggtttctttactccaaattgtcatcaactcttgtaaatcttccaagtaatccttgtaacgatgataaagatatggaatgttgtacttgaatgtttgtcctgaaactcattagccccgtttggaaatgcatttggaatcttcacagttttccatgctaaatcaattgcaagaataagagaatttatttctgttatatatatggttagagtcatcatgtcatatgctgatatacttattaaatcactttgggatttgttgagaaaaaataattaattaatcatatgatcctagtaaagtgagtgattgtaccttaattataaatcttatttaacaaactatgaatctaatacagaggaaaaaccaaaaacaaatacaatcttgaataaaattcatacaaacaaacagacaaacttttaacacacatctttatgagtactaattaaaggtaaggtttgtttcatattgtaggaaataaagcattccaaaactgcccctacacctacaccccaaagatcaaaaacccaaggtcaaaaaggacctttaccaagcttgtgcggatcaagacttggtccctcaaaacactgcccttttgatggctttaaaaaccctcttattgttggctgaaaccctagcagccaccacaatcacttctccttctcttctaaccctagcagccgagatacccccttcatcctctcttcttcttctcttcttctagctttgaaaccctagcagctgaaaaccttgttcctccttcaaccttcgaaatgcatcaatcccttagttcttcttccttctttcttcttgttgcaaaatatagcaccgaaccttctttctccaagctttaaacctgcagaaaaaaaccaaagaacaaaactagagaacaaccgaaaataaaactagcaaaagaaaaatctatagacaccacaacaatttatttcagagttccctctaaattagaggtacgtctccgtcaagcgaccctcaaagttgcttgagtctccactatgaatgttaaaaccgagttgcaagattatggagattccatgtcacaaaccagcaggtaatctctaagcttttctcttttctttcactcttatttttggtttgattataatagaactctccaactctttctgtttatctctcttgtttctgaggtgtttttcttcatggaaaaatgctgctgccactctctatggttgagtcgaatatccccttcaaatgggcaggttgctcctttatttatagtgtttgttgactgtgattttgttgtgtttttgagctgagaaaacagttataaaaactgttattgatatttccttgtcttgctgaaagttggttagagtcttgagatattgttatttacttctttattgtaaagagcttaaagatctaagtctatgaaaacagaaccgactactccaagagttataatggtct

SEQ ID NO: 228840 - DNA, 793 bp, Cannabis indica
aaataaaataaattatttaaaatcgttgtaaattgtaaataaaaaaacaatcatttcaatttaaaaaaaattgtaaataaaatatatttttctctttcttttcgtcaaccttcttcttcatcttaaaggctccagcttgaatgctcccaatagtagctaggccaataacaacctgcaaatccagagcaaacctcttctcactatctctctctctcgatgggatatgcccagagcaaaccccaaactccggcgaccgattgttgaagcgaaccacaaaatcaaaatcttcgtcccccaaaatctctatattcgcccctctctctcgtttattggtggagatgcactcacggagaagtcgtcggtaatggtggagatgcactccagcatgcgtttagaccacgaaatcgagatctacgaccccaaaactcaaatctacgcccctctcccgtctcttttgttttcctctctctctctctattttttttgtgcgggttggacgtagacgaggacgacgatggggttcgtcgctcgaaggaaatagggacatatttgtgggtttgcggttcgacggggatggtctgggttcgtgggtttgttgtttgatgatggggacaatattcttggttcgacggggatggatggattcgtgggttcgttgttgcgcttatggtgggtgaatcaggtgatgggtgatggtgggttgtggagggtggtggtgggtggtggtgggtactgggtaatggtggtgatggatgaagaagaaggttgaggaaaagaaagaaaagaagaaaaa

SEQ ID NO: 228841 - DNA, 785 bp, Cannabis indica
ttttttgttatttttttatatagttttttactttttcatggattgggggaaggtacagacagacaggaggccgaagacgacggagagacttgtatataacaaaaattaatatttatattaaaagatctttaattaattattaatttattatttattatataaaataaaaaggcagttttctcttgtggatgtagggggaagcaatttttgcgcgcgtaagatgtctgacggttgttggaaatgactagaatgcccctactaatttcatgtaatgacagaatgtccactcgttggattgtgggtagactggagcgggtgcagagacgagctacgcgtgtccagttttagtgcgacataaatatatgcgttggccaatatgaaccgttgaatcttaaaaccttcaaattaactttcaaaggaattaaaaataataaaatatctaaaaacaaaaaataattacaagggatgtattgatgtactcttatttatttcggcatctagcaaagatatcctataaaattttaagaaatttagaatgattacaagagaaatttgcggcataaataccttatgttttcgattttatacacttaataccacatttttttttagcggattaaatactaaatgttaatttccatccatttccgttactacgattatgttaaatgctaactgtgattattagagtgacacatgtcatattttcattggtccatccatattaatttaaataaatatttaaatattatttaaataaatataattattaaaaaaattataaa

SEQ ID NO: 228842 - DNA, 1839 bp, Cannabis indica
tctcaaggttaactactgatggtgaacatgatgtgaactcagcatcatacttgtatggagctttggtgatcctcatctctctgtccctagccaactgatatccttccaagcttgtttgagcatcttttgtggttgtagaatcatttagatcttcttgtgtttcatcaattaaagatttagacactaagtctacctcaatctgaggtctactactccctatttcttgagctaaagtaatatctgtcttctttgccatggccatttattcttcattgaagatgacatttctactgataatgcacttcttgtagccaggttctacacaccacaatttataccccttcacacaatctggatagcctagaaataaccacttgagtactctaggctgaagcttgtcctacctaatatgagcataagcagtgcattcagacactcttaggtgttcaaacttaggtacttgatatgtccacaactcttgtgtagtcttaaaattcaatgggttagaagggtatctattcaccaaataacaaggtattttgatagcttctccccaaaatggtctttcaagactagctcctttgagcatgcaccacactctctctatgagagttctattcatcctcttagcaagtctattttgctgaggtatgtctcgcagtgttaaatgcctagcctttccatgcagtttgaaaaattcatcaaactggtttgagtaatattcccaaccattgtctgtacttaacttcttaatcttgcatttggtctgattttcaatcagtttcttccatgtgacaaaaggtgttaaaagcctcatctttgcttttcaacataaatactcacactttccttaaataatcatctataatattaatgaaatatctagcaccacccaagggtttaacttttgaaagatctcagagatctgaatgtatataggtgaaccttttcttagtagtatgcacaccaatgctgaatttgattctactactcatcttctcatatacacattcctcacaaaacttcaatttcccttccagtccaccttgaaacaagccttgcttgtccatttctataagctccctttcactaacatgtctaagcctctaatgccaagtcttgatgttttcaacatcattcttactaacttctggagctgcttctccaatcaatgcattcccaactagatagtacaacccattcttaactccctttaataaagatcaaggaaccctttgaaatcttgagtgtaccattataaattctaaatgaatagccatgattatcaaacatgccaattaataaatgattgctctttaggtcagttgcataccttacttgtttgatagtttgagtgaaaccatcatgtagcatcaaattatagagccaatttcttgaatttgacatgccttgctgtctcccaacatcacagttccacctagttttcaatgtagctattgaacaagttcttgtttagtttcatgtgaaatgagcaccctgagtccaaaatccactctccaccttattttgaactagatgcaactagtacccttgaatattcatatccatctataatatcagcttctccttgattcttgttcttgttctttccttgactgttctctcttttcaatttagccttttatgccagacagtcatcttagaagtgtccatctttcttacaataataaaacttctttctagttggagttcttgagttagaccttcgcttgtacccattcttagatttcttaaattctttttcccttacttctttctacgaacaaatagaccatcaccacttgattcaggtctctcatcaactttttcttgaattcc

SEQ ID NO: 228843 - DNA, 1495 bp, Cannabis indica
tagatagatattcaagaaaaaaaaaacaagaaagaaaaaactagtgtatcaatctaataatataagaagagaaagagtgagaaaaacaaaataatacatgtaatggcaaaataaattgggtacgtataaacgtgtccaaacaaattttaaaaaaatctaacggtatatgctataattaaatagatagtgttaattgtgatatttatttcaaaattttgtcactaagcgtaaatttctctaatatatttgtttgtttttctatttacacatatttgattaagtttccattggaattaattacaccaaaagagaaagacaaaaaaaaaaagaatttgaagctcagaagtgctttatttcaaccaaattatgataattgtgatggacccctccaacacaaaagcacaaatatcatcatagcttagtatttgcaccagccgggaatccaacccgggtctgtaccgtggcagggtactattctaccactagaccactggtgccctttggttttgttacatactattatatatcttggattcaaacttaaccatttcactttcatatataagacgctataatatgatcactgatcaatgttcgatttttcttttgtacttatataaaaaggaccagacaattaactaattctgtaattatgattcacaaattagtaatagcatcagaataaaccatctatataattatagctcatatgtgctggattgattaattgttgtagtttcttatctagtaatttatatatagttaaagtttagtgtgtatccttatattagggattccttcaatctaatttctgatgggtaatggttgtttcaaccatgaattacaatggtaatttttttacttaaggaatatgtacatatttaattatgtatttaatgtaagattgattttttgtgtcttgtttatacatccaaagatgccccataaatagagctctatctcattatttgttcatcccatcacaaccattacaagctattccaagagtgaagagtgatgctacctcttagtgagagaaatctaagagagaagaaaaagaaaattcctgtaaaattataaaaaatattttgtagagagatggtgagattactacactagtaagtgtgagagttttgagtgtattcctcaagtatttgttaaaacttgagagtgtaatattatgtacctattattattgttatagtggaatatttaccgtagtttttatttgccacgagataatttcttggcatgcatttgttactttgattattattcgtaaagtactataacattggaagatattcgaaaattctgaatatgctctgtgattgcagctgtgactgatctttcacatcagaaaaaatttttgtagtccccattatattttcccgtaaatattgattacgtacggcgtaagtagttctgtctaggagactggaatttaagtagttcacttgtgattctccacgtctatcctaggaattcacttata

SEQ ID NO: 228844 - DNA, 1859 bp, Cannabis indica
aaaataacttgtttagagcaatatgccctaagccactagggctagcttagtggtgagggagggatgggaaaatggagaggttatggattcgaacccaagacctttaagctacaagctattaattgattataaaatactattacgctacattgaaaaaaaaaaaaaaaagagcaatatgcctaattaaaactaaatgaattatttcctttcttttttgtgtgtggcttgtatggcttgtctatggtgaatttatgcgcattcttataatgtgaatatatgaattatctccttatgtttttttttgcactttataatcacttttgactaaccacatgattttattctactcattggtctaccaagagaaattcttcatttttaagtagcacaagtatgtccaataattctggtaggcataattcatcctcatgtggcatgtggacatgttgctctcatgtggcatgcgatataccatttcatcataagttgctttcattattttaattttttagtaagtagatcagaaattataacattttagctttttttttttttaaataacaacaagtatatgtgaacatgatactttatcttcttgaaactttttacccatgcaatttttatcttgaataattactataaatatttctcttccttcaattacttttaaaaaatggtcttccaatatctaacttgtgaaacatatgtaacataacaattaataaatagtatgatgaataaagttacttggtacaaatattttcagtgtatttatacttttgactaccaagtaacttttccaaaataaaaaggttctttgtttaaaacgactcacatctcaacaaactctaccttgttcataataagtacaagtaccaagttactttcaaaagaaaaataaaagcttaaaattcaattaccaagtgatttttccaaactaacaaggttcattttttcaaaaatttactcctagctcaacacactttactttttataagtacaggtaccatgttatcttcagaagcaaaataaaagcctaaaattctactgccaggtaaattttaaaaatatcaggattttttgttcaaaaatctgctcaaaactcaatactttcaaccatattaataagtccaaatacgagatttcttcgagaatcaaataaaagtctaaaaatcgactaccatgtgactttttaaaaatatcatggttctttgttcaaaattacactcaaagctcaacacactctaccatactcaaaactagagcaggtaccaggttactttgagaaacaatataaaagccacaaaataccaagttgcttttccaaataacaagatactttgttcaacaatacaatcacgactcaaaatatgctttaccttattcacagatatagtaccaggttacttttggaagtgaaatcaaaataactgtcatgactcaaaatactctaccttattcaaagataaggtaccaaaaataaatatcatgttactttttttcaagtaacaatttgataaaaaaaaaatacgctcaatgctcaaaacacctaccccttatttagagaattaggtaccaggttacttttagaagcaaaatcaaaacttaaaatacaaaactagattactttttctagataatatggttctttgttcaacaatactgccacatctcaaaacactctaccttattcaaaaatacaaaataccaaattactttaagaaataaaatcaaacccgataatataaatatcaggatactttttctaaataatagagtttttcaaaacactctagcttatccagagataagttaccacattacttttagaagcataatcaaaacctaaaatgtgaata

SEQ ID NO: 228845 - DNA, 2090 bp, Cannabis indica
ataaatcatttcaaatttcttagattgataactaatcagattgtaaagggttttatttagggcacaaaacccaacacaagatagcgtccaaaaggacttagacttaggagcgcagaccaatgggccctccacctgatgtggaagggtcacctgttagggaaatagtctatgagcgagcatttgaaaggactcagactgaggaacgtggacctatagagccaccaccagccactaacaagaccaaatatgactctgctcggaataatccaaacaattttgagaaactgatctcttttgtggaattctcctcacatgtctgacgattctaggccccgggaccctacaaggggaaagggacatgcagtcaaccttggaggagggacccagaggctctaccatgaaactgaagtgtatgagattcagagagtaagaaccaacgaacagctccacacttaaaaatatttctaaaatgagagggatgttttgtgtaggtacttcacatgcagtcctaatggctagcagtataagtacttctctcgagtgcatggagaagaattaaacttaagcaatcagttcgactttctttgcatttatgactctgtggaagactattttgagggataatcactatagtgctttgaacaaccactctcgcagcaaccaatctaaggatgactctatcatcataggaagaaatgcctagcattgccttcacaaccttgtggtcaggaggcagcaaccaaacccaagtcagtaaacattctcgattgacttggaaaatagaaagacatgtgtgatgtttaggatttatccctaaaagtaagtaattaatggataatatattactgaatatataaaatacaattatgagataaatgaatactttaattatacaagtataatttataaatatctaatttttttattcatatggagatggtataatcttgtaagattgtacaagagaattaagattatacaatatgaataaaataagttggcaatgtattaaagtaaatggatctttaatatggaactattaagtacagtttactatacactatactctagtgtgtgcaattttaattcagatcacatatgtggatagacacgcagtaaatgtgttgtgtataatttgattatacatgactggaccgatatataataacatctttctttaacatgtcctttaccatgaaagaatttttatatcacagtgatgatcattggtagacctgtctaaatcttgagtatcatgaactcctatttatgtttattaggttcttgatttactcattaaagtttctcaaagaagatgatccttacaacttctattttgagaatgtaataacaagagtggttgggaacatgatatacaataatggaatctaagttttcctaacggatcgaatattagttcccttatagtgttaattatgaaagtgttgacagttggattcaaatctataataagttatagattaactgttcacattgaattaatgatacataaggaattcaagagatagttagaaggataaaataatatttttgaccaactctatgaattagtaattagaggacaagctacttgtaatgattatatcaatggactactagtaaaaattatgtaaatataattctatattgtcaaagagtgtactttcatatttatagtggagtaataatagaattaataaaccagattattttattgataagaatcaataataatccagtgtttattagagttttgaaatatatgtatgtacttctcagattacctctatacaacactgtataaggaaagatataatttgtaagatgaattgagaaagaattgaattctaaaagaaataattcttgagggcaaaatagtaattttgtataaattattattttatataattatgtcaattatgaattgaataattaaaatagaatttaactatttagttttaattgataaaactatattaattagttatatataatattattgttaaataatattatgagaaaaaaagcttattattttagtagaaaacaacaatgatttaatccaaattaaataagatattaatgagaat

SEQ ID NO: 228846 - DNA, 1443 bp, Cannabis indica
acaacccctaccaagccgcacctatcctcagggaaggccagcgggcttgaccggagaaaaatgattacctcctgtagctataaatttagaaataagaaattctaatttttttttttaattagttcacaactctataataaccatatatacagtagaaaactagcaaaaaattctaagagttcaagaaatgcaaagaaagaaaccaagcaaaaactttgttcataccaaatgccttcaccaacacctcaaattctgaatataggtctcctccacaaaagtagcttaacccccaccatagagcttcgaattccccttgcaacacattactaactaaaaacttctttgcgaacaagattttaatactctcattatcatctctaaccacctcccaatcggcagtcacacaatttccaaaagtaacatcaacattcacttgaaaaaccaaattaaaaacagattgagctaaagaaatgtgattagagataaagaagacgaagattttttacgtggttgggggcattaaagagttttagtctacgagtcaatattattgagctctttggctatggagtactttacacaagagtgttcttcccaaattttacaaccaacgcttgtagccaaaaatcgtaaccctttgcatggagggttagggccttatttataggctagagtcggatttcaggtaaacccaaacccattagggtttgcatgtaaaaataagtccagtgatgggtaaaatacattataatattgactttgagttgggtaggtgaggcccaatttggaagatatccattgtctgtatgggaccgtaccacttgacggtgataggtgggggtgtgcgacgttgatcgtgcataaagaatgttaaagtagtgagtgttggacaaaggtggtctgatttttattgtgtgcctttccaaggcataacacaggagacatacccctaattctttgggatttagtgcaaaaatgtgctaagtcagattggtcgatgctgtgtgacaccccttcgactactcatctgggatacccctaagggtatccgtctatgctttgctagatgctcgagaaatcggttaagtattaaccttctgaatttatttgtctggctttacccgtaatagagtcttggttgaatccaaaccccgactctcgttttgttcttggactgggtcgattggctcatctaggccttcgtgaaaggaccgaactaaaaagaatttgagatgttgtatcttacacgtgtcatgttcctaaaaaaagtggataacattgtccattataaaaattacatttatttgatgaaccaccatgtgtttaatgtttaagtcaaactgaaaataaaatggtagaatggtatcctcaccatccacttacctaaaatagcacatgaccctacgtgttctaccctagagaaatcagagatgcattgtagtc

SEQ ID NO: 228847 - DNA, 1117 bp, Cannabis indica
ttttggcatgatgagcttgttccatatgttcgagctataatcaatcttatgctttgtgattagggtgttgtagctgtgttaaattttaaaattacaaaaatatcgtgtttcagtaaaaataaaaaaaaaaacttaaaaaagaaaaaaaatcaagaacaacttaataaacaacatgaaaataactataaaacagcaaaaagataattacgaagcaacagaaaaataacaataaagctatgacatcctcaagtagcacacccaactcattaaagaagactcttcctttgtttatagctgtgaccagagacaacaatcaaaaaaacctctttaattaggattctgcatgtaagagcccaattaagtccaactaaaagtgttaaggtctcggcttgtaaaacagaaatacgacccgaaaacacaataaaaccagaaaacaccacaatgacaagatataagtagaaactatagacaaaaattacaacgaaaaacaaaacccaagttatcgatgaaaccaagaaaacaaagaaaatacaaaggaaaaactagccaaagcgataaccctttggctaatgaaagaaaccataaacactcaatacaaaacattttcctcaaaaggagcaatccacataaggcttgacacatcaaagccagatacaaatgcgctcaaaacttgtattaccaatggctaactaatctttctaaaaatgcctatccacattatataaaacatcaccaaatagtactcaaacatgaagctagaaatattttaaaaacttgtacacatcaaaaagtttgctttaaagttatcccactgtctaaactttaagaggttagcataaaactgatctcactcttctagcaattagaatataatagcccccatgtaaatcaagacttaatgctgttcaaacataaaaccaccccatgtacaatgtgccaaattctgttcaaaactttatgctataaaatttaaaggcttagacaaattgaaaaaatttgccttaaagttaaagaactgtctaacctttgagaggcttgcatactgctgatcttacccttttatatactgaaaagataacagcccctaagcctattgaacttgtattattcaatactg

SEQ ID NO: 228848 - DNA, 1247 bp, Cannabis indica
atattgttttacttttaaacagcattattattaagtactagtaataattagtagaagtgttactttaaaattacttagtaatattctttaaaattattatatgtaatttaatatttaattacacaaatacctagcaatactataatattacatcatagagagtgatgcctttagtattctcatattttaagctagccacgttgattttttttcaaatgactaaagtagtgccacatgaaaataaaatcaatctatggaacacatttatgattaatttattattattattaaccacacacggataccacaccaccctaacagatttgcacattttattttcattgcattaatttattatcccatttatatacaataaataaatccatttccaattgttgtatttatttatttatttttttgtaaggccaattgttttattttaaattaatgtatgtgacttcctttcaataaataatgattaatatttgtgacatcttatactaaaattaacatattttaatttgaataattatataatttttagcataaaatgtaatttaagtacatgttcatatattatatatataactatttttggatcaattcagtctctgatctttttctggcaataagttttgactttaaaaaagtgcaataattattaattattgaatgagttttaaagaaatgtaaatgggcacttggtgtcaaacactacaagaatagcaatgtgatggtgctattctcgtgatggtttcaatatctgattatccttaattaattataaaggcgttactttaaaatgccaaacaggaatagcaatgctctaatctttatttatgaaaaaattaactgaattattatagttaagtaattatggacttttatatatctaaacaaccaataggaggtatttttgaaattgtaaattctatattataatttactgctgattccattacagtactctcactttctctctctctctctctctctctctctttataaatatatataatacttcaaaacacctaatttcattcttttatttctattgtatctgtggccacttctgcgacccaaattaacaacattatgggttctcatcatcagaatcaagaggaattagcagtagaaaaccatgacgatactaatacttctcctttgctaataagttccatagaacaagctgatcatattacaccatcagcatcagcacactcgtcggattctcgtctcgagaaaat

SEQ ID NO: 228849 - DNA, 1557 bp, Cannabis indica
tttatttttatttattttattaaagtcgggtctaggtccgaagtcgaattcagatccgggtcagaggtcgggttcagcataagggccgtgggagaggatttgggtccggctcatgtcggagtccaaaatattgattaagaaaaaaaattgtttgaaaaaatattaaaagtgatttttttgtttttaaaattttgattctcaattaaaaaattgaaaagcaaaaacagttttatagaacatatttttaagaaatattttcacttttagaaatattttcacttttttaattttaaaaataaaaaactgattaaaaaagtattatcaaacgccacctaaggaattcatcttaaaaaacttgggataaattatgtcttcccaaatctcgtgaggcatgggcttccgtaaagctaatgaaatgaaccaagcttttctattttgaatgggtgccttgaaagctaaatatgttaggagaaagaatttcatcaactgtagctaaattggtcgaaagaaaaaaaagcatacattgtctctttctatataatgttatagcactacaaacaaagtgaggcctaaaaagatagtccaatatgatatcttgatttttatgcttaagcaaattaattaacttattatttgttaatgggccaaaggcatagcattatagtcaatagtcatcaactcaattggactttccgaccaacttatatttcatgtgaaatgtgaatcacttttctttatacttcatttgagtttgaagataaatataagtagttgaatatgaatttaaacccggaaaatgtattattttatggctctttaatcttttccaaattaatttgacttaatttatcatgtttataaaataaaacattagataagaataacaaaataaacaaagaaatgaatgaataataagatttgagatagggatattttgtgcaatattaatcttcatattgtattccttgagtctattatcagtctaactagattatatcattatattacttacgatttatggtcaaacttatagttcgatataattttttatgttaattaaaaataaaatcttatcatcatttgatctctaaacaaaaccataaattcttcttaatcattttcacagcaagatcaataataacaaaaatttatcttctgaagaaaaaaaaaaaaaaaaaaacttattgtaaaaggagaataaaattctaacagaatattggtctacaatgatttttttatatatatctttttgaaatagacaatgattttttgataactagtactgtttttatatggttataaaaaaaaaaaacaaaaaagaaatatattatagctttatattaaagagtagtgtgataactccggaggacgtatttatcatcattagtaattgaactacttcacttcagtcccacattatcttctgtaattgggtcagagttataacaaggttataaaagaaaatatttttaatagttctactcatatttgcacccgaaaatacagttgcaaattgtaccggattttccttaaccataccctatacttcaaattcta

SEQ ID NO: 228850 - DNA, 1825 bp, Cannabis indica
gccccgccaacccgcatatttaatatattatatatatttttatttttttattacattttatatatatattaattaaaaaataaaaaactctaaaattgttatattatatatgtttaatttaataaataaaaaataaaagaaataattatttgaataaaaaattatttttttaaagagttgaccgagttgaccgggtcaacctggcaaaccgaaacttgccaacccgccaacccgtaccctatccgggtccgggttcagtttcattcttttgaacctgcgaaacccccaaactcgaaacccagtaaacctacctgatgtttagccatatttgtggttttagatcaccttagtttggcaaattaaaagatctttagtcttatgaaagttggagaaacgccttgggatgaagaggatcttaaagacatctttgtggagcaggatgttaagctcttaggagagacttcttgggatgaagataatctttgagacatctggcaatggataggtgaaaactttggtgctaattcggttaagagtgcttatcaacttattcaggagcttaaaggagaatcatctaaagttggtaactcaattttttggaaagagttgcgagaattgagagttcctcctaaagttaaggatttggttaggagggctgcttccaattgtcttcctactcgagttgaattatgtgggaaacatgtcattcttccctttcttttgtgttgaaggtgctttcgagttgctgtgtttgtttcacattgtcttgcagggtgttcttttgcttttgcatgctggagggtggttggtatttcaatagtggagattggagacaattcttttggaggatggttgttggaaattttctcaatacactttgagagaataggaggattacaactaaatacacaaaatacataagtattacaataatattacattggaagaagaagaagagattacaactctttttaataataatgcatatgagtacaaagaagagaggaatatctctcaaaggcttaaaccagactaaagatctttatcttaaaagtcattttctccttcacatggatacttagggaaactctagaaatactcttaagaatttatcaagcctcatgtgctcagcctagtgtctataaggatgagcatatccttacaaggttgtagccacaacaagtgattttaaatacatgtctcacaagtgaataatatgacctctatttatagagttttcactcccatttgaatatgaatggtcactataaagcccttagatattaccaatattaaattggacacatttataaacttaaacaggtgatttgagagttatgggagctattataaaccaagcacaacgttcataaaatgttaaaattacatgctgaaaaaattaccacaagacatgttgccttaagtgcaaaatttcaaaatctagtaccaggtaaccatttattaattttttcagcatttaacaaaataactctacacaatttaaaacttcccaattgactttatatcatttatacaccctataaataatagaaaaaagtctcaacaactatatatttttataccatttaatattattcaaataccattagtaactcaatttactaattaaagagtgatgatgattatagagatgagtagaattttatgatcatgaatataaaggatttataactccttttatatcataatttatacatatgtaactatatatatatatatgttataatttgaaaaatattcacactaacttatttattacttatattatttaatctaaatactatattatataaaataatataac

SEQ ID NO: 228851 - DNA, 2494 bp, Cannabis indica
caaaaccatcttctccactattgaatcacattccattgtcgataatcttctaactcaaattaaaattcccaaattaaaatgtatcttatttttaatgtgatatattgatattttagttgaattaagaaaatcattgatgattttattacatagttatttttgaatcatatcataatacatttgattaattatttggtccttccttcattcggcagtgttaatttgaaaattagcttagtgtgaaataattaaatagttatatataatgcatatttatttatattttataatagctttgctatataaaaacagaaaaataaacatagaaaggatcaaaaaaatgatcactacattcatatatttattatttataagattatacttaacatatagtaagtatcctactattttagttatatagtaattgtaggtactaagcactacaattaattttattaattaattatatatattataattaattaattaacaacatgaaccgacgcaaaccccaactaaaattccaacaggagcacaatggcatccgccgcaacaagggtcgttgagaacattgcaagaggaaccgctacacccatcattacgacggagcccctcagcttcttggcgggccaacatccttgacacaacttgatcaataggagaagatttagcgatcttcttcatcattaatgtagcaacatcagtttcaacttcaacctcaacctcagtattctcattgacgagttcctgatcagaagatgaggtgagaagtttaatattgttgttattattgtttttgcatcttgcaaaggcggacggaacaagcattagaaccaccatggccgccacgacgaccaccaccaagttgctaatcttaatcttactctccatattatcctatatataatgtattatactaattgtatgtagtgtatgtattgtttgtttggtattgttaataattaaacattggttcctttatatatagttgtaataagctagttcgtatgtacacttagtgcatgttctaaccaattaatatgaaatgtaaaagacatgcatgcagatgcaattgtacattaacactttttatgcatgttgagtggagcctattattgattaattaactacaaaaccaattatatgtgttcgttagtcataaaaaatactttagtttttcttggtatcgaaataaaaatacaagcgcatgtaatataaaatacaaaatagaaaattttatttaatataggcgactatctaccaaacacataagttttcccaaaattgtaagacatagtgattgactctttctcctattagaatttggaatgagagaagttaaaatgaatagaattttatttcaaaattaattggtaaaaactaattttcaatgagaagagtaggtcattcatcttatatatgataatttatttctacttattaataatgtgagagtaactttgatacactctcctcacgtttgggtttggaaagtgtaggtatatataacaaacaacgtgtaagacaccacaagaccgaatatgacatttgaaaaaatcccacaaaaacaaatatcaagaaatttgtggatgtacatgtggaaaatttgtatatattgaaacaggtcacagacgccaaccttgaaaactgacacacattggctgaaaggtcccaaatagaagttaaaatgaaaataacagaaatttttagtttgacttatttttttagattggtagcactttgggccgagatgatggaggcgtgaggcccctttgggccgagacgacatgaggaggtgaggacacgcctctttggtctgatacgaaccacaaaccacagatctcaacacaattatacataatacaaaactaactattagtttagaaattttattttacttttagtcataacaaaaattgtgactaaaagtgaaaaaatcgtgactaattataaattataatttatatgttgtgactaaaaggtccgtagataaaagtattagtcacaaaaattataatttgttgtgactaaatgtatttttagtcacaatacttattgtgactaaactaaattagtgacaacttgtaactaaatactatgttttcgtcacaagtaacattttgttgtgacttaaagtcacatttagttacaaaaaaattatgttgtgactaaaaaattgtcactaaaagtagtagttttttgtagtgttttcgcattatttaattgaacatctaatccataaaaacttgttgaaaagttcacactagggtctttcaagtcagcctcaacactctaggattagagtagactattaggaatgaatataattttataatcacggtgtgcactcaacttatgagatactgtgattgagattgagtttaacacaacacacctgtattcctattgaaaaaccgtgtttttgcaaatgtcagttgtatatacgaaaatataaaaccgtaagcgtttgcagcagcagaaagtaattctgcta

SEQ ID NO: 228852 - DNA, 716 bp, Cannabis indica
acacatatctatataaattattttgtttgaacaaattaaaatatataaattatgtagtcacacctgaagcgttgttttcaaggttacaatttacaaatatatatacatgaaattgttattgtaaaacccaaagatatgatgcataggaaatggagcttgattagtctctcaatatatattgaaccaaattctttggctttatttaatgtatagtataatatatatatatatatatatatttatataaacatatgagtatatttataacaaataatatatatagcatggattttggaatccatgtatatttatactcgactccatgtgcttcctagttaactactagcaaagcaatcatatagaatctatcaaataaacattagtttatttgtttaaaatgaaaatacattaatataaaccaaaccattgtttataactaatgtctcattaaatactagattttaaataaataaataagcaaataaaaatttagtacacatatcttacctaatatataaaatgtctatctaacagtttttgtcgtgcacttaacagaatataccaaagaatatgcttttcttctaacagaaactaacgttaaaatttaacatacccatttgaaaagttagcaatgcttgtaatgaaattgaaaaggcatgaaagtgcggtcactcttgacaaattttctacaccgtgctttgattcatcaactaacc

SEQ ID NO: 228853 - DNA, 1673 bp, Cannabis indica
attctcatttttgaaggaatttgtcactttgcgtgcataggacttgattttaggaattagggttagtagcatctagaatttatttgctgggttcgtaggcaaacatttctagttttaggatttttaaagaagtatcttcttttaggctcgaattgagatgcatgctcaagacatgaggtccctggttctgagggttaggcaggacatttttgagtttattagcagtccttttatttacttcttctttgattttttttatatgcattttttttgccttgccttcgaaaagaaagtctaggcctttttgttgctattatatgtttgggttcctgatttgtcatcatgatggctactgtacggtagtgattacgatgataaagagtcagacggggccctctccaaggagttttgggggtggcttccccaggtaccctatttgtcatttatgtagggtactgagtgcttgaactttgtttccactttttcaatgtctggtgaaggcaatgatttctatttggccttagtgaatcttgaggagaatcttgaggcatcatccgttgaagtacctcatgctgagagaaatcttagagatcctattccagatgagggaccttccgaacacgttcaacctaagtgacgccgtaagggcaaaggcaaagctcgtgtagtatctctagtccctttagttcttaatgattatatctgggatatagatttaaggccaaacctgttgtggaattatggtcttgtggaggcatactcaaatgatagaggagtgcaaaacattccaggactcatgtggtacatgatgtctattcttggggagtcattgtccaagagtgtggacggctttggagcttggagttgggtgcatatctcttgcagagcccatctcccacttaggacctatttcatagagttttgtgttaaagctggaattgctccctttcagcttttgccagttgcatacaagctactcactgggtggtttgtattctgtaggtctcggggacaatctgctccaactccagaagagatattatacttttacgagttaaaatctcaacccatgctcggacaccccacaaagattggtttttatcgtctccgaaattacaaaacatgcctggtgtcccacgagcacttcttctcatagcctagactaccgtgaatactgattttttactatcattttttccatgaggcgagttccagcattatcattggacttcaaacttccgggtacaatcttctgctcctttttgttatttttgtttctttaatggttcataggaggattacatctcaagatctaactcttatttgttagttgcctcccttccttattatagagattgttctcagaacagagctcatggatgaactgagacaaagaatcacattatgagcctttctctaaagaagagttgagtgtagaggggctggtgaccactgagttgttacgctagtatggcttcattgtcacattccaacatattcacggaatcaatggcaggggacaaccttaaactcccagcaaacaacttttgtaacgccctatcctattgggacgccacgtgtgtaatattataaactagtttattactaataaagtaattaattattaaaatctgtgataatattaaaaattttactaaaataaaatactaaaa

SEQ ID NO: 228854 - DNA, 1950 bp, Cannabis indica
caaaattttccatatattttagtagaataattttgacgatcatgttaaataaactatatatgttaggattacaaattcgtttttccttattgatataactctgtaataaattctctatatattttaataagtatatatatatataatggtgaaatttagtacttaattgtacaattaatatatattagctagttagtattgaatggcataatatgccgaccacagaacaatgcactttgtatatatataagcaatttcactgctagcattaagtcacttcactttattaattaatttacgttatcattttgtagatacttggtgtatataactgggacggatgcaatccaatgccaccagagttttggttctacccttctatttttcatccatgtaatgttcctatatgtttctcccaaacatttacttattttgtgcttaagtacgtataagtatttatgtatatatgataaagaaaattatatttatgacaattaatgcagcaaaaatgttctgctattgccgaatgacatacttgccaatgtcgtatctttatgggataaagtacgttggcccaatcacacccttgattcgagaactgagagaagagatctacaatgagccttaccaacaaatcagttggagcaaaatgaggcatctttgcgtccaggtaggtgatgatatatatagattaatactttactatatattacattgatatttgatcaatactattttgatattgattaaaaactacttataagtaactataaatatatttatacatggataagttgtttattagagttaactataaatatattgtttatacatatatttatacataagttgtttatgacagttaactacttagaattcaaacattgtattacacctaactataaatattaaaagaaacatgtgcactgtgagagatccccttgtaacaacattaacgagtttataatagaatttgatgggttccatttcaaaattaattggcaaaaagaagtgtagccattcaatcttatgtattttattattttttcatacattagcaatatgagactctctaacaatcctaaaaaacacaggctgataactactacccacatggtagactgcaacgtctcttgtgggatagtgtctactacgttgctgagactcttattggtacttggccttttacgaagataagagaacagtcacttcataaagcaatggaacatatccattacgaagatgaaaatagtcgatatattacaattggatgtgttgagaaggtaaataatcttacctaactagtacatgagtacaaatatagcaaatatttattattactaacttatatatatatattcatgatgttaaacttactatatatgcagcccttaatgatgctcgcttgttgggcagaagatccaaatggagaatatttcaagaaacatattcctagaatcgcagattatttatgggttgcggaagatggaatcaacatgcaagttagtaatccaacatatataaagtttatttaacatgatcccaaaattattcatttgttcttaattaatttttttaatatactaatttgtggtatttacaattgttataattacatgaaagtgcagagttttggtagtcaagtatgggattgtagtctctctgtacaagcattacttgcagcaaatattagtgaagagattgggcaagtactgaagaaagcacatgagttcttgaagcaatcacaagtcagggttgaccctcctgaacattcaaaatattttcgacatatttcgaaaggggcatggactttttctgatcgagatcatggatggcaagtttctgattgtactagtgaagctctaaaggtatattataatataattattattctatcatgttaataacagtgtggctttcaccttagtttcacttgtgtcttttttcttg

SEQ ID NO: 228855 - DNA, 2679 bp, Cannabis indica
cactcatttgagagtatttaatataacaattaatggaatggtgtgggatattatttatgttttggagtttgtgcggtactaacttgaagatggttgtcaggctaggaagaagtagaaatgtaacaatctatacttactaatgggatggtcggttactccctaaaaaaaatggaaaaggttaatttacagtcaaattttctaaacttttaaatttggtatgatctaacccctacactaaaaaaattatagctaaagttcctaacttctataatcattttggtcaacactttttccgttaattttttgttgttaagcgccaaataaacctgtcaagtgttttccaaaatatataagaaataaaaatagaaatatgactactttcctatcttacataaacagtgtgtataaatccccacaaaaaaaaaaaaggattcaattgaaacatagaaaaggaaagtatctctaatactgctttagtcgcatttatcctgatcgctgtatgtgagcttgctgtgagaattgaggctagtcggaaaattgcatttaccctatccgaatgttccaccttattcttcagataagttatttctagatcataaatcactatggatagcatactgaagaacgtaccacccgtcaaagtcttaatatgttctccacgtgtcacttagaagaatgccacgttaacctgtgcagaatttgagataacatttaccccacaagtctgcgtgggaactttctgcacgtacatggacttgctcggcccatgtgctaggagaatagaatgacaagtgcccggactacgagggatgtgaagatagtcctttcatatctcgagcatttaatgattcacctcaaaaaaaatgcatattgggccatgtgctagagatcgtactcctctatgcataccaattgtacttttggggggaagctcaaaattcaaatcttaagattaccaacataccttagcagttacctataaaaagaagtcttaagcccatttctactctttcagccatttgaaaacttagagcacaaactcattttctcttaaatctccaaatttcttcgaagcttcaaaggattttaagatcctttctagactttgactcaaactaccactaggaattcttcaatagtgagtaaatttctaatttctttatgaatttccttcaatttcatgcttttaacttgtgaattgctttctgcaaacattccgggtttaggaactatgatgttcttcatttttagagattatgacatataatttgattccaaaaacatatgcagggaccataatctttaatttcttgcaaatttcattgttttttgttgataaacactcaaaaacactttgctcggtgtttctgtagaattctggatccatcccgtgttcttgagtatcttcaatctgggattctcgtcataagggtgaagtttcctttgcccaatctttgaattcgaccatcagagttgtttccataaaaagatcacgtgactctacccagttcttacctctctttccctcttttgtaaatgaactcggacaaactttggagaggcaagcaccgagtagacgatgacttacttcaattgctctacgaggaccagccaagactccctgcaacctcgccattgtctagtgagaattcagcattcaggtttgacagttaggaaataacaaccgagtcagaatctccaaaacctaccatgcaacaccatcactacctcaaccatattggcagtgaggggtacaaaagatttgtttgggaactacacgagggttgagactatttgcctgcatccttgacatacaaggtccgagtaggctttccagagaccttgccagaaggtaacctagagccttcaaagaagataaccgtgcaagcggagattgcagttaatatcgcactacacacctcatccaaattcttgcccaagactaagaaagtggtgagaaccaagcagacgtacaaaaagacttcagttgaagacccacattttgcttgaataatgacgttagttcatgctccatacgttgaggggttcaatgaggaagacgctgagatgcacactagtgtgaagtgcaagaagtagaggaccagcctaggctgatgaggaagtataggctactgctcatgttgtaccatttgtagggttcggcaggtataataaggtcggatagcctatcacagtgcggggagagatcatggttaagaactagcactacattgtttaggagaatgaagaggctcgcccgtctgtagaccaagaaaagtccaagctgatgtctctcctccgtccatcctcacagtaaagaggcttgtgaatttggacaaaaagggtctcctgaaggatatagaggccttttttccttttaaagattagctcacaaatgatcctggagaaggtctctatgtgtggtacggcccgcatgctcagcagggggcttttttacctcttcatccgtacttccaaaaactcacaaactactacatgatttgcccgacgcatttttcgtcgaaggggatcaagtacttggctacgttgtacatcttgtacacatagcaaggatggggatggccctcccctcatgacataaattggttttttaacttgaagtctaactcgaagcaaggccgcttaggttactttcatttttcccaagttgattgctct

SEQ ID NO: 228856 - DNA, 1614 bp, Cannabis indica
accgactgttgctcacccctaatcatgtgcagtaccttaacttacacaccattatagcccattattatagccggccatggatatgtgtatcctatatcattattgaaaattaataatggtaccaaaaacgtgaatttcgatgcattcaacctagtacttaacaatatttaaaaagaaaccatagtacttaacaatttaaagtttgttaaattaattacttatatcaaataataatataaagacattacacattaattaaatcaaagaaataaaaagtcattgagtgaaccagatcttcttaactcaaatatatattacatacatgcatttgttcatatatatccaaccatttaagtatatatatattcatttttcttgttactcaataaacacgaataccttttgcagcaaaaaaaaaaataaaatacaaatttactaacaattaatgaaactaaatttgtgtggtgtgggaaaaaaatttttactgatatattttcttaattaggttttcacaaaaactttttattagaaaggattacgcttagctttttaaaaagctaacttgttataacagtattaaaaataacctaattaaaacataatatatagtataatgatttacatgattccgaaattgtcacgttattctttttttccaataaaagggtttcgtttatataatatagtttaaacacatttggagcgttacataataatgcatatatatcaaagataaaaatatatatcaagtactatagttagtggacaaaattaataaaataacaaaaataagtgcctcttaacatcattaattctttaaccctagctagggctagctatacggttggtccttggttggatatataataataaaaaaaaaattcaaagtaaaacacgtttgatttttttatattaaactttgaactgtagtacgatgagaaatgttgtgatatatatacaaaaggacatgtgtatgactgtatatgtggcattgaaaaacgttggtgtttcaatacgatccacatgaaaaaagattacaatatttacatatatacatatataataataattaaaaatgggaaaatttcgaagcaaagaagataagattttgagccatctttatcaaaaagcaaacaagtagtattttgtattttgaagaagaagaagacgcctttaaattatgctttagggaccaaataaccaaccatgcattttaattttttatatatatatatatatatataaaatagtggcagaaaaaaggtaggaaaagtaacatgtttccatttatcgtaaatgggatgtgtcattctccaagtacaaagaaactatatttggttccctattcatccttcttaattatctctttatgatttacaactaattttgtcatttttttcacctacaatattaaatttatttaaaaatccaccacatatatatatctattatcaaactctacatatatacaagggcttgggcttgattggtttaaaattcaaaaaagttttatgtttttaaaaattttaaagatgagtccacacgaatttttttgattggttggtagtttttaaaaacatgtttcgtttttactttttaatttttaaaattgta

SEQ ID NO: 228857 - DNA, 1201 bp, Cannabis indica
gagagagagagagaatactaggaagcttgagaagtgaccaagaggctcttgtgcgtacaaacacaaacactcacacccgaccagaaccacaccaaagtctaaggagggttagcaaagccctggtaagaaaatcaaagaagaaacttgccgctagaaaaagagatgaaaccctaaaatagaaaaagaaagtaaatgaatcaatgttaatatctataattaatttttaaaataaaaatgctatatattcaaagtaaatactaatataaatgagggcacatatatatatacaaagttacatgtatgagttaggtgtatctcattattagtgagttcacatatacttttttcctacatttttcactcattacacattaataattttataataatgatcaactattgattatctttgaatattcactactatcaatttatcatctttgatgtgcattgtttggaactatttatttaaatagacattaaaatataagatattttgtagtgaatagaggttgtgaattaattactcttattaattattggactatttgattcatatatattttattttaactcataaaaatatttataaaattttaaattaattaagagtcatattagatgacctattaatagtcgacaccatttagaaaagaatgtcatttgtcaaaattactacatatgaagccttgtcatcgtacgtgttggttgttgttaggtttacttttatgagttccagagtctatttttaatttgttattgtttaggcttacgcttattcttctttcaagttttaatagttaaatacatcatattggttgaaatgtgagaaaatatgctaaataagatgaattttacggatttagcataaattttggagttataagataccgtgggtgaaattttttaagttttagatgttcaacacgctctatttgtgaatgaaaataaagtctgaaactttaagctatttttaactataatttgttcatttctaagaaaaatattgtgaataaaagttctagatctttctttcagatttccatcacatcttgaatcttccaatttcgagatatatttagaaaattatggccaaaataccataaattatcacaacaaaattttaaactgcaattgttttagaaaaactcagtgaaagttgaaacattgaagtcaatgtcacagcattcactatttagtg

SEQ ID NO: 228858 - DNA, 2875 bp, Cannabis indica
atcagggcaacccgatggtgacagactcccaacgtgcaaactcctggaaacacgagaggaccactagggacacaccctaagcaggttaatacacaaccacctactatggtccacgaaggacttcccctctggttgggatcacaccaggcatacaagaaactagaaacaccagttcggtggctgatcaatccattcccaacactaaggtcccgtctacaactaatgctcagaggccatttagggataacactataatccagaacctctgagcagcccttaggctcatgcaaggtcataataatgctttgcagcatggtcaggaggatctccatgcagctataaacgttgcatttgacgaacgaaaatgtcaatttataaaatggagagaccgggagatggaaactctaagggctcaacaggaacccattgatgatcgcactaggtaggctaccatatactgataagaagggcctaccaagttgccaatcaataactgactactgcgttcggtattcccctaggtgggtcagaagcgtatgcgtctgggcataccgcacaaactcacagtggtcagctgtcaaaaccacagccacaggtccaatctatgggccaaatggtagacatccagatcctgccagaccgtcctttgggtggagttatacacaccaacttcacccctactaaaatttttggccaacctatcggccaaacaagttagacaccaaggccacttggtacttcagtatttgataagttgagtgctgcacatgacctcaggaccgacctaaatcgtagaaggggcctggacaaacaatatgttccaccatttgttcgactaggcattcgaggccaagattcagttcaaagagatcccaatgtgacataggtcggtcaacaagctgaacatgttcatccatttgtgcaagcacaattggatcaacttaaaagcatggtacaaggcctgaccgacccaaaactcactgatctcgaactcgaccaggcacgctgatcacccttctaccttaaaattgaagtccttgaattacccccaaagttcaaaatgccaacctagaaaatgtatacaggaagagaagatcctttatcaaacttgaagtattttgagattcagatggacttgcaaggggtaagaggtgatgtatggtgtaggatctttcctgtcacactcgcagaggccgcccaacagtggtatttcaagtttcctccaagaaggtttaactcatggaatgccttctcatcagagttccacgcgcagttttcctcatctcgttaacttccttcataccttgaagacttggtcgaagtaaagcgaatgccaggagaacccatgtgagcttacatcaacgggtttatgactgaagctacaaaagtgaaggggctgaccgaagaaggaaggctggccgcaatagttgggccattgagccactcgaagagttgtggaaggacatcaaaaggttgatcgtgggatcaatggctgaatttgtagattgagcagatgggttcattaagctcgaggaggctattcggtgtgtggattttgtgggacaaagaaaagccaacaacgtgtcacctcggtaggaacatccattcagaatccataataccccagtaggtcaaattcaaaagggaagaggtttaacaacggtaataggtagggtaatgaaaagaacgataaattcactggcaatgccgaacaacaccccaaggaaaatgcctcaaattttactgccttctcaattttgacagacgacctagggacaatctatgcgacaactcaatctatggtgtcgtacaaaaaaccatctcccatgaaaaaggatgtaaagtaagtgagatacatccaagttctaccattgtcatgcagattacgaccacgacacaaacaaatgtaatattctaaagtgagaaattaagtttttgatcagaaagaataacccgcatttacataagtatgtcaaggccaaccagaaccgaagggccgcccaagtagacaataatcagaactagttgatgcctccattagtggacgggcatttacaggtcattattgggggtccacatcttgttggagactcgggaaaagctcgagaaaagtatgctcaggcttataatacaaacaaaatgaaacattcttggttgtgcaatagagaaaacaaaaataccacggggggagccaacaataacatttacaaaggcgatgccagtcacgtccatttcccgtaaaatgatacactggacgtggaagtgcaaattgaaaataggacagtggcacaaactatgatagacaatggagcttcctcaaatattctattcaaaacaacttatgagaagataggactccaacttaaagatccaatcccctacacccagcttgtatacggattctccggccaaagcattgcacctctggacaaattcgcctgccctcactattagacaagctccgaggagtatacctgtgatggcacaattctttataattgatgtccgttcagcttttaatgtcatgttaggccgaccgaacctatatgattaaaagttgttacatcagttttccacctgtgcgtcaagttcccaacaaagaatggtgtaggatgtctcaaaggaaaccagagaattgcatggtaatgctacaaccttgctctaactaaggtcaagaaggaaaatacctttggccagagtttaggcaagggaaaaagcattgcccaataggaagtcgcctaaggcggggcgaagacatggatcccctacttggggaaacaaacataaatgtagggctagtggaagtgctagaaaaagtggaaatcgacccaaatatctcgtccaggaaactcaaaattggtaagggtttgttgct

SEQ ID NO: 228859 - DNA, 1059 bp, Cannabis indica
acatagatcagcatgcaaaatgctaaactaatttttttgttacaatttttattttggtagaaaaaacccaaaaatagtattttaatattgttttattaattttgacatatataaattactttatcatcatgatcgaaccaatcttgtgcctgtgtttacgtagttttcaaatatttattatatattaatattaattagtttactttggattcgaaaaaatataacacttttctggctattgctatgtatattttatatataaatatataagcctctagagacataaaatttaagattgtggcagtaataactagtttgaagtgtagtttctatttagtgaaaatgattaataataaagcattacttcaaagaattctcttataattagcgatttttaataatatttttaaaataaaataagtgaaatttaatattaaattattacacatcacaaaatattagcattaatttctcttcataataatataaatcaaaagtcaatatatgatgaaatgcatcaccttccaaaatttattaagccacattatatcattgtaatattagctcactaagttaaaatccccaattatggaccaatactatagtatataatatatattattctcaaaattatatatacactaaaataatataaattccacatctctcaattttattaatacgaaaaatcaataaaaatccattctcaattttctcattgatatatataataactgattaaatttttgagtcagatgtatctttaattcaaccactaatacatttattttagattttagaaaatttgaatgaaattatgtaaaattattattattattctctcatggctaaaattatggcaatcgtgttgattgtggtcgttgatttggtatacaggatagttttttatcattattatttatgttgggtttttatttttttgtaaactaaaaatatagttgggggcttggatatttgataaacttgatattaatcacatatcccctctttgttatttagcaagagtcttcgtaaatttttacaaaccgcccaacttaa

SEQ ID NO: 228860 - DNA, 1717 bp, Cannabis indica
cctcaacatctttggaactcaagaagcttggctgattggttgaagatagaagcctagcccacattctatcagttattactacattgttttgtctctcagtgattctctgcaaatgaaatgattaatataagataactacagtcaaattgaaaatagagcatgaatgatacatacaatgaaacaaaattgaaaaagttctgtaaacaaatattaagtatgtggatataaagtttactaaaaactaaaaaacatgtactcacatagaaggggatgtaagaatgtcttccattgacaggcccaactgtaaaaccagtgtaacctgccattgctccatgaacagcactttgagcaagaagtgtgcagtaaacattatcagaggcattgctaggaacagctcggatcatgtacgtagggtctgccaacataaagtgcaaataatcaagcttaacaagacaactctactcattctcaacttctgcaaaattttactttatgaccaattcacaaacctatgtatttgaggtttatagccatcttctttagtttcgcaaaatgatcctgcaaaaagggcaatgatttctttgttaacagagcaaagcaaaccacttgatcgaattggttattagaagccaaaccttgattttctgggaaatccataggccaacgtccttgagaagcttgttgcctgaagcatcctctttctctgcgggaatgctttcagagagaagctcttgcccagctccttctgctatgacaagaaccaaatgcccattttctttgagtcgtttttcgatgtattcgaaaagtccaccagggccttcaagatagaagggtgattctggtatcaagcaacaatctacatctcggcttgcaagagttgcatacatagctataaaccctgcattgtagcaccaacataagtaagtattagttagtcctgtttgaaatatttgacttagaataaaaactaagacttaagttgaaggtttacttaccactgtaacggcccattaacttcacaacaccaatgccattctcaatgctacatgcttcaacatgtgctgcattaattgcacgttgagcctcctcaacagcagtgtcaaacccaaaagacctgtctataacctgtctcatcaacaaaacaacaatcaatccattattttacagtgacaacaggtaagcaagcaagaaaaacttaccggaatatcattatcaatggttttcggaatccctgcaactgaaactttaagaccacgccttttgatttcctgtacagtagtacacaacatttatgcttactttcaatatcagattattcggataaagatgatggaatcagttctttgttcttttttctaaatatgttcaatttatgacacacattctgaaaatatatattcacctcaaatattagagatgctcccctctgtgttccatctcctccaattatataaacctgggaaaataaattgccaaacgaaaattaacatgcgaagcttatcatcacagtcacactgtttgagcttttagaggccttgaactacaaacctgattaattcctcgatcttggatgctgtcaacaatttttgaggtatcatggccacctcgagatgtgccaagaatagttcctccacgtttatgaatatcattcactatcttaggatttaaggatatagtatttcgagcatagaagcctctgtatcctccctacacaatt

SEQ ID NO: 228861 - DNA, 1519 bp, Cannabis indica
ctaaaagacattagtagtgtttaatactcttcaatgtgaaatatcgttactggtacaattacaaaaaaaataaaaggataaattcatatcgaccaataagaagaaagatcaagggaagcatatcatccattcttgcttataaatagaagatggaagattcaaatcacatcgtcgagtaagaataacatctagaggatctgaaaaatgaagtagagatttttagaagattcaaatcacatcgtcgagtaagaataacatctagaagatctgaaaaatgaagtataaatttttcaataggattaatttcagtgcgaagaatccaagtctattaattacaaactttgtttgttgttgagctaatttattaacatcaacaatactaatttataaatttatgatctataatttgttattgttaaaaagtcaaacataacctatgtagctttatctcataataaatttgcaaaattaatatcacaaagtgttcccaaatgaaaagttttccaattataaactaaataaacacgcctaaataaataaggaataaatacaataataattaattattttactagtgatatagctagctagctggaccacacgtagttaaaaattaatacaataacatttggtaattactgaaactaaatttagttgaattgaatagagtaattaaattaaattaagaatgtattattaatttggttaggtcaatcaagcctagggattctggtagaccgtagcgcatcagatcaaaattacttggaattgtcggatgtgaaagtcagcctcaggtggagcgcgtggtattacgctccagggtgggagagggagagggagaggggagtgtaggtagtggtcgttgcaggggattattataatttgggtgaggatattctttgagggggggtgaggaggaggggtgtggggggcagtccgcagtagtagctactgccactgcagtactaaatgccctttgtcgtctgtgcagccatacagggaacaagggctctttatgtaattatcatcatatttaagggctcattctcaaattttgtatttatttttagttattatcttttcaaaataataataataataatagcaccgtacactttgtaagttgacattctatttgttttgaaaaaaaaaaaaataattatgaatttatatatatattttttaaaagagggggacttatgaatttataagcaataatatgtaaaatttcattttctattagttatgtggtttacgagtttatttaatatcttgtattatattgcataatattatattaaattatattttatattatatttttgtgtaaaataatgtggtatcatattgtattatttaaatttaaatatttatttcatttaattaattaatttaaaaaagacacgagaggcatctattttgtcttttttaggacaagcgtagtatttttgtcttgacaaaatttgtctcaataaattttaccttgacaaattttgcttttcctttttaattaattttt

SEQ ID NO: 228862 - DNA, 1038 bp, Cannabis indica
taaagctattagtcacaaaaattacaatttgttgtgactaataagtatatttttaatcacaattaatgacaaattatatctaaatattatattaatcacaagtaatattttatcttgactaaaagtcacatttaataaaaaaaaaattatattataactagttgttatttagattagtaaattacaatatttgttaatttcaattagcattatgctgatgtgttttgaactttttgcaggtgtagacatggttatttccatgtagtgaacaatgactacactcactgggaaatgtatgccattggtggtagtgcgtccccaactatcaatagccaagggaacaggttcttggcaccgaacgagcggttcaagaaggaggtaacaaaacacgaggatgccccagagagcgagtggagccggtggaactggcggtctgaaggcgatcttttcctcaatggagctttctttcgccagactggggccggtgcagcctcctcaacctatgctagggcttcaagtcttagtgctaggccttcttcccttgtgggctccattactgttgcttctggagccctcaattgtaggaagggatcccgttgctgatgatcatgatcatcgatcatcagcgtaattttatatgatattataaaaaagaagaattaatcttattactgcaagtgtaacaatagctaaattaagcatatttattgttgcccttttgcagtagtttaaattaatcttggttattttgtagtagttttctaaattttaatgttttgagagcaaatttttagttttaaatttaaagtattgcaacctctgcatgccaactagttatgtaatatatatatagctagctatagcttgtaactttaattgtgaactgcagagagagcaagagcaggagtgttgtcttttaatttagtttttatttttaattatattaataaaatatttactataatatatacaagggtattgctatctacgcctttgcagaaagttataatcttacaccaaaaaaaaaaaaaaataaca

SEQ ID NO: 228863 - DNA, 1257 bp, Cannabis indica
taacatgacaaagtcatcttacatggcatgtcaactgtaaagggttctaaagcaatcgagtaaaattgtcaagcaataagcaaaaagagtgaagcatgctatcaagaccttggctggccatgtctggctgaccaatacaagcctatagaatgaccaatgtaagtttgtaggccaaccaagccttgagaataagttggtttgccaaagagtgactatccaaccaaaagagcatgttcgaccaaggaagcctgacgtttgcaaggaaagttttacaaagaggctagaaaggctagcatgcactcaccaaggctggcaggcacataccaaggttggcaagcacatactaaggctgacacacacatataccgaggctgcaggaataatacctggccaaccataggagatcataggctagccaagccctaaaaaataggggtggctagccaagttatgcagccaagttatcattttttgtagcttaaataatagataaaaagatattaatatccctattttgaagggatacctttacctatttgaattaagatattttgtaagccctacactaaataaagggcattaattcactctccaaggatgtcattccacaagcactaaagggtctccaacaagtcttctctcatgctccattaagtttctaacacgtgtaaggcctccccatctctcaattttcacattccattcatgcttcctagacactaagtcaagtatcttcttaagtctttcacaagattttttcagttcttggtctgtaacatattgttctcacaattgtaatactgaagagagccatagctagaaatcataaggtttttacctatgatttgcatggtattatctcaacagtgaatacaactaaaaggggagtaggtcattacccgctaaacaagggggtcgaacctctataaatctttgtgttatctttactatttataattcttatttacacgtggtgataatcgacaattaataaagctccgttgttagttgaccataatctaagtcaacataagatatttgtaattaaatggtttaaattaataaagataaaattgaattttgttattcagttatctatttgaatttgaacttaaataaatgatttattttatctttatttattgggataaaataaagactataaatacatccttatagatttgacgtaaatgatatgattgatattattttctaaaccagaaaacttcttagtcgcactctaatctctctctctct

SEQ ID NO: 228864 - DNA, 734 bp, Cannabis indica
ttatggattaattggttaagcaagctttattattggatagtaattgtatttagttagaagatatgccttttactattttttatgtcgttgtaaatgaattttaatttataataacagatttttttaaaaaagtaaggtatatatgtgaactaaatatgcaacagatattaggattagtttgttatatttcgtgatttaaaaaataaataatagtgcagcagcaaagaaatagttttaataaaatttattaaaaaaattaatggtacgttaaattagagatttattagctaaactagtggatgtgtgaatttggttaattagcatatgcagtgtgcatatgagaagatgagtatcgatgcatgcatggaattaaaaaaaaatgatggaatttatatttagactcgtaaaaagatttgacgtgtgtttgatatagcagaacttttaattgagtatatgtgaataatgagaaatgcttagggacatgtgtaaagcaccataatccataaaaagtggtatgttatatattgtaatttaatatagagtttcaatattttaacataataaagtgtttttttactattaataaactatcattgtaattaattaacttgctcaaatactgaccgtaaaaacctttaaactattaactgtttgtaaatttaaggtattattcactttccagttaacttctaacatagactgttcatgtatatactcttatacacgttacacgt

SEQ ID NO: 228865 - DNA, 517 bp, Cannabis indica
taatttggaaattagttaggtgtcagtttagtttttttgttttctttttgttttaattttagttggttttattatccaatctcctggtgtatatataaaggacccttcattgtaccatttcaaaattaattcaataaagtgttttttactctttgagtttctaatattgtattagtaaacatacattgaagctgcaagaaatcaaattgcatcttcaagatttcattctcttcttccaacaatcatggtgtgaacacaagcaattattttagctactaccactgatgaaaatccttacatggtcgatgttcccatggtcgatgttccctgctccagttcctcactaaactccagtagatagacctgcttatgaagatgcctgatctccctactatctaagcactactaatcaccccgatttggcattagtttcacttgttcttatgcataaaaatttccagccatggaaatctgatttcaaaatttctattaggccaagaaacaaaattccctttct

SEQ ID NO: 228866 - DNA, 1815 bp, Cannabis indica
aataatgttctattataataatcgtgcaaaatagtaacgtttgtacttagtatcatcacataaaaaaacaattcgatctacttaaactggatatatatatacatattaatattatgtatgcttctgatggaattataactcaacattgcatataattaatatatagtatatagtatatatatatatgtatatatattacttaaatttgaagaaaattggacatggaaaaatttagagagctaggatcggagtgtttgatattaatgtacgtatatatagcttaattagattattgtatggaaaaagagtaatttatataagaatttcttgaagatatatgcattaatatttattaataatgtataatatgtgaattataagactctctcttttgttgaagctaaattaattatcatcatcattttcttggatttttatatttaaagattacaatgaagttccactcaagaaaaaaacaaagattacaataagttaactatgaatataacttatatattaactaattctcagttatatataaatatgtatattgaagcaacatttatcagttatatgtatattgattactgattctctcatgcttatgcatagtttttctttccttttccattgtaactaatgctatatatatataggtgactcatcacctctttgaggctttggtcccattgaattattaattttattgatcatcattgcacctttctatgttttcatcatggcatatctagctataaatatatgatctctttttaatctaattttgagcggagatttacgtaattataattctttttatcctgaaaagaaaatacatataattattacataaaaatactcactctgcataattgaaagacacttattgaacaaacaaatgattgtgccaatattttctcccatttacatttgatagatgtacacttaacattttctgatcactcatatgtaatttggcaaaatcatgatctgcgccccactaatattattacacttgaaaaaaatatatatttaataattaattatacttactgttgactctagccaaccactaattaaaccaaaaaaaatatggaaatacatgcacattatgtataagtaaattatattatttataagtattacctaagtacacccagctcatagcacccccaaccttccaaccgtttctttacactatcttttaaaatacactatcttttaaaatagagatattgacagctaaactacttgaattttaaattttttaacacttaaccacaaaaattgagtttttggaggcaaaattacctaaactctcattctgttttgctctgtacccgattcatctaaaaaatcacagctaatgtcacagtggactgtccacgtgtacacacttgtacacgtaacaaatttttagtggtctacgtaatattaattttaaaaaatagttataaatatttaaaaaaatcataaaaaaaataattttaaagatattttcttttggggatattgacggctaaaccactcgaactttaaattttttaacacttaaccacaaaaattaatattttgggggcaaaactacctaaacccctatttcgtttttaacacttttcctttttcttttcttcttcttcttaactaaaaaaaccctagcacccagtcgcctacacccaactttctccgactcccctctcacacactctctctcacggttcacaatgccggccttctctgaccaccccatgtcagacgggccacaaaactaaactctacgacctaacaaatactaaccccgatctgccctcttct

SEQ ID NO: 228867 - DNA, 1335 bp, Cannabis indica
atatatatatatatattatcagatccttaaaatgtgatttaagcccccaaatttctaggtctatttgtttttaatcaaatttctaggtccttaataagtcaattttgtgttaatcaagctaactcaaaaaaatatatattagctaataaaatagaataactttattagtgatcaaaacccataagctgttggatttttgggagaagaaaaagatatcattttcttatatttggattcaaataacaaaaaaccttagtattctttctctataaaaattaaaattcttccaaaaaatttacaagagagtataagaatatatatgtatttatatcacttttgattttaaatgaatcttccttattaggaataataatttatgggtcaaaataatttgggctaacttatattatatgatgatttactatttaattatataatataagtttcaggctaaaattattttactaaagttaatagtcattaattacaaacttgatgttctaatattgatgtttattaatgaagcaggtgcaagcaaattttaacccacaaattacagcttatataaaaatgcatttaatttgttattttatagctatattaatgcaaggtaataatgaaagaaataataattaatgttgtcaatactattatgttttgataatcatcaagcccataaaagttaattaattttatttttcattaatggtatattacttatgaatcataaaagactcaaatttgctgttcaaatttatttcttagttgagtgttctatctatttataataatttgacacttgtaatatattgcttaagcattaacagaatgaacactaattactaaagtaaaaatacaattagcatgagaaaggtgttttttgataaatatataaattttattagattaatgttacatttacaactttttttctaattacattattatctataaattaatgttattatttgtatgaatctcatataacattttttttataatggttaatttttttagattatacaaagtaaaagattaaaatttcaattttcaaaacaatttcttttggtagcaaaaatataacatttagtttttttttatatataaaatcacaccaaacataaaatttatccaattatcaaaattatatgatagagtaaaaatataatatttagtcaaaacatagtcttattttgtattttaaaatataatatttagttaaaacataaaataagattaaaaattgtattttttatttttccttctaattaaagtcatagtaccttttcacagccttttttttttaatttaagcgtttatatattacaacatgtt

SEQ ID NO: 228868 - DNA, 1040 bp, Cannabis indica
atattttatataattatattatgttaaattttaatttatattaaaatattatatatttaaatgcctataaattataaaatacaatttaatataatattatacaatataataccatctaccaaacaaattttttataaattatgatcagattaattattactagctttaatcaatatatattattaccttagtatatatataaaaacaaaggagcactgaggctaagttagtggtgagtgagaaaacaagaaaaacaaaaaggaaatgacttcgaaaccaaagttattagttagttataatattgtaatactaataaattatactaatatatatatataaacagggttgttggtctttaaatcttttatatatgttaatctactcaccagacataaattcttgtaacatattatttcaaactttgaaaatcatgtactaccatatttatatataattatatatacaactcttgtgattttctgataatattttatatcagtataaattataggagaattatataggtctcacatatatgtttatactaggtgaatgttacgtgggaggcacatatggttaattttatttgaggttttggtgtttttttttttattttagattactttactaaaacgaagagtccaatgaaagaattgtcaatataaatatgtagatcttagagatatattaccacctttgataacagagtgacatttttagagtcttcaatattgggactttgaagaggagaatttataggaaagactcaaatctaatatcatctcaaaaccacacaagtatatgaatttgtagaatactaatcatcaatttaagaacgatagtgtcgtaggacttctctcgtattagccctgtcaaataaaaaaaataggaaacttaaaaaagaattaagaaattaaaatttattaatatttgaaatgaaatttgattagattagattatttatacctttaacttaggatggtgagcacaagacacgtcccgccagccttttttacatccattaatagtcccataaccat

SEQ ID NO: 228869 - DNA, 1132 bp, Cannabis indica
atttgttgacataactattttctttcttttttttttttttaatggcaaacattgttgattctataacatcaattaatatttagcttagctttttatggggttggttgggttcttaactttacctttttattctttatttttggggcatcttatagaaagtgaatgtgtgcattttgtaaagcacaaagttatgtgtctcaaaaaaaaaaaaatatatatgtttgattttatggtgcaaaaataggaaaatatatggtatcaaaagaaaaagtaaaagtaaaaataaataaaagaatttgctaaagtaaaaataaacaaaaaagacatggatgtaaaatgcctccaaagtttatgtttttgctctatttcatttttctgccgttattcttcttggtttgcttaagattgtatatgaattttaagttaaaattggagtatataaaataatataatgtatatactatatattcacaaaaaagtgcacatacagtatacaaaataataaaaaatatatattttataaatataaaatgtaaatttatttgcacttacattaatcattggttgtttttattaaaaatataggttgatgaattggtttttttttttagctcatatattagttgtaaatagttaatgaagtgaatatctgtgttaaaatttaattgcaacagaagtatgagttttactagttaattgaaacatttgatgaggaggccccgcatggtcggtcctgagttgaaataggttagcaaaaaattttttttggcccttactataaagataaatagtatttttaaaagggttttttttttatttggacccttaaaataagtggaccctaaacatgcccgtttatggctagggtcggccctaaagtcccgtccaactacaattttactgcttaagtccccttcttaactttataaatatatattatctcatcacaattatatatttttattaatatatttttgttttagagatctagagataaatgctaggttagtattacaataccaatctatgatatttcttgatcatttctatagaacgatcatgtatattttttagggtaaatactattttggaccctgtattttgtaaaagttacagattggaccctgtgttt

SEQ ID NO: 228870 - DNA, 1226 bp, Cannabis indica
aatcacgtaatacgcctatgttagttagggtgttacaggtggtttttgagcttcacgaagctggtgtggggggttcttttgttcagggagtgggtgtgatgccatcgggggcgactgggattaatcaatggcgaccgatttctattaaaaataaggctcgtgttttaggcaagggaaaggatatcattgactctagtgcctcgtgcaaagttgttggtggaagccacagtgggttcttgaagtgtaatgaggcctttgataaaagcattaatgttgaggttcgtatttcttctactgttgatttatcttctcttgtgttcactgctggaacggcgagccctgcggagcagcgccgccgagcatgatgtatctgctaagctggaatgtccaagggattgggaatccttggacattgcatgctctacagtcccatgtttgggattttaacccgagtattatttttttgatggagagtaagttagtgaagtatcaagcggagaggttatgtgctgtgttacaatattcaaagttttgggtggttgatctggtggggttgagtggcggtttgttgctcatgtggaaggatgagttggatattagagttgattctagttcctcgggtcacattgcggctgtggttactggggcagaatttgttccatggaatttaacttgcttttatgggcatccgaataaacaataaaagaaattttcatgggagttgtaaaaaattattgcgggtgagactagtggaccgtggctatgcattagggactttaatgagatcgttagtttatcggagaaggttggtggccgaatgaagagtgccagggcaatggaggatttcagggaggtaatagatgcttgctaattaattgattttggtacttgtaaaactgagctattaatataccccatcaatgggcaaggtctaacgaataagaaccctagaactataaatataagaagacccattcaagcaaaggtttagaatctcattcctcaggtgctcaggaaaaatctatgattcaaacacttcttttaatcataagactttttgagtcttatcataataatatcaactcatcgactaaggctcattaatatctaatcacgtaaaaaccgtattgtgatttctttattttcgaacaatttctttaatattcataaataatggtttccaaaaatttcactaaacaccattattcttgttggaaattatttta

SEQ ID NO: 228871 - DNA, 1124 bp, Cannabis indica
agtccacgagttaatattattagggattgttttatgatcacaataatggtgattttctcataatttttgtagcgttttggcttaagaggagaaattagggatccctttacaatgagattgttactctatttataggaaaatgcacccatgggccttaattagcaagaacccatttaattaaggaatgtaataaataagcttttaccctttaaatagagttgcgagaatgttaaataaaatgcatcctaccattgggcctaattggggtggtaggtgaaagctaatatgatctatagtataagtgacagtttataactgttgccacccatacccaagcatagatgatagttttcaactgctgggaatgctaaattggcgatagtttcgaacaatcacctattctacctattttgggacgataaaataggcaacaattatagaaaccaacaggaatattttaaccgactgttaaaactatttggtaaaaccaattttttagtagtgcaatactttttacgtggaaaaaaggaatgtcaaaatgggagtgagagtgcgtatcccaaggtacatcctttctttgtaagggtcagacttttaggtaaaggttcaacttgtaaagtctttttttaacaatttagttgtcaaaatattatataatttattgtgaatatttaatatgaattaaatataattttcttgtagtatattgcgctttatggctggtatatttttaagaactattttcttaagagagaaggaattctcttcatggaaagtgtgaataaatgatttttcatggtataattatttttaattgattgtgattgataatttttgtatttctattatctataagattttgtaattgttatcctttttttcacaccatgacgtggcaatgcgtactagtgacacgtgtatgttattctctgcacttgataatagaaatgtttcgaacagacttcgagtaatacatctgcacagacaaagtttgccagaccgagtaaagcaaaggcagatgatgcgaacaacaaatgaagtcatttctccgagcagtgcatcaagacttaactacttcaagattgatatcgtgaagcccaacacaaaaacaatccctacaatca

SEQ ID NO: 228872 - DNA, 577 bp, Cannabis indica
taacaaatcaattggaacaaacttcaaattaatattacaaccagggtaaagtaaataagctctagcaaaactatgagttactttattcgctgatcacttaaccaaatagataagaatgttaccaagttctgaaattaaaactttacaatctttgattacatgagcaaacatagaaatcataacaatatagttttgtaaagcttgaacaacatttaaacaatctgtttccactaaagcattattctatcctcgctctttaatccaacgaagagcttctcgaacccccatagccttggcaagctccgattcagtactaccattggacatcattgtgcgcccttcaatgagccatcccctttcatctctagcaaccaaatccaacccatatttatgatcagagtcaaatagagttgcatcaacatttaccttgatgatgttagcttgtggtaagatccagtgctccactccgtcacctgcctaaaaatcaggccatgacaactcaaattttgagttcttaacactcatccatttatcaaggaatctttttgcattagcaactacatcatcctctttgaaa

SEQ ID NO: 228873 - DNA, 1664 bp, Cannabis indica
tcatagcttagttggttgaggtttatgatatattatacaaggtcatgattcaaatcacataacactttttcttttaatttttttgtatatagttttgaaggtcccaaaatctaatttaccttaagcccatatattctcatggtcggacctagttgtaagccaacgagaacatcttcaatggacatgcaaataagtgatgtaattgtaaatgtaaaattcacctaagggagttacaaaaataagcttcgggttacccactgcgggacctccgagctccaaaatatggctattaccactaagagttaattttcaccgttagatcatcattaataatgaaaaacattcaatttgtatttttttcttatttttatgggcctctttcacctatagaaagagagctcccttagctcgtttttcactttcactaaactaccccacaaggtcatagcttatctttgtagaaatttgagcttatgatacttagtcttttttgtaatagctatctcctgaaaaataaaaactcaaagtggacgtagctcaattactatcgcaatacatggagtgaactactataaatttgttgtgtctctcttataattactatcgcaatacatggagtgaactactataaatttgttgtgtctcacttataattactaattaactatctttttattctcgcaatctagcaagtgggtgcggcttaaaagagtctagtacagatttttgagtcaacaatcattattctgtttgtaacgtatcacaaaacttgaccagaaattaatttacaatacagtgaatagtttggaaactatttttaacaagctgaaaaattcgagaagcacaataatacacaggtcatagttctagagtaaaaatcctaaatagcctattactaaattgttcttgactatgaatgttattttttttaggggatgtctccaactggaacacaacaaattaggataaaattaaaaaggttcgtagcaaacaacaaggcctataactaaaaacaaaagttgaaaaacactaaggtagcacgaagatataaacacattaaaccaagcatgattgttttataaaaatagtctttacgaaaatttttattagcaaaataattttataaaaaaaattattagcaaaataattttgtgcgatcgcagaattaaccataaacaattactgatttacattatgcaactattatagtcatatagagtaaattaagtgatattattttgtaaattttagtattcactactacaaaaatgctatttaacaacagttatttagcaacacttaataaaaaagtgtggctgaatttttatttttttttaatcagacacacttaaatataaagtgttgctaaaaaacatatatttttaaataatttatattttaagctaaataataattactaatagcaacacttctaaaaaaagtgtgttgattgataaagaaaaaaaataaaaggcaacactttctacataaatgtcgccacacataatataaatttaaactgatttttaattagtggagtgtaacctcctttttatcatgtgtactttcaaagatgagctacccataataaaaaagcaaaactgtcattttctctctttaaaccaccatggatattaaaaaatctttcaaagaaattatgcagt

SEQ ID NO: 228874 - DNA, 1269 bp, Cannabis indica
aattataattttgtaactaatacattattagatgcagactttttagctataaaaataatgatttataattagttataatttttcatttttaattataaattttatcatgagtaaaattaaaattttttgtagtaaaaaattaccaaacaactagaacatgcaccaattataaagaggtgtaaaccaaacaacaagaaccaaacatcaatgggaaaatcccaataaaaaccaccaaaaaccaaacatcacaacagacaagtgtaatatatataaagagcattgttattaggtactagtatactcagtaccttctatataggtgtgttttatgatttgttaatgttattttttaaaatttatatttttaagttacatagacccattacttaattataccaacagcaataataataccctaaaaagagtactatgtataatgctctttagccattctcatttataaaacatcattattcattggaaagtaaaacgagaaacaaaataaacaaaaaactaaaacatgaatatgcacacaattaattactcgatacaaaagacagaacaacatgagagtgcaccgctttgttcaactaatttgttgtttagtcttcttccaatcccattgcatgtttctttttcacaaaaatattaaattatattacgttaaagaataagggtacgtagttattgcttattggctagggttatagagttttgtatatgtttaaacaaccttatagaaaagaaaagaataaccaatagagacgatcagatatatataatcaatgatgatatataaaacgtctctttttctgatcatcatctaaaaattaattaatgagaaacgtaaaccattctttcattttataaaatgtcttattttatattatcaaaacacagagacagttgacaaattaattaaaatattaatatacttctccctgcttaattcctggtcagtctatttccaaaaacccccttatattatagaaatgttagaagatacttatggtatttagcacttattgtgatatgtaatattgctattaatgttatttgatatatgattctacatattttactttaataaatattataaaaaatcgctaactaattacagggcaccaccttatagtagaattagatacataatttggtgccactgctaataaccccctacttcgccgctattggttactagcatcgagaatctgtcgctaataacccgctattaattaacaagggaaatttgattttatatacttaaaa

SEQ ID NO: 228875 - DNA, 1586 bp, Cannabis indica
actatgtgagttatagtaaagatgtattaatgtatttatatatatttcatgatatcatatatacattaacataagagaaatacaacagtgtattaggggcactattaatagtgtttggactatatctggtgctgtggggaaaaggaaaagagatgaagaagaaagttatagtagcaataactacttgaaaaagctgtggtgatcaaccagcggaatcatcatgttgtacagtacttgctcctactaataatcccaacaaaataatattgttcaacaccaacaatatttaatggaagcacatgaacaattgatgcatcctaataaggatttcacatatgtcaaatttatagctcatctgaactgaaagggaacatcgtcaagccaaggattcgcaaagaacataaacaaattagtaaaataataataattcaaattttgtactttcgcacatctacgtatcatataggtcttttccaattttaatcatgtgcggaaaacaaattgaagcattaatggaatgatatatatatacggaaatatcttcttcttttttttaaaaaaaaatgagctataatacattactttaactttcatttacaaccagcactttttttaagacctgcaaatataactatttaattaagaagaaaaaaaaacaagcttacaactttgcaaaccaatctacttcctcttgtcttatcttctttaggcattattggtatgactctatatttaacattagctttaatttcttttacaattgtatttatagtttgtaatctttggttccataaagaaaattctattccaccaaataatgtatatagttgctgccattatcgaagctatcacatttttcccaaacttgctcaatttacttcgacgtattatctttatcaaatcagccactaacatatctattgtccactccaatcacatctttattattgtcaaacactgttggcttaaatgacattcaaagaataagtgggtgacagtttttatgtcattcccacatagtaatcatatgtcatctttacatatattttgaatttaaaaaatcttaatttcacctgcaatcttctaataatagccaaccacacgataaatatatgtttcgacttatttagccaactccaaatcatatcattccaatgaacaaacgcaaaagatatatagaattatatatatccttagggttttgtattaatcgactttttattttgttgggattatttttcttagtttctatcagtgtataactgacgcaaataacttgtgtcatttataaatcaatgcaaaattttctagacaattatttttgtcaatttcgggctttgactgtcgtgttgaccaatgcaataagtctattttgtagtagtgtctttattttatgaaataataatttggattctatatttttgagtgatatatagaataagactgaccaactcaaatttcgtcaaaatagaaaatatataataacaacctaaccttgaggtattatgaccaaacattactacaattaacacatttatcttcgtaatattcatggaaaaaatgaaaatcaaagacataggtcatag

SEQ ID NO: 228876 - DNA, 964 bp, Cannabis indica
agtgttaacaaacggcacctaagtaaataaaagataacattttatatatagtctaagcaaaactacttagctataaataagattaaaagatttattacgtatatgtttggaaataactgtaattattagagtggtaattacacagtctaataagagtatcactaatgatagcattttgaaaaatgtttaatgagttggaaagtttaagcggaaaaatatatggatgttatactattaaaaataaaagaatattattcttgaaatacaaaatttgcattaatgatacacaatgatattgatgctatatttttttttaataaaaaattaaaagtgcaatatatatataatagtttaaaaaaaatatatttatataaatataataatgtgtgagattataattataacattcttaaaatgtgctatactattaaagtatttttagaagtaagagtgttaaaaataatatacaagacagataaataaaatattatatgtttagatgacgtgagaaatttaacacttttaaaaatgctatcattagatgattagaaattactcagaaaaataatattttttagtagttaatatttaaaataaaaagtctttaaataattgcacaatataattatactcaattttttatgggagaccatgaaaattaaaaaagtataattagctctataattagatgttctaacaaacataccaaatcaattaattacactacttttcaaacgcactctaaaatgataatttgtattactacagtacagaatacaaattagtaatttatcaattttcaatatataacatagagacttatataagatacttcttcactagtgttgctctaccaaaaccaactatgtcttcatcccaaaacatcgaacacgtcatcctcttcaagctcaaaatcgatgcggagacgtctgaagtcaacaccatggtcaacaaaatcaagggc

SEQ ID NO: 228877 - DNA, 1046 bp, Cannabis indica
gatacaaaatcaaatactctttttcgcctatacactttcaatcatcttattatttcttctcaatgcacttttactataaaattcatagtaggaacgccttatgataattagccgtgaactcattttaaatttaaggagaatgtgatttgaatgtgaagagtgaaataaaataaaaccagaatgatctttaaatcaatttataagacatactttacacaaatggtatactttacaattgcataaatataattctcagatctcaacgataattatagtgttgctgtggattcaatggttcccttgctaataataatacttcactaaataaaatctttatgtaaacgagtgtataagaagggatccaacaataagagctgtttactttaaaattataaaaataatcatacactggaacacaaaattaataaacaagataaacattaatggcacttgtgataaactatcattaaaaaaatgtgttttgcatgtaaagtattcattaaaacagattctctaagatatcatacatgataatatatatctaattaagatatgagttggtgtaatgggtggggagggagcatggcacagacatcggtacactgtctatatccaaatctgaatatcatgtgttgatttagaagatgcttcacgtcttcctcacctaatgattttaatataaatacataaagtagatggcagagaaaacaaggaaaattttgcaacaacttatcacattcaaaacttttagccaaaaagaagaaaacatggctgccttaaaatccaaccttcatgtccgctcaaacagcttgccatccaaatcacaccctgttatcgaagagtgcagtggtcatttgttgagaataggatgttctgatgcaacctcatcatcatcttccattgcccaccaactcagtgttcttgaggatttgcacatttgtgttgagaaattgcttcagctacccctaacacaacaagccttttcccaaggccaccaagagaaatgggttgatgaattagtggatggatctcttaggctcttggac

SEQ ID NO: 228878 - DNA, 995 bp, Cannabis indica
aattgtaaatctaataccaaaataataatgtggttcttttttattttttttatttttacacttcaaaacagttttttttatatttttacggaattccacaccaaaagtcaaatagcaactaatggagcaacctaaatcgcaaccaaaattcgtatagcaacccacatagaaaccattagagcaacctaaaccttaaatttttttttaaaaaaagttaaaaaatatatgaggtaatttcctaataataattacaataactaaaaacaaattaacaacaatagatttataaataaaataccaaaataataattataataaattaatgatgctatattagttggcgtacagttaaagactaattataattttcatcaacaaaaaaaagactaattataattttggtagataacttttaaatatatattttatactttgaaatattgaatttataaatccaatatcaaaataataattataataaaaaaagtatttattattaaatttcttaagaatttttttagtttaaatctaatagaaaaaaagacaaatataataattgaaaaacaaggcattgtgacttgtaaatttaatgccaaaataaaaatttagttcttaacaaaaaaaaaattagattcctcttttcaaagaataataattaaagagcaattaaatttgttactaatatagacaactttacgtataattttttttaaaataattatagttaaataatgatgctatatttattgatagcatagagttaaagactaatcaatttggtaaacaatcttctataaatatattttttttttgtaaaaattcatctatatatatattatataaattaaagtaaatgattacatttatattaatcaaagaaattatttgggaagaataaagtgattaacagaatcaatagttggactggaaaattattatctggcgctggtaaagaaattctgttgaagacggttgtccgatcccttcctacttat

SEQ ID NO: 228879 - DNA, 3198 bp, Cannabis indica
gagttttgtaagcattttctgtgaaaaaattaaggaagcgacagatgcggaattttttcctttgcctcatggtttcccaagtaggttcaaatcacttcgatattctgagtttgtgtcttcgaattccagcaggacttttagatgtctacattttcacaactatagtttgcaagcaaaacataatattcttcgcttttatttttcgcgagcagggtgttccaatgatatacatgggcgatgaatatggtcatacaaaaggcggaaacaacaatacatattgccacgataattatgtgatcctcgaaactcttctgattctctttattctagatcaagttccaattgttaatggtgatttttactaggccgcagatcaattactttcggtgggataagaaggaagagaactcgtccgacttcttcagattttgttgccttgtgaccaaattccgacagtaattaattaaaacctctaaattacaagattgtacttttatatttgctttgtggttaacctttttccgtcttatgttaaatgctatgatcttgcagggaatgcgagtcactcggcttagatgactttccaacagctgagaggctgcagtggcatggccatgctccgggagtgccagactggtccgagacaagtcgttttgtggcctttagtctggtatgttctcttcttaaaacttataatgagattcactctttgaaaatgatctttagttcgtttttttattagctaattaggatttttatcctttaagttttgacatgtaccaaattgtcttctaaactattcagactattaaactattgagattgttggattcaataatttcagtctaattccgttcaattatgttgactgatgccaaatgtggtgattgtccatgtatcaagtcgtgttctttaaatttccatccacgttaggcgcctgttactaatattgaacggtattgaacgaaaatcgttaaatttaatatttcaatagttcagggtgaaatttcaacgacttgaaaagttcggaagtataatttggtacatatcagtagggaaaaattctaattagtcatttctaatttgtcatgaaaaattgcaatttctaaatggaaactaaagccctttaagctcgaaaagtgaaatggatgtaaaatgcattctgaattcaccaaaatgttgtcaaaacttaaattctttggcttcttcggttttagctaacattatcatttttacttgacaacgaacgcagaaagactcggtgaaaagagaaatctatgttgccttcaattccagtcatgtaccagttaccattacactgccagagcggcctggacacagatgggagccattgatcgacactggcaagtctgcaccttatgacatcctctctcccgatctcccaggaagagatgtcgcgttgagacagtatgcacacttcctcgactcgaacatgtaccctatgatgagttattcttccatcgttctattactatcaccggatgaagtcgaaatcatttgaatcaaactccacggcatacatgttcaaatcaatgtgtatatattctttactcagagtttgattatcaagcaaggtaatgtttatcattcaatcaaatcttcaccccatgtataatataatgaatggtcttaataaaaagagtagttaagctagttgttatcgttgttgtggtttgggggtaaaaatcctaattttgaatcgtgtacacatctcgatataactgccattacctcgccaaccatggattcgtacaccaaagcttaccgccttcgcttccttgccaaggaatctcatcgacactcgcaccagttccaatccctactaacacataggcgattttgtacaatttgctagtgttgaaggaccattttcttcaccaattttccaacatgtctagccaagccaacacactttttggagactgaatataacttcactaagtttgggccaaagaataaaaaaattcatgaaagaatatagaaaaatctaacttgtcttaacagaattatggaacttggattggattggtggaagaaattcaacatccaatgtataattggattatactgcattttaataatccatacatgtataaatatggtgtttctactttcatagttttaattttaatttgtttatataacaaatatatgttatttaagatattttataattttttttaaaaaaaattagaataatttactgtacaaaagatactagtctattttgcacacatgcaaaataaaatactcactggtataataaattatttgatttttttaaaaaaatttagctaaatagatataaaaaaaatataattgtaatttatactatataaataaatgctaaaaacattaatgagtgtatcaatcaatgcacctattttgaagggtgtattacaaaattttcttatatattttttaattaattacattttgtacaaataatatgttaatgggtaaggatcttcaaatctatttacaattctcaacctaacacatcccacaaaaaagaagtgtctttactcttcacgagaagggagacactaacattacaaaaaagaatggtcattttggtaaattctctctctctttgacaaattttggtaaattctcttatttattttggttataaaaatatatgaatctttttttcgacattgtaaattatttgaaattttctaaaaatttacaggtgatactatataattataatacgatcataaaaaaaattggacaaaatttttttctgaataccgaaacatatagggagtctacgaaaatacccttttaaaagagatgcaccaatgtatccatatctgttttggcatttgaaataattttgtagttaaattttttctcatagtcatgtacgttataattatttaagacatcttacaaaatttaaaaatttaaaacatcgaaaaatagcattcaaacaatgtgttgcatgcatgactattttattttatactcatgtgaaatagactcttcgaacacttctttttatattttatcaaaattttgtaagatatcttaaataactataacatatacgaatatgaaaataaattgaactataaaatttgcctagatggaaaaatagatagagagtgcattaatgaatcagtgcatcccttctaagaggagcattgtaaactcctatttttggcgtgt

SEQ ID NO: 228880 - DNA, 2059 bp, Cannabis indica
atattttgacaattcccacttcaccaagttttttaaaattcacgagatcataaaaatcttctcagttgtagttaggcctccagaaaatggtcaagaggaggctgtaaatcagatcttaaagactatgcttaagaagaaacttcaagattacaagaaaaactggccaaaaagaacaacctcatgtgctttggacctacccaaccacaaccaagtccactataagacattcccctttctccttatggatgtgaagcaatggttctagttgagaataccatactgtcccacctaagaagaacctatgatctagaaattaatcagtcactccttcaggattcccttgacctagtcgaagagctctaagaggcaacaagagtacagctagagtcttatcagaggatattagagaagtacttcaattcaaaagtttgggagaggaatttcatggtaggggacttagtcctaagatgagttttccccgcatcataagtccccatagtgggggtgctaggtccaaactaggaaggcccatatgagattgaagatgaaattttctctagaatataccacctaaaaattaaaacgcaatcgaattatggagtgcttggaatattgaacatcaccgtaagtactacaagtaactagaaaacaagtattcgttatcatctttaaatttcatgcaaactttgggtcgcaaggatcaaaaccttttatctctaatgaaataatgacatcataaaaaaatttcttatgtgcgcaaagaaaacttgagagaaaaataagtgattcaaaccctaaactcttaagtcacttgggggtagagagcaaactagcaaacactaaagcatcatagctccaagtttcccacattataaaattgagtagaaaacactaggcttagtgtatatcaaaaatttacacaaagatcaagactcaaaaatatgaaaagaaaaacctaagatatgaaataaagtatgtgtaggatgcaaataaataaaggcctcttagccgcattgtcataggtaaaggtctctcggccacattatcttaaataaagatcttccagttgcattatcttaaataaaggcctctcggccacattttctttaatgaactaaaaatgctcggggcaaggcttagtattatccccctaaaagaaataaccccttggttgcaaaaaactatatttgtaacaataaaaagttagagatattattcaagttcaaaaacttggagatgtcagaggagtaagcctagaccacccagcttatgtgccaaaattgcttctagcttctagtccttgagatggaagcactccaaaacctatttagaattcttcataaagtgaaaaaagtttcgtaatggttcgacttccaggttatgaacaccccatcctcaaagtactttatagtgttggcatgtgatggaaattatagtaggagatggcctctatgccgcgacgtcctaggccaactggttggcatccaaagagttcaaagttccttgagcttaacagacaaattggccacagtattaagaatgaagcacttcaactttgaccaatttatgtgtcatgctggccaattcagtcttaatgccttccccctctagttggaccttggctaagtccacttccttctgaacaaaagcctcctgagaatctaagagttggccttgagcttggttaagttggtcctgggcctgggtaagataatctcgatcttgttgaagttgatcctgagcaagatgcaactcctcctccaactcagatgatttttttaattctcgctcccagagattcttctcctccaataggtaatcctagagctcctcaacctcctttccagcctgctttaatttagccatggccttgctaagacctccaaaagttgtgacctcataaccttggtcaataaggttcttggccaagcatcctaccacaattgaagcatgttcgaaacaaagtcaggaaatgtgggacaagataaataaaaataaaggaagacaaagattggacaagggtcttgttacgaaattattaaatactagcaagtgcacg

SEQ ID NO: 228881 - DNA, 1157 bp, Cannabis indica
atttatgatttcttttgtagtgtatcacaggagctagataaggattatttttgtattttgtgttgttttctttgggctctgtggaatcaaaggaataatatttttcaccataagcaagatagccaaccttttgatgtttatgactggagtgttacttttttcttcaagtttttggattctcagcaggtccctgttcctccctctgtttccaatccggatcaggcagctttgcaacttattcctcctcagggggcttttcagatgttcactgatgcagccattgatgttcagaggaaaaaatatagtgttggggctattgtcttgaatcattctaatcaggttgtggctggtttggctatgccatttacaggctgtgttgatcctttggtagctgaggctaaagcaattgtccatgctcttcagtgggcctcctctatcctcttgcctctggacattttaaaaacagattgcaagtctattgtagataaattgtattcttgtaatcggggttgtaatattttagatgatttagtaacttgtatcaagagcttgttatctccttgcccaaacctccaagtggtccgtgttagtaggaattataatacgttggcgcataatgttgctaaatggggtattgggcttgatagtgagttcgtttggaatggctctttgccttccttttagtcttgtggttttggtctttgtattccacaagattttctttcaaaaaaaaaaatgggagtaggctgttaccactattacggggtagaatctctataacaaattcgtgttcttattgattaattattattattaattgtttctaatcactttaatttactcatttttattgactaaaagtgagatcaacaagtagttttccctctaattattagttcataattagagttgtcaaaaatatcgttttacccttctaattatctcttgaatccttatgtatcattaatttaatgtgaacagttaatctataatctaattatagatttggatcaaactattagaactctcaaaattaacactataagggaactaatatttgatcctctcagactgcttggattccattattgtataacatgttcccagtgactcatgttattaagctcctaaaatagaagttgtaagaatcattttct

SEQ ID NO: 228882 - DNA, 1674 bp, Cannabis indica
acctaaattctagtatttttgtaagtttcccttattttatttatatttttgtaaaaataatctctccaaattataattttttttcctaatgtagtcatgaactattgtagatattgtcccacatggaatatatggtagagtattcagccatatataagaatatgggctactctactcattaccaattagttttgagatggaatcccataattctcaacatagtatcagagccatatcgaacattatcccacctacgctacacataaaaattcttgaattgtgccagagtagcttcaaattagagttttatcaaaaaattatctacaaaaatgagtggaatgtaactaaatggacaagtatcataatttgagatgagagaactaatgtttgtcgtttttttctttctgaatttagtatgactaaaatttattaattggatctggcaaatgagttattttatcatctaaatcatacgattactcgtgaggttgtttttgtcggtttatgagttagtatttgtcctttttaggaatgcagttttagttctttttttgatctaaatacaatttgtgttcttgagttagatttgcactacatgcatattaaattagttttgttagcatttttgctgaaatgggagatattcattaagaaacaaacaacgattacaacgaaaaaaataaatttataataatcatagcagcacgagcaataataatttttttctctttaaaaataatatccgcgattttaataaatctactttgtattttatagaacatattttaactaatctatattgtaattgacaactaatcaactataagatgattcataattatagtaaattttttaacaaatatccaatataaaaaattgccaaactagaaaatctatttatgtaaattccagtcaaaataatatggaacattaccatataagaatattgataatatatctcactttgaatccatatttgtctccttaccataataatcaaccaaaaaattatttagcaagaaatgaaattcatacacattaattattgagagagaaaatagtattttgtctaaaacacatggaatattcttttatttataccctacaaaactcttttatttatactaataatatgacatttgtctttaaaatataataattgagtactagttctatatttatcgttattctttgtcccaaatatcaatattattttttttataaagtttgatttttcattaaaaaaatatatcaatattatttattgttaaaaaaaattaatatttattttttatttccttctatcagtattttaataaatctaatttgtcttgtttctagatctttttaatattcgaaaaaacttaattaacaaacacgcaaattaaaattacataattaggaattatcattaaaacctaatataaagtgattttttttaaaaaaaataaaaataaatactataattaatataaaaaaaattagactattttgatttatgatataataccataacgaaattcacaatttatttttaatattttaggaaatttactataaataatatcccataaggcataagatctgcaattcgatttattttgttgactaaaaagatttcatatctaataacaaaaaagtaataaataataacaacaagccattttttttttt

SEQ ID NO: 228883 - DNA, 712 bp, Cannabis indica
taatttttcccatatttttgaaaatagcccttttaaaaatatgaatttagggcatttttgtttattattttttgggcctgagtatagacttttgttgttctactcttgagctggccctggatagatagaagagaaatgttaaagggtatctatagtgtttagcatccttatgagatataatatcattactggtataattcaatatcgaatctcatttattttactttataaaagattataaaaactaataatcaattatacagtgtcacatcataataagatagaatgaaacaatactactagtcaataattacaaaacataacatatctctaaagcctctttctatcccatgaagaaatgatcacattttcatactattattaaagctattcctctttttctaaccaattacatacatttcatttcaactttgctttttcaattctccacaacttttctccttcctttctttctttcctttttttaattttaaatataaataataaaatattattctaaatataaatatttatcacataatgccactaaattaatatcatgtttatttgatgagttgaggagtttatcttgcatgtttccattattttggttattcttctagtaatgtactttatctatacgtaatctaagttatctatttgattgatcacaaaaattaaatttgtgtccatatatgattatctctctata

SEQ ID NO: 228884 - DNA, 1490 bp, Cannabis indica
cactccggcacgctcacaatttgataatatcgactcttatagtttattattctttatcatgtacttttttgatcaacaaaacgacatgtcgttttgttatggtgaaacaacacgtagttctgcaatataaattagaatcacacgtaatagtaacacagtctaaagaaacaaaaaaaaataaataaatttgcacaacaaattatatttacataatatcaagaattagttagttagattaggtaaaagttagttgttatggaattttttataaatatacaatatatatatatatatatattaatattacattaaaaaaacgttgtttaaaaagaaaaaatttataaatcgtgccacatcagcatttcacattgtggttgccaacattactttaaaacgttcgacgattaaatagacgcgcccagaaatccacctttcttggcctttcctgcacgtgcttttcaaaattaaaatagaaagtaatatatatcctcaagatctaataaacgaaattaaaaaacccaaattgaatgagattaaatcagagaactccattgacaaaaaaattgatagatttaaaaactgaagaagaagatgcgatgcagatttgttgttgtatacaacaaacaaaccaccatctcactcaattgatcaatacacctatcatctcataaaaaaagagcatgtagcttcgcggaaggagatctacgatggtatcttcgacatcctaatctagattgcaacatgaaacaaataatcatgaatcgtattctatatatacgattaggaataattatttcaaaatcattttctaatattgtaaaattcatatactaaaactcataatacaattcgaatactctatacagttaaaatgcatcatattaatatgaaatcactattttgaaacacgtatactttgttaatgttgttagtaactaaacaaatatgatatttgttaattttgttgtgtatagtgttttatgaacaaataggaaggaaaaatggtgatgaaatcaaataccctattaaataaaagttaaaatattttaaaaaatcagaacaaagtaaacaataaaaaatttcaaacatctacataaacacaaacataatgaaaaaatctatttaataaacttgttttgtcatctccaccatcatcttcattctccttagatttcttaacatcatccttaaaaaggacatgatctttatcatctactttagcagtttgattttgttccttcaaccattcatgtttacttgaataaaactcataatattaaatgatagagcatcatctttaccacctataaaaataaaatttaaacgtcataataaaaataataataaacaaaggaaaaagagtgattaataatcaaaattataatataaatacttatattaaaactaaacaataaacaaaaaatagttacaaatcaaaaataacttgtgtagattgaatattctcatcgaaccttaccattttaattcat

SEQ ID NO: 228885 - DNA, 2763 bp, Cannabis indica
ggctccacattggtttttgtactacataacatgggtgagattcgtattcctagaagaaacatatacctttccctcaaagatgaaaaacaaccccgatagagggcaagggaaaaggcattatggatgaaggctctatttctgatagcgactcttctgatgatggcgtgccctaaaagtatccatcggggggacaagatgagggttaatacccttcttttacttttgtttgcatatactatgcaatgacatgctttatttatttaattgaattttttgtaactcactttgtcttcatgttttagggatatcttttgaagttgatagatttctcattaggagcatgggtgcttcattggtcctttataagagctctgaagggtaaaaaactacctcataaagctccacaagaagaaatccttgtacccacccaagagaagggtggtcaagggtgcggagtgacacactctcctctgcctccatcgaagaaggccaaggtaacacccgacacgaagaagattggtactgggacaaccatcaacactatttagatgccagatgaacatgtgaatcttaattctagccaactttttgagattctgaggaagacaatttatagccatgaggaacacatcaattcgatggcttcaacttggcaatcgaccatagacgccctaaagaaggagggaaatgagaaatcattggaccagattgtcaagatttgtccacagtaagtatctattttcttgagtttgtttttgaatttcattgttcttcttttgactaatcaccaccatttcttgcaggcttctcttttcgtctcataccatcaccaatgcacaaagcgcatgacatctctgacgacgtttgtacttaaacagaagaatgttgagctgaaggttgcaaagaagaatgaagaagatgtgaaggcatcttttcttctcaaagaagtagacttggtcgggctatgtagggaggcgaaaaagcatgagaagtctgccagggactcctatgaggaggttattaagcttcaggctaagctgcaagatgtccactgcaaaaataagagtgggaaaaggaagtcatcctggtatgcttttcaagtcttctataacttctggaaataaaaccccaggaaaaacttcaactacctccaccctgatgatcataaagaattcattgcttactatcgttccatggagaacttgctagttgatagttccactgaagatgtgatctgtcttgaaaacttggatgacactaattttgttgaagagcctactacccagtttggcaacaaggcttgaggagtccaaatagtgcactttgttatgtctattattgtcttgtttttttctttttccaagtgtctagcaatccttataatatttttttatcggtttgtaaggacatggcttattgagatcttttgaccttagggtaactatttgacctttgaataaggctttcttcatttttttattacctttctactttgccattgtccctttaccttgattttcctaagtaatcacgaacactttataaaattttaagaattctatgtatttttatcacatgtttgcgcatgtatatgtctgttttcccccaagtaacttagtgagcttattctaatccttagtcacttttttaattaatcgggctttctataatcactcactgggcatattcttgagggggcaagggtttatacacactgcaatctgtgggatcgatcagttccattaatttagcaagtactttgggacaaagtaggtctatagtaataaatcttacaaatgggtaaaatcttcctgtaagtgtcaccaccaaggtgacttacttttactagtattttggagtaattactttaaagtggtaaaaatatgacttggtaaattttttgcaatctcaaaaggggcataagcgtgccttaaataacatgactatgcctagaggggagtgtatactgcccagcatagcatgccctactgaagagtaagttttgattatgcaagatgacaatgcttgaggggtgggttattccacctagcataacatgccctgctaaagagaaggtattgattgtcccttgacacaattatcattggacttttatcttcgaacaattaaattttaggggcaaagtgttcctgtgtaattgttccttgactttttataagcaacatgactatgcctgggggtggggcatgccgcccagcatagcacgcccttttgaagagaaggtcttgattgtccttggatcaattacattgtaggggcatagcatgccctatgtaattgtcattggactttttatcaatcaacatgactatgacatgggttgggatatgctacccaacatatcatgccctatttaagagcagttgttgattacccctttagatcaattacattgtaggggcaaagcatgcctttgtaattgtcctttgactttttattaatcatgcctaggaggttgggtatgttccacaatatagcatgccctgctaaagatcaattacattatagtagcataacgtgcctgtgtaattgtccttggacttttatcttggaacaattacattgtaggggcaaagcgtgcttgtgtaattgttccttaatattatttgcttgaattgaagaacatgcccccaagtggtacttgtaggctgcctagggaaaatcatgccccctaggttattgtaacgccctaaataattaggcacgctacccaaaaatgcttataaaaccctaatcccctaa

SEQ ID NO: 228886 - DNA, 2215 bp, Cannabis indica
cccaatcctagacactctaagatcctttttcaaacctgctctcatttcgagtcaagagatagataaatagacacatcccattgcattgatccggggcgctcgtagtgactgagggggtcgaagaccaagaagtgagttatttatcagccaagcattcttcttacggctagatccaatctcttggtccctgcggaaagaaaaaagaattttacgttcttcctttcggaaagggaggttttttttcctattgattgcaactttctctagaccttcgagaaaagcatgaaaataaaaatgagtgtattttaaagaatataaaaatagaagtaaattatagtagttgatgtcatgcattaatgaatctttttaatgctgttttctcaaaagataaaataaaaattgtttctatatttttacctaattttttttttttttctaattttgagtatttataaaaatatggcttcatttcttgtctggtccggcccacattgcttccgcagtttaaattggaatcgtccgagtcgactcagtacgaaagacgagtcggtttggatcccacagttcattaaggcagaaaaatcgtctgagtcagaactgagaactgagaaagttgagtgaagcgaattccggttgaattttcggagtttgtttcctgaaaatcgatttcgcaaaagccatggacgcggttgaagcagtggtgactcagattcaggggctatcgagtagcgccggagacctgacgaggctccataccattctcaagcaagctgaggaatcgcttcattccgagtcggttcgattgttttctgctcttgaccaactcgacccttccaagcactctctcggattcctctatattctgtaatcttctgtttcattacatatatatatttatataagtatagatgtgtttgtataaacgtatattttttgctgaagtttttcacgtgttagggttttagattattgccaatgttgaattggttataggaagtagaatcggtgttgtgaactttgtgccctagcctccttttgatcttgaaacactcgaaaataatcaatagttactaatatgtttgatgagtttaatcaagtgttattgtatttgagaagaatgggggacttgtaaacatggaattgaatcagttgagttgcagtgacatgtatgctggggtggaaatgtggttttgtttgatcctgaaatgtagaaattgttaattggattatgaacatatttacttttggattggtggcagacatagacatgtgtttccttgtgaaagtctgagaaaattgactggtgtttcatttatttaaatgattttccatccgagcttcttgaatttgattttttattcctctcttgttcatgggatgtttatctgattacagagaagcatgctcgtctggtccagttacgaaagagcgggcaagcaccctggttctagccatttctagatttatcagctcttgtgctgcagagcagattcgattggctcctgagaaatgtatgcatttaattctgaattatttgatatattataaactagtctgcacttttcctgaggctattgttaatgctgcttgtttgatctgtgcagtcatatctgtttgtaagaggtttaaagaccaagttttgctgctcgaagctccaattcgcggggttgctccgatgctgactgctattaggaaacttcaggtctcatctgaatatttgactaccttgcatccagagtttcttcttctttgtttgcaggccaaatcctacaaaacaggcctgtctgttttacatgatgacatttctgaggtagatcagccaagggatctttttctctattgctattatgggtgagtttcttctgtgtttgtgtcgaaaatcttgtttaattgttgttatatgctttgatcttattgggatcttttctgttaaactcggaggctcttcacacattgctgttattttctattctcttgttccttgatgttattatccatatgttcttttggatatttatttagattgcttttattttgaaaagtgtcaaaaaaatttcaagaattaattatttggtttggaaaaccaagagagagagttcaaatggtaaggcgtgtgatttcctcccaaagatctaagtttgagttttgttacagttttccagtccccaaatgttgtagggttaggcagagagcctagtttttttttttttaaaaa

SEQ ID NO: 228887 - DNA, 2379 bp, Cannabis indica
agcgcggattagtttcctagtttattatatatggattatggtatagtttatttttttttttgaaagaatatgaaaatttcatttaagtttaaatgtgaacaaagcctaaacaatcaggcgaaacgaaactgcacaaatcttacaaagatgactaaacaaacgacaaaccatgttcattactaatagagaaaaaagcttgaaatccataatggaaaacaaagggcacaaattaccctacaaattaacaacgtaaagctaacatcacaaaggacctagggtgtagaacactcttatcataaagaaactaaaagacaaagcaaacaaaactaaaagatacatgtatcaatatcccaaaaacgatgtcaatgcctttaacaccattttgggtgagtcctcattgctaagaattgcctgctacagctttgagggatttagatgcattttttctggttgtgatggataggttgtaacactctcgtgctactagttggttccctttcaggcaacctattccactcatggtaggaaacttgacaaggagatgaaagatagatctgattgctttaaggtcatatagggtcagatggcctatcaaggtgttgtatggtgatatgatatccaataccacaaacaatgccataacagtgacactcttaggaattgttcccacagtcaatggtagcctaatgagcccaaccggtgccatatcgtttcgtgtgaattaatccatatatgagatgttcacaaggtttcaaatcctttgccctcaaacccatcctctccaatgaggacttgaagaggatattagttgacgatccatcatcaatcattattcttgctataatcatattggggatctgtacttctaccaccaaggggccattgtgtgggtagtgaacatggttggtgtcatcctcagagaaggtgattgattcatattcataccgtggttgtttgggagttcgcttctggacttccaacacatcttcactctgctcatgtgtaagggatcaagcatatctttcttaggattttctagaattcctgactaaatgaggtcctctagatatcacgtttaagagacccgcgatgggggaggtaatagttgttggtcatccccgaccacctactgttgtttccaagggggttagttgttgtcatgatgtacatacctcctcaaatgggcgttgttttgtctgatgaggaactctatctcctcctttagattgttgcactcatcagtatcatggccataattattgtagaatcggcaaaacttgttcttgtctcgcttgctaatatcttttctcatgggataaggcttacaatatggcaccaccgagtgtgttgcattgtagatgtttctcaattctctcaagataatggtgttttctttgaatttcccccattacattgggttgtcaaggatcaggtctctttgaggaattttcttgttgggaagcttgagaaaggcttgtccaagtttgactccaatcaactcaacttccttacctctcacaacaagcagccctcctcatgtcaaccctctagttccaagtctccaacagctgacacacaatgtaattcaagcagtctaactgatgcaaacaattctttctctttatagcacaaaagacttggccatccccatcatagaattgttaaacatgtattaactacttgtaacatcaaaaccagcaataaaaattgtgatttttctcaactatgttctgtttgttgtcttggaaaacaccataaactcccctttcccacatccaccaccatctacattgcactgttacaactcttgcactcagatttatggggtccttccccaatcaatttcgccgtcgactatagatactacatcagttttgtagatgcttctctaggcacacacatggatttacatgttgagaaccaaaaatgaggcacttaacacttttatcacattcaaaacacaagttgagcttcaactgccaatcaaataaatacaatctgattggggtggtaagtaccaagcattcactcaatttttacaacaatctggcatcctccagaaagtgtcttgtgtccacacccatatgaacaaaatagtattattgagagaaagcataggcacatagtagagagtggattaatcctctggcacaagccaacatgcctttaaaattttgggatgaagcttacacattagttgtctttctcataaatagaatgccatcacatcaactaaatcatctatcaccatttcaatgccaaacatgcttattcctcacttaaggtgtttggatgcctatgctatcaacttaaggccctataaaaaatcaagttacaatacaggtcacaaccctggacctttaatagttatagcctttc

SEQ ID NO: 228888 - DNA, 3257 bp, Cannabis indica
ttttatttagggcccaaaacccaatagagatagcctccacagaacacaattgtgcctattcaacggtgctacgtaggagaaacagtgccagaaatcggcgaaccagttattggtgagcctcacttgacactgggagatgatattgaggtggccaggcttagagaagttgtaggccaggtcactcaaataggacaagaagaaccacacaatgctggttgcgatgttttcgcctagtagagacgcaaattcaaaaaaggataaaaataaccatgcgttgctagttgcgatgctttcaccctgcagagacgtgaattcctaaagtggaggatgactaggaatacatcctctgagcctgcaagccaaaattaaaccactgcaatagggaggctaatgacttgatgaggtagttcaatgagagaactgatcctttgggagaaaggttcatagacatatcaggcagggtctacaagcatgtagacctagacaaacagtccaatcaagttcctcaaacacaaggacagaacctttcctccttaacaatggtcaaatctttttggaaagaccgtatggcacaaacaaatagttcctggcactaggaggcatttgagaacgacaaagcaacctcaaagagggtgtgttacattctggccaggccctaaccgaccaccattatgactctctttccagggtatctaagaacaagttgttccaaggcctagagaccctgctctcgacaagctgggtcctaggataaccaacaacacacaggacaataataacccaaggagcaagaactggaatgactttgttctaccacagaacaataatttcaagcaggtggatcaaccaaacttaaggaatcggtaagatcaacctcccattaacccacaaaccggcctggccaacaaggggaatctcgtcgatctggccggccaagaaagtataaccagccaaaggctggccggccaagacccattacttggccaaaggctagctagccaaggcccattacttaggtgggccatcaagctggaccaatttgaggtcgctcatcgatcaagcatggctataaaaacttgaagcatctggccgaccacttaggtgggccatcatgctcgaccaatatgagatcactcatcgatcaagcatggctataaaattccaagctctcgatgacttcatggctgaatgaatgagcttatctcttgaaatctctcaagatttaggagaaaggcaagagccagagaagaagcgagagcaagagcaagacaattcaacctagaaagtgcattccacttgcttggtgcaggcatgaccctcaagacacctggagcaatagttgcacgaggcaatgaaggtcagcttcaatgcttccaacaatgaggctgaatatgaagctctgattgctggcctcaagctagcacaagaggtacaggctaattacttgaatatacacaacaactttcacctagtcataaatcatgtcctaagtgaatacacaacctgatatgaaaagatgatagtctacttgagttagatttgagacttattaagtcagctcaaaggctatactaaaaggcaagtccccaaagaagatgcaatagccaatgcactcgcttgactagccagcaatgccttgacagccaaggcaaactcggtacccgtttagttcttaaaataattaagcatctctattttggaagaaatagacatgctagatgtcagttcaacatggatgacacccataacaacatatctctaaacaaaaatcttgccagattacaaggatgaggggaaaagctactaggtgtccaatcctagaagggtaacacatagacgtggaatcccaatatcacctctaaaatgtgttgctaagaaagaaattgaacaacttttgataggagtgcatgaaggctctatgacaatcatgtcgggggtaaagccagctaagtgtaggtgggatcaaattgtcttggactgcagcactgacctcgtctcctaaaggctggccgaccatggcctcaacaggctggccgaccatgggttcaacaacctagctggccataaccttccacaatctggcggccatagcctcatcaaagtggccaggcaatgctccctcagcctcgccagccacttggtttgtaccctagctgacctgatccgccaacagcctactctatacttttggtctaccatgaccaaaaagtaaacatcttgctagcagaatcccttgacgaaatagaagaaagaagagagcaagccaactaaaagcgtatgtctgccaaaaaaaagttgccaggtacttcaataaataagtcaaggagacgaaattctccatagaagacttaatgcttcgaagaacatttcctgatacaaaagatcctacaacaagcatgtttggaccaaactaaaaatgtccgcaccacgttacaagataacaaaccatggtacatacaaactcgccgagtacaatgagaacatcttgataagtactatattatgttaatattttagtgataaattctttaatttattaatattttatttgttgatttaaatttttttatattgttataaaatgtaatacaaataaaaaagattgaaatataattttattataaaattttaataattggataaatattattttagtgtgattaaatttttttaaaaaaaattgatataatattaaaattaagatttgttgacaatatttgaattgccatgtgccaccccctaacttaaaattctatcgcattttttttttattattttcaaataataagttaaaaatgttctaaaaaaaaagttaaaaataaaattagagttctctaatattccataagagaatagatgattattttgtggagaattatcgaaatcaagcctccacttcactaaataatattacaactttctcaactagccaaaaaaaaaaaaaaaaaaaaataagacagaccaaaatgaggatttaccgttgttgactttacatgaatctctctttcattactaccactcctcactcttgtcctttaacaccttaaataattagagagagataaaacttagggtgattctacaatgtacccttttaaaagaaatgtactgatatacccatgacttgtttcggtatccagaaaaattttttagtctaatttttttttttcatattcatgtacgttatagctatataagataacctacaaaattttatgaaattcagaataatttacaaatatagaaaataatgttca

SEQ ID NO: 228889 - DNA, 2208 bp, Cannabis indica
aagtgttaccaaacggcaccttaaattacacattttaacatttatgtttgtattccataagttacaaaacagttactattttgaattcttatttatgtcacaatatttgatttataataaactatagattataacactataatatatattagtttcataataacatatatttatcacattttaatctatattatattattaaataatataacatataaaatataaaggttttgtctgatgtaagtaattatatataacattatgtttattaatgtcgattaatataatacaattttttagtcacaacaaaaaaaaaattatgattaaatgtaacttttagtcacaacaaaaaaattatttgtgactaaacatataatatttagacataaattatcactaatttaattttagtcacaacaagtattgtgactaaaaacacatttagtcgcaataaattgtgatttttgtaactaatacttttagccacagacttttttagtcacaaaatgaaaatttattattagtcacaactttttcacttttagtcacaagttctgtggggactaaaagtaagattttttgtagtgactctaagcccacaaaataatttttaaagtccatcattgattaaaatgccgtttatattatttacttttcatttacacataaactcttcataataaacacaaaattctagtacatatatatgtattgaagataacaaacattacagacttgatgttttaaatatatatttttaatctatacccttttcttttcgactaattcatgctactttgatagtaaacaaaaaaaaaaaaaacccaaaaacgttgatgaattacattattcaactaacttactagctataatcacactatatgtacaagtatacctaatgtcaccctttatgaaaacttgattcaaatgtgtgacttattattacttaatttgcttacttaaaataaatgctaaatgtatgtaaaacttacttaccacctacttataaataaatatcatatataaatacatcaacatcctacttgaatacacatctgtacgaatttcacaatggaaatattacattatttttattatcattttgcttacttttcattagtttacatttgtcttcaccaattacctcaaaatcattacaaaaatcttacactagctttaacctaattcattctcattcaatccacaccttaagatactaatgacccaattcgagaatattttcacacatcttatgcaattggactcaatgcaaatgggaacatagggtagagaatcattcactatgccaacaagtgatgctggagtgcaggtaataacttacaaattattcggttgtgcacagaagtaaatttaatggtatgtttggctttagatatgaatgaaattctttcctaaataacttaggatcatcattttcttattgtataggagacttgacaaatacacaaaatagttatagccatgatgaccatggttatggtatagaaatgttaggaaaagtggacaccttgtaagatcaatgaaggtggtaattatagagtacacatagaccatatagcttttgaacactacagtttttgtaaatgaagatggtgatacatgattgaaaatcattgatacagcatcataagctactgcattgcttgagatttttgtgattagtctcaaaacatatgtgaaagaatagttgtatgagttaacctagctcaagtggtcatagaaatgtgcatgtgtgttggaggtcttagattcgagtcccaagttatgtattgtaatatattaacgcttaattcaaaaaaaaaaaaaaaaaatagttgtatgaattaggtgtgaaaaaacatgaaggtgctactggcaaatttctatgcttcagaggtgatttgatggagaatcttagagaatttcctaaagtaaggactgaaagggaggcaactatagaattggataatcatattttgatcaaacaacatacaaagagagtattttgctttgcaatatagctaatcaggggaaagtaatggtaattggattactcaacaaaactaccatatgacttaccatcttgactacaaaagattgtatatggaaaaagttgattgtcacaaatacaaaaattattagtcttttttaatttaaatttttaatgtgtcctatgttatggaccttcatttattatttttttttttt

SEQ ID NO: 228890 - DNA, 1654 bp, Cannabis indica
aagccctcaaagaagatcttgagacaatggtacttttggcaaacaatgacaaaagactcgatggactatgtcaaaaagtgtgacaattgccagagattctctaaaatacccacagctgccccaaacaaactcaagagtatgcaaacaccccaaccatttgctatttggggaatcgacctcatagattcactacctaagaggaaaggcggagttcaatatgcaatggtggcaatcgattacttcaccaaatgggctaaagcatagcccttagccactatcacatcaaataaggttcttgattttgtggtcaagaacatcattcgccagtttggactcccacaaaagatagtgttaggcaacaaaacacagtttgacgatgacctctttactaaattctgcatcagacatggaatcattaagagtttttcagtggtttcctatccacaagcaaatggagaagtggaattagttaaccaaactcttaaggatacgctaaataaacgcttggagcaagtaaaatgggattggcttgaacaatgggcccatcacacaacagaaaaaatagcagcatgtcacactccctttgctctaacctacaggtacaaagctatgatactcgtagagttcattcctctatcccatcaaagacttacattcaactagcaaactaaccatcatcttctggttgaatccctagatggaattgaagagatcaaagaaaggtttgagcttagaaaggcagcgtatcaataaagggttgcaaaacactacaactctaaggttaaagataggaaatttaagcctagggatatggtgttacgatgagtattcctaaacacagaagacacatcagtaggagtacttgggcttaatttagaaggaccatatgtcgtagttgaagcgcttgaaccctgaacttataagttagcatgatatgactacaacttgaatccagtgctagtaccaaggtattggaacgaggtgcatctatgacggtcttacccataaaagcagttgtcttcaaatagctcgcttcatagtgagattcacactacctaatgcaagtgaatttattgtctcttaaattggaaagatacgacaaaattgtccctaggttaagaggtccatcgataaggtatggcttctatactaaaaagtcaaataaggcattagtatagtgaggattacttcagctaagcttggatgaagaaggaaatctgcaactactacctcaaagggtacttttttctttcaacttagctcatagtaatgtaattgtatttaattctatgagaaaagcgttgaacaaagttttttttgggacatcatttaaattaatcaataacagctcacagacctacaacactctctaagcgttgagtaatgcttgtgagttgttcttgagagaactttggttgtttctttagtgagttcaacactaccacccacgaatccttggataagtggagagtgctcacacgtgtaacgccactcaagagtcatgatcaagaaggcctagggggatttagtatggtaattgaccaatgaaggcacttctttgatcactagagggcacgtaggttatgttatggtatgcgagagccatatgttacacgagcattcaaaaaaaatttgcacatctgtgtaagtactc

SEQ ID NO: 228891 - DNA, 1320 bp, Cannabis indica
ccccaatcatgccactgccaaacccacagacgggccaacgagccatgaccggagagtagaaaagaaatctcaattggtggcagactatcaaccctagagagaaaccctatgtgtgttttaaaatcagttttcataaaagtaatattgaaactattttttaaggttttctattcttttagaatttttatttttcttttaataaacattttgcaacacttttagtccatcgccaactagagagcttcactaaagtattctctattcgatagatgttgttcgatttagcattaaactacaaaaacaaactatttttagtgataacttttcagtcacaacataaaattgttgtaactaaatatgacttttagtcataacaaaaagttagttgtgactaaacatagtatttagatacgtcgtcactaatttaggtttagtcgcaacaagtattgtgaacgacagcatttcgagctgcagcactcctgaacgacagcagctaaatgcctctaccaacgcaccagtttcgtctctaattacccccgcaaagctataagttccgctataagttccattctttgaaaaaatggtagcatcaacattaatcttcaaggtattaacaactggtttgatccatgtttcatctccatctacatctgtaaggaaagcatcactgggaatcatagttgtatcttgagcctgagtctaatctgtgagtaaggctttagctaaatgaacaacgctctcaaccgtgggaattttctcagaccaaactaattcattaccatgcctccatattgcccaacacgtcattgcagctagccttcgtttttcctcatctacctgatgtaggactgaagcaaaccagttggcaaaagaaccaactgctgtcagattaacactagcagccaaccgttgccaacatgccttggcaaaagagcaatccatcaggctatggtagattgtttcatcagtgtctttgcacacagggcaaacggcatcaactggcacattccagagcggagtcttgttttggtcagcaaacaattagtagcagcccgccaaaacaaatttttcacttttgggggaacacttagcttcgaagagtattccaaaacatggaattatcatcctgtgcccctaattctttggtcacttacaagaacttataaactgatttgactgaaaaatagcctgagctttcccaactctaataccaagcatcacacactactacaaaaggccaaattcgcgacggtcccaaaaacgctttttttggggacccgtcgctaaaaaattatctgagtgttaaaaatcgtcgcctat

SEQ ID NO: 228892 - DNA, 1071 bp, Cannabis indica
gttgaacatattgttcgtctaacgctctccttctatttaaatcttccctgagatcatgagctattctgactctattaaatactaaagcaccaggttacctcagtgactggttggtttggctgagcacttggctagaaccgctagtctgagcagagttattgggtataaccccacttgacgaattaccagataaggtatggccgcctatcgcttggccaataggtggagtctgtgaccggggattggacggcagacagttcaaagtttgggcagtatgcccaactggattttcgttcgagctgcccaataggatgctggacgcaggttgctaattagcaacttggtaggctctttgtatcagtacgatatcctgtcatctttggtcatagatggctgcttgttgagccttcaatgtttccatctctctatccctgcattcagcaaactagtgcctttgctcttcgaacgtagggttcactacagcacgaagatcttcctaatcatgatgcaaagtattagtatgaccttgcatgagcccaagagcattacggaggttctggatctcggtgtcatctccaatggttgtctggacatttgttgctgaagggatcctagtgcttggagtactcatatcggctgctaaactgtgtttccagtctcttgcacactgggtgtgactccagccaaaggagacgtcacaccttgacctgtggtaggtggttgcatgattggttgttcaggattagtggctggtgggaccattgcattccctggagtttacagtgtgggatctactgccaggagatccaccagattgaccacgcctctgcgagtttgtaccaccatagtgtttatgattaaacttgaagtaaagagcaagtttatattattgctctcaatgaaagcaccaaaatattgacctcgcagttagccaacgacaatgagtctaataataagcgataaagaatatgatttacgtataatataagaaaataaataaagaacacaagatttttaaagaggtttggccccattcagttcggtaatagcctacttgttgggttttatgcc

SEQ ID NO: 228893 - DNA, 1604 bp, Cannabis indica
atttttgaagaactaataatgcattatttttttcttatatatttttattttatttgtcaaaatcaataaaaaaatatatatcaaattcttatcacataaaaatgtaatattactattgaaaaattaatttaccaaattttagaaattccactaatataatcatcaataataatgtagtatgatgattacatgaaataaatctcctctaaaaaaatacatgaaattaactataaactttttacatgctgttcttctagtcttcaagatttactgtgtacggctcctacaaaaaaataaatatgttaataataaaagtaagattttttatactgagtcacaacaaattgtaatttttgtaactaatacttttagggcccgtttggttggaggtaatgaaagcaatggaataggaataggaataagaataggaatggtaatggaatggaataagaataggaataggattaggttgtttggttagatttatggaatcaataattgaatacaattcttatgtttggttgactatataatggaatggaatggaataaattaattttgaacaaaaatactattatttttaaaacatgattaaaaaattaaatttaaatatttataccgtaaattaatcttttcaatatttacacataaatactttttagaatgaaagatatgtaaatgctacataattcctttaaaagcattaataattacgacataattttatttatatagaatcaaaataaaacaaaacacaataatttatactgtcttggatcaactgtatccaacatgttttaaaattctattttagatcttgtgttttcttaaatattacaaataagattttaaggtcaaaatacttttaattatggccaaaataccctatataattataaggaaattattgccacatatacgattatttctaattttgtattcaattttacgcttttttatttttcatttctgtaacgccctactaatttaagcatgttactgtaattttttaattatcgtgctaacctttgttaatcagatgatagtataaaatcatgcttaataaaaattttactaaatatataaagtttcaaatctcaggatattgaatttaccttctttttttcaaacttatacaaaatacaacataataaaaatgtcgcccaacgactaacaaaactaagtccatattgtctcaaagatccgaacactctaagtctaacaatccaaatatgtacaatcttcaatgagctccaaactcactgttgttcaaccctagtctttacctacacatgaaaacatatctgtgagtcgacaaactcagtaagaaattgatgcataaaacataaacatatatctgacttgtaattaggcgcccatacacctaattaccacgagtctataacccgcgtccaacgcgtataactgagtcttgaacgttcttaactatagcatgattgaccatattatcagcctatactcaacactctagtcgtactgatgtgataacatcaatccatactataagtacaactaagcataatatcacatgcattcagtactctaggtgtactagtgttgataacattagttcgtacttcctg

SEQ ID NO: 228894 - DNA, 1069 bp, Cannabis indica
aactataaatttgattgaaaaaaaaaagttaaaaaatagtatatagggtaattctcctaaaaattattgcattaagctatataggatctgatacttaattagactaataacaatatttttttttacgcgactaataataatattaatatataggagagtgctaaacaacaataatatcaatttaatttgtcctatacatatttatggtggcatatacttccgaatttaatgactcaacatctaagagcatttctaatagtaaaattttaaaagatgcttagtgaggtggatattttatgtagcaaaaaattgatgtgctatattattggagataaaaaaaaatgtcattctaaaaatttataaagatgctatgttgtgacattgatgatattcattttttttttagttgaaaaattaaggtatatattattatgattttaatataatattttaaaaatattatattaaagtgttttaaaaataaaatatagaaataaaataaaatattatatttcaaaacatgtttaaatttttaccattcaaagatgctaccctctaaatcttcgtaacaacaaagaagttaatgactatcataaatgaatattaattatgtcgtttttgatgaaagaataggtacatattgattgtcaaaggcaatgccagtacgatacagctgtaaagggcaaaaaatacagtttactttgacagtagctagcgttcagtttatgtgaacaaagggtacatgtctaccagtatatttgcctctaatagctgatatataaacaagaaatgatgagttttttttttataaaagaaaaaataataagagcgtatacgttcgctggaatacaagacacaatacgtagttgttataaaataatataaaattatataaagtagatgagaaaaagaaaaaagaagaggaagattaagagaaaaaaaaagtgtgtaaatttctcagttgtttattccaatagggtgaactaagaaaaagagaaatgttgattacacaattaatggtaataaataaaagatttgtacattcacataattattaatatttataaca

SEQ ID NO: 228895 - DNA, 1912 bp, Cannabis indica
tttttcttcttttcttttctttttttatttttaaattgaatgagaagaagaagattgcaacatattaaaaatattctctctcaatctttttaagctttctcaaaacacaatatcccaattacaatttttacctaaacttatttgtaactcatgatatagctaggacaaagaaaaataataactgggtcaattttttttattatctcaaaaagtgtgtattaaaaaattcagtttaaggctcaaaataggtaaactaaggataatcacaaaatagattagcttaaaaggcacaaacattctaaaaaaattgtctatattattttcaaaggataattcatcaaagatatcgactcaaaagccaaacaatacaagttctatcaatttcaaactatcatagcaccaaccttactcaagcatttataataaaattcaaacaattacatttgttaaacatattaaaaatttacccacagatgtttaaaattaaactcgaaaataattgaaccaagcacacaatattagcaattttctttttataggcaaatctatacaaaatacacaaaaaataatggcttactaactaacacacacaacaaaaacaaataacaaactaaaaattaaaaattgtaatatgcccccccccctcaaactaaatatgcacattgtccccaatgtgaaactaaaagaacaacggaagagaacttacctaaaaatcgtgccacatcagtatgacagaggtggtggtggtgctggccactggtatatggtgtctatggggttggatatgtgaaaaagttctccacatctaggctcactactggcctctaaaccaactcattcaattgatccaccttatcctctcattctcatgtcgcaagaccataaagttactgaaattactgttcatgccttgctaagcctcaatcatgtactggttctggacaatgagataccatatataaggattacgagcaccactcccaacaggcatagggtcttcctgcgtacttccacctgcttgatcatcatgctccacttccatattcacagcttcttccttatcatcttcatccaccacaggttgcttgaccttcttatgacgttgactaggagacaaggatatggaattggggcaagattgttcttcacaaaaaaatgcaaaatagccccctgaatttgtcatctcaaatccaaatcatatagaggaacctcatgcttgacacataaatcaagaatcaaggaagggtgccccaacccacttacattgcgtaaacgcgaaatgtcacgcaaactctcaaacattttctggccaatattgagtgggatccccttcataataagatagacaattagaagtctatcttttctaatattagacagatgagtattggggtaaatgggagcactaacaaagtgagcccaaaattagatttagctagcacttccactaccctttaatctcataacctgccatgatccactcagctccctcataggccacaacattagcctctttttcccaagtgagctccctattattaaacaatttagtaacatccttattaagggtaagagaaatgtgcgaaatatcatacacatcattaatagttgcaacagagactggaacatcaaatacctcttagtttgatcatttgattggcatccctttaagtgaaatttgcataaaactcttacatcagggataagttagattgagagggtttcatagcaacaaaattttccctatgtttcctgataatttttacctgaacaacatccatggattcaacttcaaaaggttcttccctgaattcaaaacaccattcaggaataacatgttgggttttgttccctaaataaaaccttttacaatctgattagttatcaatataagaaatttgaagtgatttat

SEQ ID NO: 228896 - DNA, 1873 bp, Cannabis indica
agtattaaactagtttataaaatcacacacgtggcatttctatagattagggcgttacagtgacggcatcctttgcagcttgctctttaactacatgttgctctgcctcttccacaatcaaggctaactcgaccacttttttgtataaggtattgtgatcgatggtaatttgcaagtcccgactaatagtggcatttagtcccatcacatacttttgtttacgagtgaagtccattggtaccaggtcactagtgaacttagatagccgatcaaattccaaagtgtactcggccactaacttcttccctaagtcaacttcacaaaatcttccatatgcgaagttctaacggcaatgttataaaactttttctcaaacaggctcttaaattctttgcaagacatagtactaacgtcctgggtctgacccacaatgtcccaccaaacgtgggcatgatcttgtaacataaatgcaacacagttcactcgttccgtccccgtcacccccatgttatctaggatgtgggaaatagtactcatccattgctcacccttaataatattagtgcctcccagaaacgttggaggttgcagcttcacaaagcgctcaaacacaaaatctcaatgcggtagtataaatcccaggttacccaccactagaaaaggagctggtggtaatacttgctctgccggagctactagtgccggtttcctaaaccgacgcaattcatattcttgacaaagtatgatacttcacatttatagaaacatttactgccagtcggcatgcaaattagcattaccaaccctcgcattatccccacagattttgcggaggcacaagcggtgccggtggattggcttggtcaaaaccaggctatacatgcttgccctatggtctagatgattctagaggttccattttcacaaataaccctaaaatcaacaaccccgatgagtcaggcactaataccatacttacgcacttatttccttaaattctaactcaaccattttatttcttttattaaataaacatttatcaattaatacactaatcatggctttcatatcacatttatactagattctcatatactgcctaatatggaaagcaatagataaataatcacatgagcaattaagcatttactctcaatacttactgcaccacgagccgagcttgtctttgacgatgattgtacatgtttagcaggtctacaggaagtttaaaaaccttagcactctgataccaaattgtaatgccctaagaattaggcatgctacgacaactaataatataacctaatcctactaaaccgagattactagaaaataagagcaggaaaatttaaactttgattaacttacgaaataaaaatataaaatgtaataacttaaactttataaaccattccaaaatactatacgtgtttttggatctccataaaagttttcacaaaatattacaagttacttttacatgccgacctaaacagcaaaatccgaaaatacaaaacgcagtagttggtagacccaacccacttggtctagtatggcatgaacatgtacaatccatcgccaagccctcacactcatggctgattacaaacagatttaccctttcatgcacagtagagcacccgcgagccaagcccagcaagacagtataaatatcaatatacacaataactcacataattattgatgccactgcacttattttttatttgacatagacctgcgtcttacgctcatacacctatttatatatgtctatgtagcataaagtgttgcgctcacacgtctatttataataagtccctagaatggtttttctcagttctgattaacgagtctaacctaattatgcctt

SEQ ID NO: 228897 - DNA, 3149 bp, Cannabis indica
ttttaattttttttcataattctctatagttacatataaatttttaaaattttttaaataatttagattgcagtacagaattcttaatagtttattttaccataagggttaaaaaaaattaaatgtatttttaacactaaaaactatttaaaaaatttaaaaaattcataggaaccatgttgtactagtctatacaagttaagtaagagattataattcaatatctgaaaaggcaggctcaccaacccaaacaagttcagacaatcttctttctacaagtttagatactttcatttgttttatatccataatcaaagaacgaattcaaatttgaacggctagtttggataaagtcaaaggaagtggttataataacatgaaaaatattaaaacaaagtcagtcaatcctaaacataacattaaaatacatgaaaaagttaaaagcaataacactataaaaccaacacagagaagccatagtagaagaaaacagagagttaaagagaaagaacagagtaaagatcatgaccatgaccatgaaaactcccaaagttaaccaaatatctgagtgttttgtcaaaccaacgtgtgccccagaagaatcaaatcatcccctctatatgacaccatgggatttagtaatgctctctgtccactacatccaaaagggtctcctcttctccaaaccatctcatcaagatgagaatttcatggaagatctattgggcaacctcaaaaactccctttctctaactctgaaccacttttatccactttcaggtcgtttgaagacaatcaaatctgaaaacccagattcatgtttggtttatgttgattgcagaaatgacagcccaggagccaaatttatctatgcaactctagatatgactgtctctgatattctaacaccaactgatgtaccttccattgttcaatctttctttgaccatgatagagcagtcaattacgatggccacacaactagtttggtttctatccaagtaactgagcttgtggatggtgtcttcataggatgttccatgaaccatgccatagctgatggaacctcttattggaacttcttcaacatgtggtctgaagtgtttaataacacaaactctatctctcgtccacctattttcaaacgctggtttcccgaaggccacggcccgaaaatcagcctcccatactcgggccccgaagagtttgttgggcgatttgaagccccggaactcagggagagagtgttccatttctcggtggaatcgctagcgaaattgaaaaccaaggctaatacagaatgtaacaccaacaaaatctctaccttccaatctttatctgcacttatttggaggtgtataactagagcccgaaatctagcaccagaacaggtaacaagttgtagattggcagctaataatagagggagattagatccaccaatatcagaaaattactttgggaatgtaatttatccaataaggggatttacaactgttggtgatttgcttgagcatgatcttggatgggcggcgtggaagttgcatgaggctgtggctaaccataatgacaagacaattcgagggttgctggatgattggcttgagagtaggcgcgtttttcaactcggtcagctttttgatcctttcagcattatgatggggagttcgcctagattcaacaagtatggaattgaattcgggatgggaaaagcagtggcgcttcgcagcggttatgcgaacaagtttagcgggaaagtgtcgtgttatccgggacatgaaggcggcggaagtattgatttggagatgtgtcttccgccggctgctatgtctgctcttgagtctgacaatgagttcatccaagccattcagtgtaacaatattatgcatacttgaaacaattcatgttaagccaatttgtattgactaatcatttttatgcactaagccattttgcagatttttcttactatttaaattttaaacaaagtacaaattataattttaggagatatttgacgtaaaattctcttaatatttttaagaagcagagaatttttttttttcattcaaaacaattgatgaacaatacacattaggttagaatttgagataagatgaatgagtttctatctcaaactcatttgccaataggaggagtagctcattcattttatatattttcatacattagtactagctctaaatatagtaaaccaacaaatcaaaaattaaaaatcaaagctattacattattctctgttttagtaagctttgaataattacaaaagaaaattccagtgttaataaaggagacccttagatatcttggaagccaaattaatccaatccaggaggttcttagaccaaacaacaaacccgaaccaattttgcacctctgagagaactgtcttcgtgaaacaacaatcaagaaaaattaggaggggtttcatcattcgaaagggaagcaaagttgactatacattaatgacaagtttactaataaataataagaataaggtgatcattcttttactttattaatttaaaaaagagaaaactttgttaaatatgagataaaaagaaaaataaatacatccccaccaattttttttaaaaatgtcattgagggtaatgacttttatttatttttattttattttttaatattaaatattcaacaattaattttttcttttaaaatatgtcttataaaataactatcatatattatattttaactataaagggcaatttggtcaatttaagcatttcgattacagtaaacaagataaatcattattattctatttccaaacaattttagtaaacaacatattacaaatattgattccgattattctttttttattctgttacatttctccattactttattctgattcttaatactgtatagcaaattcattcaatcaaatctgcaccatttttgctcatagagcattcgatctgcagtaagtactgattttatattttaaaatatggattggttagttttttttcaatcggttactttttaatattgaataatttaatattatcaaaaaaatttatttttttacacaatttaacaacaaaataaaataaattaatgttatttatgctcctaataataaattaaaataaata

SEQ ID NO: 228898 - DNA, 1029 bp, Cannabis indica
attgatagattatttaagatgatcacatatgaccattccatgatacttttacatacatatatattacaagacatatattttttactaatcaattaattaaaataagcataattataattcattcacacacacacatatattatatataatagctagtggttactaatttaattagtatgcatatttagcttgtgataatattggtcccttgtaaatgcccatacaagtaagggaagacaaccatgaaaccctagaagctctatgtgatagttttctgcataaggcaggcacagctgatgatgatcttcttaatcttgaagacccttttcttttgagccctgatgatgatgatttacgagttactgtcaccttcttctccattaaatgtaccactatggactccaattctacatccccaacatcacataaatgtatgtaaatttaatatttttctttgttagtattatcagattatatcctataaactataggttgaaaaatatacactataaaaaacagctacttttaatgacaattttttagttacaacataaattttttgtgactaaatgtgacttttggtcacaacaaagaactacttgtgactaaaatatagtatttaaacacaagttatcactagtttacttttagtcacaataagtattgtgactaaaaccacatttagtcacaacaaattgtaatttttgtgactaatacctttagctacggaccttttggtcacaacatatggataataattaataattactcaaaacttttttacttttagtcacaaattttgttgtgactaaattaaagtaaatttttttgtagtgataacagttacgtaataatatcattttagaaaacttttttaatgttatgaattcggtgacaaaaatactaattattttaaattaatttatcctaaattcttataaaacctagaggtcaatataaatgtatacatttgtgaatggttccaaattaaataaccacaaaaagaacacaattattttaaaataattc

SEQ ID NO: 228899 - DNA, 1247 bp, Cannabis indica
cctcctttttcttgttgtaatttcatgtatgttaacagacttgtaattttgcagccatatatggctaactgggctttattaacaagttgtagtgggattattccggtttctcggttaccgagaaccttttatgtaatgaccgagaggtctaactctatttattaatggtacattcacgcttaatttccaaaaaaaaaaaaaagaagaatcttgaattcgaactactagaaaaaaaaaaaattgtttcaaatttctttatataaatatgaaaacagacaagataaatatgtgatttgaggacatattacatcctccttttcgcactttagagaaaaatatataaaatatgtttggaccatacatacatacatttatatatttgtacatatgcattaatataaaatatgtgaacgtttgagatggacatttttcatatggccaccttgatgactcaaattcttatcatgatcatgactaataaataaagttgagacatcattattgatttattttggtagaagaagctttaataattcatcataaaagttataacttcctacattctctgctatagtttctaatttagttttttctctcttttttttggttgcggtaaatgcggttaactacaagaatttgttttggtttttaaaaaaacattgttattaggtgttcaacatttttcataggtaacgtcctatcatcggttagaaatattttttaaaagcttatttaattgagttatatacatgatattatagtagttattatagtaatatgacactcaagagatcaccaataactcttttaagcaattctctttaaaaaaatgtgcaaatttataagtgttaatttatgttttcatactaattaaattacagattcttgcattttaacacaattaatatttttagcttctttttttctttttttctttttttacctttgcatttaacactacaacatacttttagcatcatttgttaattagcatcgattttgcattgagattattgataatatatacccgtcatcatcaaatcatcaattttaaactcaaattaaaggagtgatatataatcattatagtgtttatatatagaattattataattgtatatatagaatattaattagtcatatttgatgtgtgtattttattaattttttaagtgaatttataataatctatgtattataggtagtgattttttaaaactataaaaaattaaatttgacattaaaaa

SEQ ID NO: 228900 - DNA, 835 bp, Cannabis indica
ttattttgataaaaattaagttcaaagtatcattttgtattatttaagattttatgtttgcttttattttttgagattatttatgtattgtttttaagtttcttttgaattgatgtaatgtattgatgtctaattaattaacatattaaatggggccgctatttaattgtttatttgttattttttttaaaaaaaaaaagagtatatgtgtagtttttttatggtgtataggtaatttgcaattatttttgtttttatgtttttataaattatggacactatatgttgatatctagtttatttgcatttcaacgtctttgtccagttatttttttaattgattttaggattaggtgcatatattatgatgtatattttattttgcttttgacatattttagttattgttattgttttgtagttttattttgcttttgacatattttagttattgttattgttttgtagttttattttattagtacttgtgaggttcatattttgttatttttgcgttggttaatataatgagttgatatataagtgatttgtaattattttttatgggaaaaaacaggaaaatacaaaagggaaaaaaattacaatattactatgggccggtccattcaacatttatacagtcaaaaactaaaaaattacaaaaataccacctggtctataccttaagccgcacggaatgaacgaagaagatgaacatacctccatcgttcaaatcagcaacacaaccataatgaaaccaaaacgagggtaatgcaaccatcaattccggcgaaaattaactggaaaagaaaaactgcaatgatctaaacagaaa

SEQ ID NO: 228901 - DNA, 1789 bp, Cannabis indica
tgcttgaagttttgtggattaagttgtctcgttgttccttctaatcaaactaaggaacataaaatattacatcaagcgataccattactttcgacactctttagccatatagaatcccacagcttgattctttcccaaaagtactccatgtaaatcttcttaccttttaaaaatcctgccactttgtccaatcaaataacccacagcatgctcgcacaccaaaattcaaattatccttgtggagtactctagaaacttagtccataatcttcctcgaaactaacaatgtaaaaaagtcctcatctttgactcttaattactataatgtggtgccctgatcatattgtctgattactactctcatcactgaactatactattagttttgtttttagcatgaatcattattggttttagtgttaaatctcattcttaaccacaaatggctgtttatgcatgtagcagttagagaggaatagcagaaatctaaccctttgggactaaatttatgagagtaaataggagtaaatagtaagttctttgtataattttaccccccgaatttttttagtggtggcaaaaattcccccgaactttttttcttggctaacatttcctgcaaatatgccccttttgttgctttacaattaaatttcattttcttaggcagtttgttgatgcggctattggccgcagacatagttgcagtagaagaatctctttaatgtttgaattacgccacattagcaattgataattctagtaggaggcaacttgagtactttatattctttctctagcttatacaaatttattggtcttcacttcgaatatattattttctttttccttccagggattgtagatagagagtttgaacatagaaatatgcacttttgattcattatgcattgcctattgtgcggaggctgatgcatcagattgctggacatactttgacttatgaagtctgctaacaattcctaatttcaagaaacattgcctcaaatggcatctcttagatacctttttgtaacttgcaattgcaaccattttctcataaatcattatttttttgattgagataaaaggggtgaaaaggaattgggatatggtggggaaagaaaggatgtggacattgatgtacatataaattataatcatcatttatattaaggaattattttattctgatgtgtatgcgttgatgacaccattaaccacagtttttttttaccacattctactgtttcagttgggtcattttttttttctaatggaatttgaattggttcattgatggggaagagtaagaatataaaaataatgttaaaaggttaaatattcattaatgcatgattaggggagaaaaaaaacctttcaatcatatggtttcttcttgctttcgtgtagaacaagaaaaatcgctccggcaagatgtgtcggagcttcagagcttcaaagaactaacaccaaacaactctagagagattaccaatttgagcaactctggctgatttttttcttataaaaaaaagcaatcaataaagagcaggttgaaagatgagatcaactgatgtagttcagttctttgaaattcaatatcattaaatcaggttttctttttcttttatttttcaaatgaacaataatagaaactatttttgaactgtgtgagttgcaactacaagtagtgatcggacagaaaattggtcaataattgatggcgaaagtaaaatgaaatgaaatcgaaggcatgattcggtaatgggattgcataagttgctac

SEQ ID NO: 228902 - DNA, 1018 bp, Cannabis indica
agagagagagagagagaatggaattgtagagctaagttatcaaatttttggggtgtggtatgatttgtgtgatcatatctctattatttatataataatatatgatgatgcatatggacaagtggttgtgctatcgtccaatgtttaatgtgaaataataagatgacttaaatattgttttaaataatatttatatacatattatatgtatatgtatagtttattaattggaaaatcataatgcatgtggagtaattatatgtgtagctaggaattcaatgtttttttttttttttgttggctaactggattcaattttcataaaacgagttgatttggccgcgtagagagatagtagaaagatagttttgtggatatatacaatacatacgagtggtggtggataatagatagatattttgttgatattattaatagcatgtacaagttgaccaaaattttgaatatatattattattagaacaagtccattaatgagagtggtttgattgtgtggagttcatggtgagtgagatggaagagggaggtgtgagattttataacatactttattttattataaattttcatttatattctgggcttatgaacagggccgattctaagggtaggcaagttaggcgtgcgtttcgagtctccgaacgttcaggatcccgaaattatgaaaaataaattatgagtatatagataaaatattaaataataagaaaatatgacaaatattgtttggtgtagtagtaaagagtattactttaagttaagaggtcaaggaatcaatgaaatgaatgtcaaatctaaaatttatatttgacataacgggagaaggatcccaaatgtctgtgtagatcaaatcaagaggagctttagctctgctgtcagaaattttaaagggcaatgagtgagattttccatattgacaagcttcacaaaattgttgttgttcattcatagaaagtattacatgagcagtggttaacacttgatttaaaaccttaga

SEQ ID NO: 228903 - DNA, 1971 bp, Cannabis indica
aaaaaaaaaaaatcaagcaccattgcgaatacaaacttaattgatacaaacccctaagaattttcttagaaataaaattgatcgaagcaagaattttagtaaaaatatatgttatttgtttgcttgtttcaccatatttcgagacaagagatttattttctacaagctatctagtttaagtctaacaaatgtgtgatttagataataacaattattaaaaagtctataaccttttaactcacaattcttacccttgtcaagcacataacaatcataatgagaaaattttatatataagtcttgctcacaaagttaagttacactatttgaattagccataagttcattaataaaaagaatttttttcagcattggtagtccctcataatttagagtaccactaccaagtacctcaccaaaatgcaatctctaaatttgacttcaccattttttaaaggtttgaagtcagtgagtatgtgatcatcatctatcatgtgtctagaacacccgctattaaaagaccaattattagaaatacgagtgttatgacaagtaaaattagcaattcattagattcatttttcttaatccaaatcttcgtgaatttcgatatatttttcctaacaaatattgttttccataattgatttgaaatttttttattttttaaaaagatttatcatggtaaaatatttaggttgaatgtgacctttaaaaccacaaaagtgacaaattagtatgaatttttgagtcttaccaaaagattgagagctcttacctaaagctggagagtctattccaccaagaaccttttttgtacctacagaaacttacaatgtggggtaaaaattgataacggatgaactttcagctttttaaaaatgaatttttcataaatggttgggattcaacaaatccaatcctagcatgacatccttgtccaaaattttggacctcgtcaaaaattgaagaaccttgatcgtgcattctcacattcctctttaaaccatcaagatattttaaaggcaaatattttcttattttttcaaaatcaagattgtttactcaaaaaatgatcctgggtttgtggacataaatgtttgacacgtggcaagaaggaaaatatttacggagttgagtagtcctgagtcatagtagccaacctgtgatggaactttagccctacgcccaagatgactccaagaactctgaaatatgtgtttggatcttgccaagttacttccaactaaccatactttagtattctgaaccaagaagacaagaagaatccaatttttaagcttgagaattaaaaagagataaaatagcaccccagaagtcaacctgagcatctagggttttcacttagcccccaagttaacattctctactagggttcagtttttggttctttcttagtgcaaatttctcaaacttcttagttaaacatgaataaggcatgtcacgaacatgttagaggcatcagaatcagaatcaaaacacttcccgcttggagcacccggtgcctgggccacctagtgatgcacctatcgcccacattgacatactgttaatccggaaagcttccaaccactatatttaataagtatccaaagaattttacttgtctccatccaaaatgaggaatcaagtgcttttagaaaagaaatggatcaacctggaggccaaaactgggacccagcgcccaaggtgaactggtgctaggtctcagcgcccaagttgacatattatcaacttgggccatttccaatagtagtttagacaaagtcttatgatcatattctcccttttcatcagcaattaagatatgggtgcttttaggaaataaacagagccatctaagagtgagaactaggacccagtgcctaggttgatcttattgggttttgtgcccttaataaaacccattacaatatgattagttatcaatttaagagatttgaagtgatt

SEQ ID NO: 228904 - DNA, 1873 bp, Cannabis indica
atgttgtattatttaatacatataaatggtccgtattaacttgattataatatttaaaaaagatttgggatcaacaccaatcttcgacccggacagagaccctaagtcggactcgggactcgaaacccggactcgggactagggacccggacctgcggatccgaactcgggactcggaacccaaacccggacctcgacctcgaccccgacccgtagttggtgttgggatcgagtgtattaaaaatatattataactttatacaatcaattaatacaagtcaataccgaacattgtattgtattaaaatactaatacaatataacacaattcaacacaatacattacaatgcggcataccaaacgagcccttgaggtttatttagtacgggtgtggtttgaattcgaaacattgcttaaaccacttatggtgcggtttaaaattttggcaaaaaaccgcaacgctaacacactcaggtgtgacatcctctcctctttgtaaagagaagtgtaaaaccgttagaatatatgcttataacaacaataaattattaatctcactcaatatatatcttcatacattaaaaattttctgaacaaatatttatataatttatcaacatggtttatcaaattatcaatccgttcatcatgatttaatggttactagcatggctgaccaattttatttaaaataataataataataataataataataagcatatttagatttcacacttttattcaaattaatttctaaaaaaagggaaaaatagatccattaagaagcctaaaaattcaagaagaagaataaaaaatggtagtaaaagaaagtggcttaataataggagaggaagaacaactcacaaccaagtaaagtgagcttgagtttaattggggaagaataatttcaaaaataggcatttaacaaccaaacaaacatgtcaaccagacacagcagcaatgagcgggttatcaccagttgccatgcatcattttcattttttgttggctcacattacattaatcttctcttacctaaagaccaccagttatatataaatatacacatataccagaacaacctaaatgctcagagactccttcattgtcctttgcatctcctctcttcctcttttgtcaaagaggaagcctaaagagaggagtgccttttttcctgtgtaaatttttaaatataatatttacatataagggaaggttatatatatttcatcatggctgatatctctttagaagatgttaagaatgagaccattgatcttgtaagacattcaatatatatatatatatatgtgtgtttgtgtcccatttatatttatatttaatatattaattgtttgtcaatgtaggagcgagttcctattgaagaagtgtttgagcagctgaaatgtacaagagaaggtttgacaagtgaggatggagagaggagactccaaatatttggcccaaacaagctggaggagaaaaaagagagcaaagtgcttaagttcttgggtttcatgtggaatcctctctcatgggtcatggaatctgctgctatcatggccattgttttggctaatggaggggtatatactcagagcaaaactactctttatgtttctttctctttcactttctcaaatacataaggaaattattcttaaccatgcacagggcaagccaccagattggcaagactttgttggtattgttgttttgcttatcatcaactcaactataagtttcattgaggaaaacaacgcaggtaacgctgcagctgctctcatggccggtctagcccccaagacaaaggtatataatgtccattgaataacaatatggattgatttttcaataagatttgtacta

SEQ ID NO: 228905 - DNA, 861 bp, Cannabis indica
aatacaaatattagttttgtaaaatcttggtataaattctctagtaatttaaagggaatatgtaattttagtatcatatttttttctcttaaatcaatttaataagtaattattgtttgattaatatcttttttaaattttaaaagcttatttatgataatttaaaattacatattttcactaattgtaatatataccccaatgacatatagaaaatgagggatcgaaaaattctctataataaacacttttattaatatcatgacttgtggactaaagttcattaatgccccaaccacacacacacaaaaaaaaaaatttatctcttctaacatttattaatcacttctcgcaactttaattaatagttgtcgaaaattttgatcaacattatccaataatgtatttaatttaataattaaaagataattaataattttattatatttattttaatagtaaaacaatcaaacaaaattatcactggcctttatatatcactctacacgtgtgggctaggccgacacttgtgggccatattttaaggtacaaaaattaatttttcaatttactacaaataaaatttattatttattttgccaataaataataattagttaattctcattaatctgttatttcacaaggattaaaataaatattattttaaatcacaaaaaatatatttctctctttaatattatttaagaataatattatatttaattagttaatatagttttatcaaatacaactaaatagttaaatactatttaattacacaattcataattgttaaaattataataatttttataaattattattttgcccttaagaattatttctcatagaaattaa

SEQ ID NO: 228906 - DNA, 997 bp, Cannabis indica
tagtttttttccttttttcttttactaataaaataaagataattggttcagaaaaaaaaaaatactaatatacttatcagttatcagacatgcattttgacatatctgtaaattaataatggtcatgtaagagtaagaccacgtggttatatatgctatctttaataaattattgggttgtggctccttttcttatatattattcaaatttatctacttcaatctaaaatgtgagtgcaagacatagaaagacaaattattaagacactaaaagattgaatttagacaacaaccaactcaggttgttcattgttgtttctgattctggtctgttaacaaacaataatggccacaatagtagacatgataaagtcttttctaactcataattcacactttggttgggtatttgataaagaagaacattttaccacattagacatcggcaatttggatcctcttgccaaaacttttggccaagaaaacaacatctttcatcttgccataaaatgcgcagctaatccacgagcaacatctgtaaacacattgctactctcgcattccttgcttgcctttcaaccaaacaataaaggcgacacgcctctacatatggcggccagattaggacatgagagtttcgcggtggttttgataaatcacgccaaggtgttagccgccgcagaaggccacagtgactatagatatctgctgaggaaggtgaattatgtgaagcaaaacacagcacttcatgaagctgtgatcaacggtcggtttgagattgcaaagcggttgattcgagaagatccaacattgacatctttggtgaacaaggcaggggaatctcctctgtttcttgccgtagagagacgattttatgatattgcttccatcattttggacactacttttgccgatttctctgtgttaggaggaaatgggatgactgtgatgcatgctgctgtcattcgttcctgcccatcatgtacgtatctaattt

SEQ ID NO: 228907 - DNA, 953 bp, Cannabis indica
ctccaaatgaaaacagcttaaagaaacacagattgaggggatgcatgtaaaaccaaatcagtgaatgccttcaaaatgcaaggagtatatgaaatgaaagtgcccatttgattccactaacaaacacactgcttctgtgaaactagtatgacaaaatctttgtataatttaaactcaacaaatttgggcagtaaagtaaggtcttcaaatacattttgcatttataactaaattactaaatttaaaaaagctttgcaaacatcgcatacctccccagagccaattgtagcaactccaccaggaactgtcaaacttgaacaagataaaggtatattaccaatttcaagttcatcttcagtatcccagtcaaagttctccccatctaaatcagaagtattctcaacctgccgaaatttgcgcagggatatcaacaagaaaacacattatattcaagtattaaagttgttcttcataaaaataaataataaataaaaacacttattttcttgatcggccgttacgagtaattttgagatgagaaaaaaagtaccatttcgcccgaagctttggctggcccagtcgagagacttttcgctgttcaagataatcataatattaataatttagaaataaaataattaaaaaaaagcacaagaattcagaagctcacctacttttatcataataaatcaaacaaattgataaataaacaaaacgaaaacacacatatcacccagagtaaccaaacaaaaacgaaaaattgattccctataaacgcgattaacaacaaaataaacaaatcaaattaccttcctcagaaaaaaatttcaccactgctatgtccaaaaaaaaacgtttctagtgtttgaaacaatatttttaatatagattaatgttaaaaaaaaacctggatgggttgggtatctacaatcaaatttgcagagctaagccgt

SEQ ID NO: 228908 - DNA, 1121 bp, Cannabis indica
attgacacaaagggatcttgtgtatataactaagggatttgattgattaaggtaaatcttcgttgtattttgtaaaagcttgtattgtttataatttgtatcttaaattggtaattctgagagacaccttttgaaatagtgagagttattatcttggtttgtggaatccaaatactagccgcctagaatgtgtttctaagacaagtgaagcttataaatcattgtgtgtgattgttttgttttagattctaatttgtgctcttagattttgttcaaatctttaataatcttgaataagataggtcactagcatcatggtgctaacacaatgtaaatttttttattaaaaaaagaaaaataaaattaaataaaagaaagagagataaatgagtatgttttctttttaaacttttaccaaaattactctataaaaaagcttatatagaatataagctagttacgtttgaatataaattaataaatactttaataacttatgaaattagttagtatattaaattttatttatgttaaaatttaattattttatctttaaacatgaatataaaagaaactaaaatgttacttttgatttcgataattttctctggcaacagtgaaaaaaaaatatactttttatatattaaaatgatcttcttatagaatatgtcatgttagtgtaatttttaagtccacgattattgatatgagtggggtgttcgcagtgcgggtggtacagtttttgactatttttcaaaccaacctgcacatgcagtttttctaatttttcaaactgcacctgcatcgcgaaactaaaaaactacagaaatcgtaccacaaaaaataatgtggtgcggtgcggtgcgatttttgtggtttggatcatcaccaaataattaaactatcacaaatacaataaaatttggacaatacttgtcaaaaataccactacttgaaaataaatatggaaaaacaaatgaagtttcaacaatataataagtagtgtgctttgagtggaacattcacatattggacctaaataaatataaaaattaatatttttataatatacggtgcgacgcagtttgaactacatattaataatttaaaaccacaaattg

SEQ ID NO: 228909 - DNA, 1684 bp, Cannabis indica
ggctctttcccaaggcgatgtgtggtttttgcatgataatttccttcactttgattgttatcaaccatggatatacttttgtttgtaaggatggatttttctgagttttattactaaggctctcaatgaaagcaccaaactgttaacgcaaatttttgttaaccgaaattaatgagcctttttgtaataaatatatcacaaaaataaaatgaattaataaaataacaccagatatttttacgtgattttcgagttaaatctgcatactccatgagtctatcttattaagatattttctgaatacaaaatacaatacttaattaataatatatcttttttctctctgaaattctccgttccttttaacagtggaatctgcccctatttataggaatataggttggcagttatttacaatcaattcaaaatataatcgttaatgaaacgtgaataattctcacgtttcatttaaatcacatgttggataacacttgataactacttaactacttgttattcttatccttttcgatggtcaatgctgatttggacaatagtatctcgcttaactgtttggttaatactgatttggacaatagtatctcgcttaacctgggttatttcccttatttatcttgatgtagaaaaaataataagtgttggcaggtaattcagctcgtcacatctcttcatttatgttaatgttacgaggtgactgtctcgttatattatatatatatcccaaggttgcattgtgtgactgtattcattctatttcgaaataatgaatttcttcttcgactgtataactcgaggcaggtgcttgtctcgtcaatatgggttttaatagtcttatatcctcctctcacttaagacggtgtagtcaccgagttatgaatattttctattaaccattttattaacaagttatttgcattaaatgatataattttattatattaggtggttcgtattccactgcaagacacgtgtcaccttctaaagtgtagccaaatttcaagtataacattagggtttatccctatcatatctgagtggctccaggcaaaattgatcctagtttgccttcaaaaaatcaattaattgctattttagttttcatccaaattcttcccaatgtatacacaatttgtgagattatttggatctaaaataacctcttctagctcttcaataggtttgagctggttattttcgtcttggatcctatgatctagatcctcatcttccttctcgccttcttttgttatgactaccatcaattgatgattggctcttctatttcaaagttttatgcgataacattcgcgagccaataattggtcgcctcggactactcctactcccgcttgtgttgggaatgttagggataagtgtttgattgagcttacttaccctagtccaattaatgtagggagacccatcaatacattataaactgatggaagatcaacaactaagaattcctggattagcatcgttgataatggtggctcttctacagttaacggaagatcaatgatgccttggctggtgacactatcgtgtgtgaatccacagaagcttacaatgcaaggcttcaactttgcatcctgtaaccccattttctttaatgtatcaaaggatgttgactgagctctcattgtccaccaatactctcttc

SEQ ID NO: 228910 - DNA, 1827 bp, Cannabis indica
aatttttaaaaattaatatttatagttaaatttgtttagtaacaatttatggataatacccattaagaagtgttccatatatatatataggtataatttacaaaaattaagcaacaccgcatgaagagctagcacaaatatttaacttatcataatttgcataataagcacaagaataacatagacttattattatcttaattaaacgtcaacaattaatcaaatttgatttccacttcattcatgaatcatgagtgtgttttcaaaaagagacgtaattaagtaaactttaaactttaagtaaatcatattataactttataagcacaaattaacttatcataatttgcatataatctaagcacaccaataatatagacttattatcttaattaattaaacgtcaacaattaatcaaatttgattttcattcattcatgaatcatgagtgtgttttcaaaaagagacgtaattaagtaacctttaagcaatttttttttggttgaatctgtcgagctatgttcttatttccccgtaaattttggtttagtcaagaaggagcacacaattaaatagggttccttctcgaaatgatgatcattttaattatttagttgaaatcgtacaatgtctttcaccaaattttattgtgtttaacaattatactataacataattgcttttttaatgaaccttttgccgcccaagttacactttctatagttgtaattggagaacaattagtaggtaaaactattacttagattcaaactaatttttcttggtgtttgtacgcacatctagacttgacaagatcctcttatcagctaaagtaggaagacaagttagtcgagtttgattatgaggaaaacaagatccttttatggggtcttagagtatctctaatagcttgttaaaatagtggtgtagtgttatattttaatactttttttttaaaatagttttctaatggtgtgctaaatcttgtgttaaatttgacttattgtcaaatttgacacaaaatatattattatgtcaaatttgcctcagtgagcttctagagagcgtgaagtcagtcttgtagatttagggtttttccgacgtaaccacctatgctctactcgaaggggcggtggttcctcgtctcacaataaatgagattactttacggaaactttttattaaggcaatcttacaaaaatacttatttttttttgtcattattattcttttactacactctttttattgttttaatatttttataactgtattaagttttcaaaaatactgtgttaaagtttcaaaattacaaaaatacagtgttttaataaataaaaaaataatttaaaaatatctttagaacaacttatcaaataacatgaaaacaattataaaataactaaaagattactacaaaaaaaaaaaataaataaataaataataataacaaaacaatgacctaacttcaagatgcaaaacaatctcaactcctcaatatatttttgtattacaaattttttttttacttagttttgataacttgatttatctttttgtattgatacatcactaccactacaaaaaaaactgttacctttagtgataattttttagtcacaaaaaaatttttttgtgactaaatgtgacttttagtcacaataaagatgttacttgtgactaaaacatagtctttacatacaagttatcactaatttagttttagtcacaaattgtgactaaaaatatatttagtcacaataaattgtaatctttataactaatagtttttgccacgaacctattaatcacaacataggaataata

SEQ ID NO: 228911 - DNA, 4506 bp, Cannabis indica
gggcacaaaacccaacaattcatacactaccaacacttgtacggtttgtaatacagagtgcattggtaaagtgtatgatgtctgaaagtacattatggtgttacctacacttgtacggaaaggtaaaagatgtctgtggtacaacacttaacagtactcaaggtgcggtccataccctacctacactagtacaaaggtatactgagtgcatgcggtacatggtacatggtcgtatagtagaacgttcttactcatctgttgagccttgtaaataggtgtatgggcgcctagatacaagtcagtattatatgatatgttatatgcttttcttactgagtctgtcgactcacagttttacttccatgtgtaggtaaagaaaaggcgaaggctgaacaggagtgagcctggctgggatgagattgtacatgtcgtggcagcgtgacctggagtgttcagtctcgggacatctggggttatattttgtagtcgctgtgcgacctgaatattgtgttttggcatgttttgtataaaagtttagaaacgggatcccggtgtttgtaaataattatgtaaattacaaagtttaatattcattataaaaagttttaatttgacacattttttgagaaaaatctttgattagcaaagatagcactgtaattgaaaaagcactgtaatgtgccttagcattagggcgttacataaacattctctgtttgttacgaccacttatcataggcaaacctagatattggacaatggcttcagtagtttgcatatgtaaagtttccacagattgagtttgcaaattctcaggcgtatttggcgaaaaatacataatggatttgttaaaatttattaactgaaaaaacccaattaaaattagcttaatcacacatcttactaaactgaaacatgtactaaaaaacccaattttggacccaaataaaacatgaaatagagcctaaaagggatagtatttgcaaaagcataataagaattccaccaacaattgacccaatgaacaaaaccacatagttctcctaacactaccaagtaccaacatatggcctcttagtcgtgtaacagcaattggcgagcctcacttggacctaggagaagaccttgagttggccagactcagtgaagttgtaggtcgtgcaggcctaactaaagaaccacacattgctgattgtgatgtttttacttagtagagatgcgaattcctgagatggatggatgaccaggagtacatccttcgatctcaccaagcagaattagatcgctgcaaccgggaggccaccgatctaataagacattcaattagagaatcgacagaagaggccatgatctccttagggatccacttcaaggaagactgtcgccaagttcctcagaaactaggacagattttcccctgccagaaggaggacagacctttcttcaaaggtcaaacgacaagaacagccagatctcgacaaccagcggcttaggggaccagccagggatctccggcttagcagcaccccccattgtgtagccactagttggccagccatcaataggagtacccatggctagccagggtacatcacttcctccccaaggggagcgaggtgctcagagatcgatctttgaccgacgaggaccgagagtgggtggaaacacccaaaatagcaatttgagaagtgaagttcatcgctttaggaatctagatccaccaaactttagcaattggcgtgatccacccccagtcaatacacaaccaatggcagtcaaccgaggagtcacgggcagccaaaccctgcccaatgcaggtctggccagccaaagaagcatcacgggaggccacaccttgccctttgcaggtttggccggccatggaagagtactgggcggccataccctgcccaatacaagtctggccgaccaagcacaacaatcgggtttaagcatggctggcctaggccaactcccatacttgggaacggtcgaccagggtctgtagggtatggctgatcttcaccatacactgtctcagggtatggccagctagcccctatcttttcagaatctgcaccctccccaagaagggccagtcaatcaagtctccacaacaacaaatccttctgtgcaagcacagttggaccaactcagggacatgatccagggcatagcttgcctgaagccttcaaaccttgaacttgaccggtcgagggaatcactattcttggcatatataattgccttacccttgccgaagtttaaaatataccggtatgaaagatgtatactagacgagaggatccgttgggtcacatcaaatacttcgacatgcagcttgacctccaaaaggtcattggtgatgtgcatttaacacttttcccacgccacagaagaaaaggaggagaagtacacttgcttcatccccctaaaaaagaagcctgaggccatcttcatggccactcagggaacgatcccataccgaaagccctttcctatcagaaggaagatgggcaagagggacatgtcgaagttctgcagatatcataacgacttcagtcacgacactaatgagtgtcaaaatttgaagagggagattaagtacctaataaggtgtaacaatccccacctgcgtcgttatgtgcaagaagaccagacctaggcgcaaggaggccaaaatggagattcgatgccaccacccgtggcaggacatctaggggtcataataggcggaccccacattgctggcaaaagcagcaaagctagggaaagctatgctcggacactctgtcatgaggccaaaggcaaattcctagatgtcaaagactggagttctaaacaacagaagcctgtagaacccaccatctcttttactgaagaagatacaacaccggtcagtttctcgcataatgaccccctggtcattactgtgcaaatcgggaatatgaccgtggctagatgtatggtggacaacggagcctcctccaacattcttttcaaatcaacatatgaaaagatggaactcaaactcaccgacctggcgccttgcaaccaagtgacgtatggcttttttggccaaggcatcgcacctatcaggaatattagattagccctcataattggagaaaatccaaccacaagaacactgatggtacagtttgtcgttatcgacgttccctttgctttgaatgccacgattggccgaccggccctcaacgacttgaaggtagtgacatctatctaccacttatgccttaaatttccagcaaggcacggagtggcatgcatgaggggagacaaatagtctgcctatcactattacaacttggccttgtccaaggccaaaaaggagaaaatgcctgctagaagtccagaagatgcggcctgcaaggggcaatgaagtctagcccaaggcaaggacacagacatagatcctcgctttggggatcctacaggaaacttcagacctatagaagagttggaagaagtgcaagttgatcccactcacccaacaaggagactgaagatcagtgaaggttcggctcgagaaatcaagtcagtcttgacaaaatttctaagggcaaacctggacctgttcacatggtcacatagagatatggtcagaatcgacccctccatgataacccatgcactcaacattgatcaaagcattcgacctgttcagcaaaagaggcggcagctgaacaaggagcgtgcccaggtactcaaagatgaagtcaaacgactgagggccaatgacttcatagtagaagaattctaccctcagtgggtatccaacctaaaactggtacctaaacccaataagaagtggagagtttgcattgacttcaccaacctgaacaaatcatgtccaaaagactgctacttgctgcccagaattgaccagctagtggatgcaacagctggccataaagtcctgagctttatggacgcatattaaggttacaattagataaagatgcatccacctgatcaggagcacacaagcttcatgacggacctaggcctatactactacaaagtcatgccctttgggctgaaaaacgcaggggccgcttatcaaaggctggtgaacatgttcacagatctcattggccacaacatggaggtgtatgtggacaacatgctcgtcaagtccaaaaaggttagggggcatgtggagaacctaggtgagtatttcaaaatcctttgcagctacaacatgaagctcaatccccttaaatgctctttttgcgtaagctcggggaaattccctggcttcatagtcaatgctaggggaatagaagcaaatccagataagatccaagcccttttagacatgaagttacccacaattgtcaaggaagtacacagcttaattggacgcattgctgcactaagcagatttgtgtccaagtctctagacaaatgcgtacccttcttcaacattctcagaggcaacaaaaaatttgtgtggaaggaggaatgtgaaaatgcattcca

SEQ ID NO: 228912 - DNA, 1611 bp, Cannabis indica
atttttttttaaatctttttagaagtagttatactatattttaaaatataatgtgtatttaaatatgaggtagtaattaattaaatatgaatttccaaatatgttattttactaaatagttagtaattatatataatatatttttagtaattgatgtttaaaatagaaaattttaagtaattatatagtgtaattacacttttttattggttcataagaatttaaaagtataattcaaactctttaattgcttctaattatatatatatttttgaaaatacttttaaatatataattatagtgtaattacagacaaacatgtcaaattatagttttccaaatccaccctaaaaaataattttagaatctttattttattttatttttaagattcttaagtttgaactttctccttttcattaaaatatactaatactaaatgtctaaagtggtacttacgtgcggtcttgacattttagaagtcaaggtaataatgtattaattcaagtgatgtataatttttggaaattttgatagaattttaaaagctaattattgttaattatttaggctctttttactctaaaattggctgaatggtataactttttggattttgaaatcagtaaaatttgaatacaattatcaaattattattgcatattatatagcaatatgaatgtccttatatccataaagaagtggagaattttgtgtaatatatgcattgcaccaattcaatttttttcttcgattaataaattgaagattaatggtatggagcattattttaagtgtccaatatcctgcataaaatgtaatgcacttcaattaatatcatatatttaaatttaatttataaataatattagggaaataacaataattttactttatttttgttataaaataatattggttatatagaaagaaataagagatcgaagaaaaaataaagagaagaagaaaatgagagagtaaatgagatttttctatatttcaatggaatttttttatattttaatggagtgaactcttatttatacaaaaatatggcgaaaataataaaaaactaaatcaatgaaataaaaggaaatacaataatatttatggtataattgatttgggtgatttagacatttttatctatataatatttcataacactatgtcataataattgtctcattaaaaatcttgccagaaaatctattaagaaaaactaggccaatgaattaaatttctctcatttaggcattcgtaaaattttctaatcgacgaattctgactgatcttatatatatgtcatcttctcaaatattgatgtttgtaataacattataaataagtctgcaagattgacagttcattgattatgctggacactcttgaaatgtatagtaaagaatttttgtgaaaatgtattttaattatatttgttttctaatgtgccctctttttagtttgaacatttacaaagcagtattatctttcatagagaaaatgttggtgtttgatactttttttattttagtgtaatcaatatgttttcccgaatatgttattgtctatgatctcactctcactacatttttctactttgctttcatc

SEQ ID NO: 228913 - DNA, 963 bp, Cannabis indica
attaaaaattattcttaaatagagtttttactgtatagatttcttaactgatgttttacatccctatctgtttcaaatattatattacacacgttatcatataaaaccttatgtaaagaaggtgtaccataacataagtacggtgtgatactatgttattgttgttggaggaaaattgacaacaccaaaaacgtgcgagtatttaatacacgcacgtactgagttgcgaatattcacttagaatggcgaatacttaaatatagactgtgagtaaacgaaaacaataacattataaataagacatgagattatagtggtccagtcagagttcgatttatttagtccacttttggtaatagtttcaacttagtttatttaatttggatactcctttatatagaaagaaagtatctatttggatttacataactagtcagacaggaccgttattacattaatatgcaaattaatgacaaaaaaaaaaaagaaataaatggaaaaacagttttgaccgttcttgattaattgtctgaacgtatgcaacttgataagtcacacattgactattcatatttcgaacacacgaactcgtaggctctttggtatcttactcgcatgttggccttcgagcctataatcgcaattaaataattgaatgcatgccatgccattaccttgatcgcgtatttgggcattcatgtgttgacaacttagaacttgcaagttcctaataggttgtacgtcttaagacattagtcttggactaaacatatgtaaaggtgtgatctttatgtattgctggagaggtatatgttgcccttgattttgcccaatatacgtggaccaaccacacaaggacacgtggatcaagcaacttataatccaaactatttgctaagtctttatgcaatgaagcagcctccgggacatgtctcccggagaaggcatatggaaccccatatg

SEQ ID NO: 228914 - DNA, 1451 bp, Cannabis indica
taccactgtaaaaataatttgaaaaaaatattgtggcgtgtatttttaagcatgaaaattgactaaaaatttataataggttgatagtaacactcctccccttataattatgataaattatggaaggtggaagaagagaagtaggaaggctggttgtaagcctaaaggaagttttaatagttttcttttctctatcaaaatcttatcgagaatctaaaggacccccaattattagaaaaacgtgttatttaacccaaaaaaaactcatttattgttaattaatcaaattttgacttcccaaattttcttatcagaatcaacaaactatataataaagttctaacaaaaaaaaaaaaaaatacaaactatataataaatcaaaataatatgtcatcatccttaatttttttttttttagaattacatcaaaacataatttttattcaattaaattgttaaatcagcttattcttttaagtattgaacattgttattgagtacccgtagtatttagcacatttcataagtgacaccttaaatgattggtgagcgatattctctaaaagttattttttataagttatagaagaccatttcaaaaaaaaattatatgaaacctgctacttaattacactgatagtagtatgatatcaaggaggatattaagcactaatcgtaccttttaacaattctcttaagtattagtgaataatgtttactaacattagaagtagtgatgagagttttaaatcacattcatgcttgaatcgaagcttttaagagaaataagctatcatcagcaaacagttaatttgagaaataattggtcctgaagtctcacaaggaaacacactcaacaagctattatcacaatctcgtttaaccaaaatagttaactctccaagtttaaattttggcagtacaactctccaaactactgaactagtaacaaagttaaagtgtcattcacttaactatcactatgggttgcttatgtgtataatcttgtacacatgacacgtttatattagcacacttaatattattatttaataattattttcaaaatttattttaaaataaaataaaattataaaaataaaaataaaatattttttaaaaataaagatattataagttttgcaataatttatatttttaaaataataatatcagatttactaatataaatttgacacatgtataaaagtgtacacattgacaactaacggttaaaaataaataatattttaaatttgcaagtaatttaataatttaaaaaaatttaccgtcaaaatttaaacttaaacagttaagtataactaaaataatagttgagagaatttaagggtaaaaaacttaaccaataataaaccaattgttataaaataatataaaataatataaagtagatgagaagaaagagaagatgaagagagaaagagaaagtg

SEQ ID NO: 228915 - DNA, 1760 bp, Cannabis indica
tttcgtgttattttttggaaaatcgtaaaaatgtaaaaaaaacattatttgagcgtaaaaatgtaaatattttacaaaaaatggtgccttatgtaattattccaaataaaaaagataaagttatgtaagtcaataaatcataataattagtgacaatatagtaaataaaaaatgtaaaatttattgtggatcaaatttagtacaatgttatatcttgtgccaaatttggcacattttttaacatgtgtaaaatttggcacatttttcaaaacaacattagaccatctccaatggatggtgtatattttgggttaaatttggcccaaaatataccataaagttatatttggtccatttgttgtatttgtgctccaatgcacaagatgcaaattagctataaaagtcaatattatcattaatgcccattcaaaatatacaaaataattaattttatttatattattttaatatcttatgaatatatctcattcaaagtcaatgaattgtattaataagtggcaaaaaagtaattaaaaaaatagtatttattgtgggctaaaatttgacccatgctattttttgtgctaaatttgggccacatttgacacacattttacatcaccattagagttaaattttagcaaaatgttctaaaaaatagcaatacactacatttatatctctccattggagatggtcttagagtagtatttttcttaaatgtgttaaaatatagcaatacactacttttttaacactccattgaagatgctcacttgttgcttcaactaaaaaataacttcaaaataacaccaaaacaacttccaaacaataaaagaaacgtaaaaactgttatagtttttttatgtcctaaataaaacttattctacgtagtcttattatttacaaataaaggaattagaaatatttctcgactttgtcaaattattggttcacgtgtttatttgacatgattatatgttaaacacttaaattttattaaatccagaatatataattattcataattatagtgatgttatcacagtaaaaaataatatgattatatgcttcgaatattttaagtatcattatttatcaatacactgaatttatactgaaatgatattcatttgtaaggttgattcacacttttagtaagtggtatgccttttctaagacataaagtgaaataaacttgtcattagatgtatatggcttatatcgggacgggactgatattgacaaatagaacaattatcataagttactgttataattattttaaggcaatatcacttagtttatcacatatcaattagatctgaatcctgagatgattaagctttaagttaattttactatttattctttaatttctttgttacaagcttaccttatcaactagccaatgcttacaaattgggaacttggcagtgaacatctatagcttctatttgtaagaagtgaaatgatagtttctttttagcttattaatggataaatgatagaaaactcatttcttataattagtttactgaaatatcatttatattaattaagtattttaaggataaaatacattgaaagagtaaagacaataattttaggaggcatttggttgggaggaatgaaaatataggaatatgaatgggaatgagaataggaataggaatggaatggaataaaatttaaaatgcataaaaaattgataaaaaaaatcattaatttttttttcttgttacattggaatgatcatt

SEQ ID NO: 228916 - DNA, 1007 bp, Cannabis indica
aaaaaatcagccatcattactagaaactattttttatcgttggatcattatcaacgataagggaaacactttatttgtaatttatctcctatttttgtggggccctttcaactataaaagaatggctttattagtttatttttcacattcaaataagtacccacaatgttagagcttctctctagactttctttgtctagagcttgaaggtcctgattcttaaacaattattgtaatcactatctcgtgagaataaaaattcgaagtagacatagccttaatattattgagacacagggtcgaactactataaattgttgtgtctttcattaattactttaaaactttattctcatcaatctagcgagcaggtgtggcttaaaaatctagtctaaatttctaagccaacaaccagtataattgtgttaaaaaaactagcatttaagaagaaaatactaaaaatactccaaacattattaggctaatagccttacaatttaatattttcctctaaataggtaaaggcaggcacgttggaccctaatggtgatgtgtcactagccatgtaagaaaaataataaattagcggaatttatggaacgacaccttaaaatacaaatagaataacagtttggcgaattttcacactaaaatttgagtttagaggattaaatgtaagtgaaatagaagttgagagaatttagccgcaaaaaactctaaagaaaattaatttttctatgaaaaactttcactacaacattttaactcaatagcggcgggcatattagcggcggaccccctccgccgctattaatataggtattagcggcggagagggggctccgccgctattgttggccgttaattttttttttttgtaaatcatattagcggcgggcagtccgccgcaactgctccgccgctaatactaatagcggcggacccgccgctattgctccgccgctactagtattagcggcggagcccgccgctaatagtccgccgct

SEQ ID NO: 228917 - DNA, 2085 bp, Cannabis indica
ctggccagagttcaggcaagggaaaaagtattgcccaatagggagtcgcccaaggcggcgataaagatgtggatcccatacttggggaaccaaatacaaatgtagggttggtggacgaaatggaagaagtagaaattgacccaaatatctcaaccagaaaactcaaaattggcaaaggtttgttgctcgaaataaaattagctttaataaaatttctaagagcaaacctagacatttttgcctggtcacacgaggatatggtcggtattgatccttttgtaatatctcacgcctaaacattgacccaaagttttgcccagatgaataaaaaagaaaactattggacaaagaacaggcgcaagcgttgaaagaagaggtagataaactatgtaacaacaagttcatcattgaagctttctacctggtttgggtggctaaccttgtactggcacccaagcccaataaaaaatggggtgtatgtattgattttatctatctcaacaaggcgtgccccaaggactgttttccactcccaagaatagatcatctcgtgtatgcaacaaccgagcacgagatcctgagcttgatggatgcctattcagggtataataaaatcaaaatgcatccaccataccaagaacatacaagtttccaaatagatatgggtctgtactattacaaagttatgccgtttggtctaaagaatgctggagctacctaccagaggctggtgaataaaatgtttaaagatcagattggacgaaatatggaggtatatggatgatatgctcgtcaattccaaaaggttgggggcatatagaggacttagatgaatgcttcaaaatcctcagaaactacaacatgaagctcaatcctttaaagttcttctttggagtcatcttggttttattgttaatgctcagggtatcgaggccaatccagaataaatacaagctctcctgaatatgaaatcgtcaacaaaaactaaggaagtcgaaagcttaactagttggatagcccactcagtagatttgtttcaaagtcaatagacaaatgtgttccttttttcaacatccttcgaggtaacaagaaatttgaatggacggaggaatgcgagaagcctttcaagaattaaaaagacaacttgtaaagcctcccgtactctccaaaccactggatgaagaagaattaggaatatacttggttgttacagaatacgttgtaagtgtcgtgctgataagagaagagaacaacgtccaacatccagtcttctatatcagtaaaagactcgttgaagctgagggagggtatcctttgatagaaaagcttacttattgcctaatctttgcaacaaggaagttaaggccttatttccaagctcatcctgttcgggtatagaccaaccaaccattacaccaagtattgtaaaaacctggcgcttctggatggttacttaaatgggcggtagagttgggtcagtacgaaataatctttcaaccctgaacaacagtcaaaggataggccttagtagactttgtagttgagtgcacatgcaaagaagaaagcagcataagggacaacccggagctaatgcaagagtccctgttgaacaacaacgaagacagacctacctggaaattgcacgtagatgggtcggctacagatcaactgtttggtgcgggaattgcccttgtcacacctagggggaaacatctgcacggggtagtcaaatttggattcaaagcttccaataaggaagcagagtatgaagccttcattgctggcttaaaacttgctcaggagatgcatgctaaatatattgaggtctgtagtaattcgcaattggtagtaaatcatgtttcaggatggtacgaggcctggggagagaaaatgatagcttatgtaagcaagatacatgacctgctcgcataattcaagggttacaccctcaggcaaattccaagagaagaaaacacaactgctgcaagcagcacagtaactaataaggtcaatctagtccctattcaattcttagaagaacctagcatcaattttgtggaataaatcgaaatgatagacacagca

SEQ ID NO: 228918 - DNA, 1376 bp, Cannabis indica
  modified_base (1244)..(1244): a, c, t, g, unknown or other
aaaaaatatatgaaaataaaattaaagtaagtatcaaattaacacaaaataatatgagaaaaacattaaaaataaaaagaatttttaaaatttattttaagtttaatttttgtaaatattaaaatatgtcttttatcttgtgaaatataaataaaatttctcttattttttttcatttaacaatgtttagtataatataatataatataataaacatttaatttgccctttttttttataaaagggctcaataatattgggtggctttgggaaaaacacatgtacacaatccacacaagcaactggttttgattaaaaaatatatatatttaaattaaataattaaaaatatatatttaaaagaaaaagaaaaataaaaataaaaacttaaggtaaagattccggcgccgactgtggaattcacctactttatgccaactttttgtttttattaagtgattaaataataataatcaaatgatagaattaaacaagaaaatcatggttacatcatcggaaattggaattggattatggttgtaattaatgaaaaattaagatttaattaattattataaaattatattgtccaatgagttttgttttgatactaaaagagaaatgttaaaaaatattattggtgtcttatatttttattagtgtcgtaatactattagtataattgagtattgagtccgtataatttaagaaataatttttagaaaatatcactaaacaatcatggagcgctatctatagaaggtacccaatagtaatgctattaaaagtacaagtggtgttttacacatttctcgaggtcatatagctatttttttttatttaagcgtttatatattacatcatcataacctgggactcgaacccaggacttccaacacacacgcaccccctactggccacttgagatagcctcaagtagaggtcatatagctattagtataattgagcatcggatccttataacttaagatataatttttaggaaataatcgttaatcaatcataggacgtcacctatgagcattgatatgcaccactaatactcaatgggcccgtttggtacgcagcactggattggattagacaggctaatttgtccaatccagtgtttgggcatgttagaagtctggataactaatccagttaacctcatctgtctgggattatttatcccatccagcagggtgggataataatcccatgcaggtgagatttttttttancgtttttttaattaaattttattaatatatttaaatttattaaatttaaggaaataattatcacacatttatttatacatttttttatcaagaacttattcattaaaattagtgaaaatgtataattttgaa

SEQ ID NO: 228919 - DNA, 1360 bp, Cannabis indica
taaattaaaaaaaatacttaaaaatcaaagaattttcaacaattaaatctaacgaaaaaaaaaacaactacaattactaatccatatataacaatcataaccaaatttaaaatgggaaagaaaagcaaaaccaacaaacatataatataaacacattcaggaaaaccatagtaaatcatcatcaaacccaacacactaacttatagcacccgaaaattaaatcagataaacactcattaagccgccggaggtgagagagataccgaagaacgaagaaaacactgggaagggaagcaaacgttctcaacttttttggtctgaaatgggttttggggaatttcaggttaggtgggtttggggaagacaaagaagctaaaatataaaatgaaataaaaatgtccttagtagaaccaatactaaggacatgtccacgttgcaggaacttaacccaaaaaaaattgtgaatttcttttgctagtgcgaaaataccaataaccataacatgtcctcgatatagttgtcctcgttacataccctgctttttgtagtgatttgagttttatttttgattttgtatttattttttactgattctaatcagctatagcttagtaagaaatccaaactaaaaaatttatgtaatgtgacactatttctgatatgaaataccaacaaataattcaaatagaaaaaccctaaagtaattatgaaaaaaataaatatggtcattacaaacaaaaaataagatgaaagaaataaagttaacttttttagaacgaacacagagcttaatttctctctttttcttgacgaataattatcaaaatttgtcataatagaatgtgtatagtgaaatttctcaattgtgggtttttactccttcaagattgaggagtgagatttctagtacatataaacatacacatctagatatataacaaaaaaaattatataaaatgtaaagcatatcaaaattctacaaattttaataaagatcagttgatatagaattagaaattagaattaaatttaatgttattaccaagtgtagactacgaaaggaaattgattttacttttcatgttttgtacaacattttctatttatatattcttatatttaattacgcatacaaaccaaaatgtcaatttatttactaaattaactgcgtctgttttattaccgattatttcttaaaattgtgttaacacatataccgataatgatgaaatctgtatctctcttcattgatacatgatgaagttgattttttttttcttgaacaactctttcttttgctcaatatgattttcgtcgtcttttttttttttaacaaactaaaatgatgggataaagatga

SEQ ID NO: 228920 - DNA, 1537 bp, Cannabis indica
tcccatcctaaaatatggtataggaccttcaagctcgcaaggatcctttacgagatgggattcagttggaagggggcaaccccgaggtagttgcagaactccttaaaataatccctaaggggaataaccaccccagctttgatgtgctcgatgctccaggaaccaatgctcgaggaattgctcgtgctaggtccattgcattccttgtgtattaccctttctggagggaaacagctgaattccccaggagccactgaccttatgatacaacctttcctctgcttgataccgcagacttcagaataccaccaacataggccccaattgacctaaccttggattcaatgagttcaacctcgaatgtaacactgggatcctgtcgggtctttgattttcgaggcttaagagacataatgtcaaactcaggtcacctggttcaaaagcaacagtgactttgggtaaaaatattagtctcacgagtggaatagaagctaatattatgggttcaggccaggctacgtctcgcaaaaaacgacgtttgcccttagaaatctcttgcaaaaattatctataacgactggtaacttcttcctggttcgacttaatcaaatggtctctaatttttgcatcatttatctccaatttggattggggttagaaatttctaggtttgaatgggagggctaattgtttgggatattctgtttctaagaactctggagaataaacttctgaaccaggttgggacatttctacaaaaaagaacaatcccaattcctggatgaaagttattaaaccagaggtttaaagaatgtgataaacctaaatttatattgtgcctaaaccctaacaattaactagaaaacttaaaccaaaatcgctaaaccaaatggagtgacaagatgcaaaataatcgatcataacccagaacaaaaaaaaggaagaagaacagagaagaatgggacacttactatttgaagtcgagtagtcatgtggggggaaagtcctgtaaccaaagacggagtgaacagcgtgatgaattttttgaacacttgaggtcgaaaagcaagttcgaggaaattcgcagaaagaatatcaaagacaaggagggcatgcaaagtttcaagaactcaggataggaatttatcagaaaaacttgagtttttaaaaaggcaaaaatggtggaaaaatggattctttaccgttttatacttcaaacttagttactgtcagatcaaaatgtagaagatctaatggataaaaatggaaaagaagtggaaaggatggcttattaatgctaatgatgtccctcgaaactacaaaactgccaaaatcaaaggcatgcatatttttaaaatggaatatgacaaatacaccatcagtaatcattttaaaagtacttttcattgaaaaggactttttaagggtcaattgttatacccaaaattcagctgtacttcaggaggtgacacgtgtcagtcttagggaatatgaataaaaaaatatattgatatttatatcattaaatataaaatgg

SEQ ID NO: 228921 - DNA, 641 bp, Cannabis indica
caaaacgactgcaaagcacattccaaagatcagtatctatagatttttgagcatgtcgagtttaacatgaagcaagaaattaagttcataattttctcacctagaattgttatttctgctagttttagcattgccaaatgcttcaagaactggattcgactgcaccatgccaatgccaagaaaagaaatggttaaaaccaattgaagtttgtaacatagaaggcactcatatgagtattcaatatatccaacttacttctaaaacttgttgctcaactgtccttccttcagatgcagaacgaccaccaacaaaggcaaggtaccgcataagcattttagttgtctcggtctttccagcgccactttcaccgcttaccagaatagaattgctctttccctcattaatcatttgcctgttcaaagaaatatgattaagccaacaatgaacctcattttcaaagtaacaaaagtaggatgtgcataaagttcacctatacgcaaaatcagctatggcaaatacatgaggacctagttttccaaatggagctcccttgtacaattccatcatgcatgcatcatacaaattggaaaggctttgaaatggatttatggctatgagaatgttcccggtataagtctgc

SEQ ID NO: 228922 - DNA, 1510 bp, Cannabis indica
ggtttgatgtatgggtgcctaattgtaataccggtttatatctatgttatgattatactttttttactgagtctgtcgactcacaattattgtatatatgtgtaggtaagggcaaagctatgctgaacaacagtgagtggaagcggatgaagattgtacatgttggggcggttaggcttggagcatacgatctttgggacaacaggctgtattttgaatggtttctaggcgacaacttttgtatctaatgttttgtattatgattctaaatattttaagtacgggatccagattctgtaaaagatatttattttcatttaaggagtaattaaattaaagttttaataaattatggttttcaataaacttgttcattagcaacggattgcacaattaatataaaatcacgataatacgcctaaactagtagggtgttacaattgtagtctttagaaaacctaattcacaaaataaaatacctagtggggttggcatttctatttcattttttttttgcctaatcctgctaataattggtatcatcacttgaaaaaaatatcaaaacaacaagcgtgcaaagaaaacatcaggtaagtgattgataaaaaaaaacatcaggtaagtgaagtttcacttttacttgattatcctattcaaaagaaaaatccgaacatcaattgattattccacttgtttacagagcttttcggcatgggtaactgtcatggtagcctcatgtcattttttctatatcttcatcatatgttgcagttacatatgttctagatgttcatgcagatgatatcacagtcaccgcagataatgcagatgatgtcgtaggtaatacctcagacgtcacatatgccatagatgatgtcacaatgccacaaatgatgtcgatgtcacaccaaccaccgcagatcccaggagtacaacctacaccttcacaacaaactggagggaatgataatggtggtggtgataatgattccacatcttacaattctaatttattacttttgttagtatgaacatttacgaaatcttttaaatatatagcaatgtatgaactattttattattaaatataaacatatttaattttttaagaaattatttagtagaaaaaaaatgtgatatttaaaaaaatcactttaaataaatttaattattctgaaaaatgacactaggaatgatatttttattccagattacaaaacaatcatttctaataatgtgtaaaaaacaagttgctggcttaattttctggaacaactcattttcgtttcagatattttagcatagacacaatgctatattttgttcctaatatcaattttcaagtacaaattatcaggaataaaatatcaggaatgataagttatgccaaataatctccgggaacaactttggaggttttctggaataaaaaaatcattcctaataacattttttgttgtagtttacttggtaaatttttattaacgtttattggagcttgaattcatgg

SEQ ID NO: 228923 - DNA, 1044 bp, Cannabis indica
ggtagttgaagctgattttatacaaatttaaagtctatctttaaaattatttaaaatgtcaccaaaatttataaaatttcctaaataattaccatatattaatatcatcacattagaaattttaattatataatttctggaatataaaaaacagggccttaattagattgattgatgtccacatatcatatgtgaggtgaaatattgtgcaccccacgaattaataaatcgattcgaaagtaggcaacaaaatttctaaagtcgttgtgtattttcttcaccaaaaatgattgttctacagttctactctaaccgatatcaagcacattttgtcttttttgttttatgtaatattaattttctattattattattattgttgttgtttttgttgttgttgtttaatagtgtaatattaatgagcaaactaacgtaatgatctggccgcctgaactaaggcagtctagacccggtgtctaaggtccactcaaactcagggtccaaaattattataaagtatattttttgttttaaaaaattaatatttttgaaaatttttgtaaaaaaaaaactcaataatactcacattttattttagataaaacacaccctcagcaaatttgttaggcccattattacttagggtcagccctgtaatgtaaactaataatctcatgaagagtgcctataaggctaaatgaaaagttagtatcgaaatcggatggtaatttttcctaccattttaacttatctcgatgaaattataaattaaaaaatataaataaataaaaagagtagccaaagaattttgttattatgcactacggtaaaataaatgttaaatgacactagtggtgtctagcaccctcttcagtattatacttctattagtggaattaagtttcagatcctatataacttaagtaaattcttttaaaaaatatcactaattaattgtaagatgtcacctcaaaatgatactaagaacatctccaatggtagcatccttaaaggatgctaaaaatttacacattatctaaaaat

SEQ ID NO: 228924 - DNA, 784 bp, Cannabis indica
gatgttaatgaaacataattgttagtaaatctagatcctggtaaaatatttccaacaaacactaggagaacgactttgtgaggatgaagaataagattcaacatcatttaccgcattacgcggttgggccctgcttcgagggttgtatcgcttgggatcctcctcttgcggcacctcacggttagagtttcatgcaacttgttccctctgcgtaggctagttaaagtcgagtccttcctgtccagacctgtgttctctacaagagcaattattagttcgtcacctactgtttgtaacctgggggttatctgaacgtatgtttggtacttgagggggacgtcgggtcctgacccttccattcaccttagcctgcaaagcttgcatttgctcttgcagggtcgtatactgggcagtggtcagttgaatgattcgctcagacaccacaaccggtgtgataggcaggaactgtcctacagtggctgtcggtgttgatgtttctccggcatgaacgacaattttaggaaattagttgaggggagtaacagtggtacatcccactcctccgttgatggtgtcgtcaggtgttgttccattacatgggagtggaacattcattgttccaacattgaacgatccaatattgttatctccattcatctagtttctagccattatgattttcctccgaaatcaatagaaaaattctttcccatagacgacaccaaatgttgttggaggaatttagacaacacccaataaaataatatatttaaaaatataaaca

SEQ ID NO: 228925 - DNA, 1850 bp, Cannabis indica
agttgggtttggaaggagaaccttgagttttttcttagtttatattaggttccatgggagttgagacaggttttgaaccaagtcagtcagcttctttgaggagttgtaaggtaaatggcctttgagaaacataaattccttttgaacatcgggcaatttcaaggccaaggaagaaatgaagggtgccaaggtctttaagcttgaacttagaatcgagtctggagatgaatgaattgagagcagttgtatcatttgttgctataattatgtcatcaacatacataagtaagggtaagaagacaccagattggcttcttataaagagtgaatggtcattttgagcctgtttgaagttgtgttgtaataatgttttgctgagtgttgcataccattggcgcaaggcttgtttaagaccatacaagcttttagttagtttgcaaactacattggttggtaggtctccttttggacagtaaccttgagggagtttcatatagacatcctcatttgattctccatgcaagaaagcattggttatgtccatgtgatgtaaatgccaattattgatggcagcaagaggaaagagaagttttaaggtattaaattttgctataggagcataagtttcgaaatagtaaattcttggtttttgagcatatcctttagcaactaatcgtgatttatatctctctactgatccattaggattatattgatcctatatacccatttgtttccaattacatgttgatttggaggtacgggtacaacaatccatgtatgatttttttctagggcacctatctctacatccatggctttgttccaaattttgtgtttggaagcttgtttataggatgttggtgtggatagtagattaagggcaagtatagcagctcgaaaagatggagaaaatctgtcataggatatgaagttggttgaaaggtgttgggtattagtgtgagtaactaagtaacaattatagtcattaagatgggggttttttgaggtgctcgacctgatctagtgtgttttgttatgactggtttttggatgtgcacatcagtattattgagaagagtgacatttgggataggttcaacaattgtgtgctgggaaatgatgatcttcttgactggtggtagtgaattttgtagtttagtgaaagaaatgatcaatgttttgattatgagaaatatttttgataaatattctcatagtagacaatatctcgggaatggaaaatattatttgtttgaatatcaagtaaagtgtaagctttcatattgtatggatagccaatgaagacacatgactttgctcgaggtgaaaattttgtttttgtggtgacaaatgaggcatattgtaatatcctggaaaatattatgatatctaattaggcatattttattaaatatgtaaattattctggtaaggagaagattatgatcttactagggttgattagtgtgacattagtaaataattatttaaagtgtaatttattaatcacagaaattttattagaatatgtgggtatcgtggataccatttctataacaaaatgttttcgagcccgacgaccgtggaagctcggcggagtggttaaaaatgtcacgacagtaaaggatggattattttggaagtattccggactagcttagaattttgggctgtcgatttggtggattagctagaattactaaattacccctatatgtgctttaggtggatccagccaaaattgaagttgttcgggattggccaacaccaaaatcggctactgaggttagaagttttttgggtttagctaggtattttgtcagatcgttgagggtttttcaaagatt

SEQ ID NO: 228926 - DNA, 1142 bp, Cannabis indica
accaatcacaagagataaacaatcaagaaacttaagcaaatcaactatctctgtcacctctctagcataatacctcctgcctagcataagcataaaagtagaatttataaaccccaattccatgacttaaaccttgcctgcagtgacccctataatgactacctttcgcccaaaataacagaaatggaaaaccagcagtgataatcaaataaaaatattaggattaccttaggtttcaagatccaagaacaggtgaatttccgatggtagtagctgaaaagaaatgttatggctgaaaaagaaaagcagcaaagctattcagtaagtatttacccttttgatactcaccttcgtaaacatccccattactgtaaaaactctctcccaattctctttcagtttcattctttcatttttattgaaattcaaacaatcacagccccattcaaacagaacaaagaatcaaaacaaatcaaattaatatttcaataatccaaacaaagaccaattttaatttggaatccttacctcttattttatggtgaattagatttgaggttgtttatagataagatgatggtgaattttaaaaaaaaagaacaatgaatatcattttttatgcagcccatggagtatcaaatccccccttccagatttgagattgtttatagataaatagaagtaattgtactatttgctatcaaattcttagaaccaaattaagacgcgagcaatacaacgatgcatacattattgtgacatggtttactctaacgacaattatttaaaaccaatcaactttgaagataacaatagtggagtcctcaaagttgaaggaattgtcaattaaactagggaaaactgagtagcccagtttaataaatacaaattacaatagacaagaaaaggcagttcaagcctaacattcttatctattgacttaagcgcagatcaggggaaatggagaataatatctcagaatctcacttttttttatcctcctaaaaactgatggtaaaaaatgtcataagttcacactagtcgatatgaagaatcagcaaaacatgttaacatacatctcttagtacctactaaatttcaatactaaaggctttaccgaggcaagtcgatacaataatagg

SEQ ID NO: 228927 - DNA, 1609 bp, Cannabis indica
actttcaagcacaccccatcacggtactcactgaccaatcattacggcaagttctacaaaagctcgatgcattgggacgcctccttaaatgggcaatagagttggggcagtatgacataacctatcagccaaggtcggctatcaaagggtaggccctgaccaactttgtagctgaatataccggggttcaagatgttgaaattgagacaggggtataagaagatgaccaaccaacaacaaccagagccacccaaagacctgatacgggtggttcacctgaaccacatgtttccaagcagagaagaatgaaaagcaagatcaagcaagtgaaacttggaaactacaagttgatggttcttccacagtttagtcatcgggagtgaggatcacctaataacctctgaaggacaacaaatccatacggccattcaattcggcttcctcatttcaaacaatgaagcggaatacgcaacattaatcactggtccgagactagcaaaagaagtgaaggccaaacacttagacatttacatcgattcccaactggttgtaaaccatgttagtacacagccaaaggagaaagagatgatggcttacctcagcaagatataagatttggtggcccaaatagaggggtacaccattcaaaaaataccaagagaagagaacgctaccgctgatgccttggcaagattggcaacaagtgaaagggtagataaggctaacctcgtgccaatataatacctatctgaaccaagcatgaacaccaaagaataagtactactacttgatacaactcaatcatggatgactcccatagcagcttacttagaacaaggtacactgcctaccaacaaaaacaaagcaaagaagatgagaagaaaggtcgctcggtacctaatcattgatggtttcatgtataggcaagggttctcaatgcccttactacgatgtgtacatcaagaccaagcctaaagactaatggaagaagtccatgaaggtttctacgataatcatgctagggcaaaagcttatctaagaagatactacgataaggattcttctggccaaccatgatagaagattgcatggagtatgtatgaaggtgtgaaaaacgtcaaaagttttcaaaaataccaagggctctacccaacgaggtaacacaaatgcagagtccatggccttttgtccactatagggaagttaacttgatcggtcaattacctaagggcaagggaggagtgcaatatgcggtagtaagctgtcgactatttcactaagtggacaaaagctgaacaattagcaaccataaatgttgggttttgtgccctaaataaaacccatttcaatataatcagatttactaattaataaagatcaaaaattgcttttatgttgcatggttcacatgatttatttcatgattttgtttattgtataaattctattaagtccagaacatatataaatatgtatatatttgttcatgattattgtgtcgtcatcacagtggaatgtaatcatgattattgttgggttttgtgccctaaataaaacccatttcaatataatcagatttactagttgataaagatcagaaataacattt

SEQ ID NO: 228928 - DNA, 1404 bp, Cannabis indica
tgtatgattctgttgttgctgtgttattttcaagtattgttgtgttgttttcgagcattgtcacattctcttgaaataattatgttctttttcccattgtccattgctctttatgagaactggtatagattccatgtcctgtcatttttcacaatatttcatttacgtggcatttttttcatattaaaacaacagtaaaataacactacaaaacaataatttgttgttgatttagtaattttttctctttgccagattttatggttttttcctggtgtttctatgattctggtgttgatttgtccgtccccaaccacgaaggagaggtgccgtttgtgttttgttactgtttacagtataaaagtaaatatattgggcctgggcaaattagtagattcaaggaagtttatcagtgagaaaattacactctataccttttttatattgtgctcttttatttttaccctcttttttaaagtttatcatttttacctctttttttaaatattgtaccaattttgcccttgtcactttaagatactctccatgtgactctcttatgtcagtgtattttaattacatataaaaagaggtatgtttcaattaaatataaaattagaagtaaatttgattaattgattaataaaagtggtatttttcaacttacccctttatcggtccctattcaggttgattggctggcccatttccgacccaatagtttgggcttcggcccacatgttaacgggttgcctggcccaacccaataaatgtgcaactgctgtagaattgattgttaattatatacatgtatacatataggggatttttactgtaggacaaaatataaagaacatatgctataggaaagcaatattaaccaatcagaaattcaaaaaaaaaaaaatatatatataaggtaaatttaccgtggggcttaatatctttacctcatgatataagaacataaattaagtcaatcaaagtttaaagaaaataaattggatagaatttttgcttttgcatgtgcagaagattattatataataatattattatattattattttttattttctgtaaaagttataaatatattaacagttggatagactttggtttcaatattaatagagtgcatatatgtaataattttaataattttttttcataaaaaagtataagataatagtactttacgcacaaaaaaacaatgaattagtttttttattataaaattacttttttaaaattatttaagttcgttaatttaatttgagttttaattatcaattttttatatttatttagtatttatcacataaaacaaagttttcataaactcaaaattaactcctaaataaataatggaggaatttctacagtagacagtagcggagggac

SEQ ID NO: 228929 - DNA, 1329 bp, Cannabis indica
ttaacgttttattttaaaattttggtagttttttttaggaaagataaaagttgttttggggagaaaaatcacctcttacctttttttgttcaattcctatcccaaccaattaagttttgtcacctcatttaaaataccaaataagcattaaacaaggtaagtgttaccctaattttttatttttatttttattttttgaataacaagattggtaacattaagattaaacaatttagtatagtttacaaagatccaaaactaagagtttgaaacacaaccgtttcaaataacctctctatgggttcctaatgctctctgagcaagattatgagccaaaatattagaatttctaggtacataataaatggaagcattaggaaggcaagataaacaagatttaaaggagatgatttatttctccatttgcttgtaatcttcttaattaaaacttggcaatcataaacaataatgtcaagtagaaattgaactgccaaataccaagccattgctctaagaagggcttcaccttctgcataaatagggaaaagaccgctaataatttaagagtaacaacctgcaatgagttttccttcacagtcttgaatcacatctccataaccatgtttacaaccttgttctttaatagaagcatccacacttacttaaacatccccgaagaaggaaacgagttataagaacttgaaggagcattggaccattcttcttaatagatgtttaaggtgagtaggggtatgcataaattatccaatccaattgttagaaaagttctcattactagagagaataggaggattacaatcaaaatactcaaaatacaaataaaagtatttcatcaagattacaagaaagctagagaagaagaagaataataacacacaaaaagcttgacaaaggctcaaggatattttccctaaaagtcatttcctccttgatatggacacttagggaaactctagaactgctcttaaggatttattaagcctcatatactcagcctagtgtctaaagatgagcatatcctcacaaggttctaaccacaacaaatgatttcaactacttcactcacaagtgaacaatatggcctctatttatagagttttcactcccatatgaacatggatgaccaccataaagcccttggatgttaccaatcataaattaggcatttatggtattaataaggtgattttgaggagttttgggctgttagaaagactcccaaactttcaaaaacgtatgcacttatatgttgaaaaaaaaagtaactagttactacttaccattgttcacctttggtcaattcttctc

SEQ ID NO: 228930 - DNA, 1453 bp, Cannabis indica
ccctttatcatatttgcatggtaatatggttaatcgatatacacaattaattaatatattaagtgacagtcatgagttctgccatgtatgtatacatagatatgaagggtaaactagctggctataccacatatatttttttcttcaaatacatatacatatatagataattattataacatgatatatacatatataatatataattgaccaagttaggtataaagatatgtataatatatagtagggtcgacacatgcatggacaagaatcgagagactacatggaacgggacatagcacagctgtacattgtaaaaaggtaggatgtgggggtttcttttcatcaacttgatcattgttcaaaaggtacatatataattaagggagatgattttgttccatgattgtactttcacggaatgtattctgtgatgtaaggcagccgttagatgagagagttatttgatctgagggctgaaattgatctaaaggtaattaggattaagaaatagtaacgtaccctgacactcatataatgtacttgagacacatctaatgtaccacagaatacattccgtgaagtacatcacgagacaaaatcgtgtccctatatacagttcaatctttcatatgaaaagtagcccctttccaaataaataaaatagtataatttatggtataaatacttaagttttatgtcaagtagtagataagtgttaaaaattaattatttttaaaaattattaaatataaattcttgaacaaaatattcataaattatataaaatttgtttaacacatacactaaatattacaaacaaaatacaaattaaacaatgagatcaaaccaaaactccgattttgaaacccttaaatggggtagattaaatatcgattaactccatgcccaagccaaaaccataaatttagaaatataaataaaaactcaaactcagaaataaaagcgcaaaccacaaactactctaatgagggatttgtggtctttctacgatttgggaacaatgagagacataaagaagcagatgaaagcaagcatctggttcgcatgttgtcgagaagagaggaaaatgaggatgcactatggtgaaataggggttggttccgatggtaaggaggaagaagacatcaatgatgagtattcgcaggtcgacgccgatgagggagaagaacgatggccccatagttcccagaagacgataagggatgaagttgaccccttgaatcacagaagagagaaatacatgaaaccgattatggttcgcagaagtgaagagggagaagaacgtgattttaggagttaaggattttatgttctcagattttttaggttttaaatttaattttgtatatttaacttaattttaagtttttgtgtttaacaaaacaatcctcttttattggatttttttattaatataggattaaatttt

SEQ ID NO: 228931 - DNA, 2073 bp, Cannabis indica
caactatcctctatattcctttgtgaaaaaaattaattgttttaaaatgatataaaacttaaacaactaacaatttatttttatcttttttagtttgatgtttcttaacatttgcaaataattgagttgctgatcttatgattagagtatctcaattatatgttgatcgtatttttttgaagtctaattttcttttataggtttctgacataggttgaattagtctaattaaataaatttacaattaaaaaaaaacaactaaaattttacataattcatggattaaattgtcaaaactaaaaaattagggatgaaatcgtcacaaaataatagtcaaaggatcaacataattcaagtttttgttgtattagtgataatttatttattggtgatagttcaaactgcaaaaatcgcatcgcacagcaatattttttgcggtgcggtttctgcgattttttaatttcacggtgcgagtgcgatttggaaacttggaaaaactacatgtacaaatttgtttgaaaaaataatcaaaaacgcaccacctgcactgaaaacactcctactttagatattactaatatggttgagggcaagttggtctagttgaatgaaatttaaccgttaaaaaaaaaaaataactaaaagttcacataattcatggattagattgtcaaaactaaaaaattagggatgaaatcgtcacaaaataatagtcaaaggactaaaaatggaaattgtgatcataaaaccctcacatatttacgaagggtgtagattcaaaatctaagatccaaaggctcacaatagctagctaagagttgctatatagcatcacttttctccgtattcctccacttccctgccgttttaggtttttctctttcgtgttctgcaaaacccaaaagcgtcttctttcaacggcaacatggtaaaacacgttttccttcttctccttcagaagtttgttattgtgggttatgtttattttatcttatattcatggttaatgttttaggttcttcaaaacgacattgatctgctaaacccaccagctgagcttgagaagaagaagcacaagctcaagcgtcttgttcagtctcccaattcctttttcatggtaattatttccagcaatacatgtgaatcgacattactatctgggtctttgaaattttgctaatttgttttttcttgtttttccctttaaggatgtgaaatgtcaaggctgcttcaatatgtaagttctaaaaaaatttatggtatttctgtatatttcaatatgattcctttagtgggtcagtgatagatttttgatttgtgatttttgtgttattgaaatatgcagaactactgtttttagccattcacaaactgtggtggtgtgtgggaattgccagactgtgttgtgccagcctacaggtgggcgtgctagactcactgaaggctgctcctttaggagaaagggagattagatattatggttagctcatgttttttgcttgcttgattagggtgagagaaatgtttagtagttagtcatgactttttgaagggattcaaatgaagaatggttttgttttcccctaagatatgttgattttgattctactttttaaattatgaagaattgctactttttttttttgggaacttttttcttcttcacttggtggattgttgatgctattaagatataagatatttacattgcatgtttaatgttgaactgaaactatttgagcaatgtgcttgaatttgaaactttaacatgtcaataccaatgtaattgatttaccaaattagttacttgcagtaatttttaatgtgaagtagatcaattacaatttttgcttcttgatagtagattattggtttctgttttaaacgtagattgatgttgaagagtgaaagtatgtcttggtccctcgtttttattaagatcagttctctgctcagtttagggattagataagttaatactgttacatgtaatatacagtttgaccaaattacatggaagaagggaaataatgtgaccacgtttcctcttattgtatatggtccagttactta

SEQ ID NO: 228932 - DNA, 1936 bp, Cannabis indica
aataatctcaatagtttaaaaaacatttttaacgattttcaaaatttaaaaaatataatttagtacatatcaaaatcgttggtaaaatttttaattaaacttttaatgtagaatattaggctaaccaatcaaaaaaggcaatacacaattcattattatagggtggagtggaggtgggtaaaatgggaaagagaagagaattgataggagtgcagttgaccgttgactgaccgtccctgtcagttaaaagtttcactgctttgttttgggtttccaaagcaaaataatgaaatacccattttaccctcaaatttcttctaatactcctcaaccgaccccacttctcttaataataatatattaactcctccagaaacggaaaacagaagaacaaatctcattttctctttctttacttaatttataactttaaataaaatattcttaatttgcatgtattccgctctctcataaaacccatgagtcagtagagagagaaagggaagaatttagagagagaaggagaaagagaaaaatagagagagagaactgagtaggctaggtttagggttttgagggtttggagaccagagaacacaatgggcagcgaaagattgaacggaacggtcaagtggttcagtgatcagaagggttatggcttcattaccccttctgatggcagcgaggacttgttcgttcaccaatctgccatccgatccgacggtttccgaagcctcgctgacggagaaaccgtagagtttcagatcgagacggaaaataatcgtaccaaggcagtcgatgtcactggccctaacgagggacctgttcagggaacgcgcggtggtggtggtggttctggaggcggtggaagaggaggatctcgcggtggttatggcggaggtggtggatatggtggaggtggaggttacggtggtggtggtggttatggtggaggtggtagaggaggcagaggcggtggtgatggaggatatggaggcggaagtggaggaggcggtggcggttgttttaagtgtggtgaaagtggtcacatggcgagagattgcttccagggtggatcaagcggcggtggcggtggaggtaggtacggtggtggcggcggtggtagcggaggaggtggtggtggtggtggaaactgcttcaactgtggtgggactggacattttgcaagggagtgccctaacaaccctcgttgagtggaaaattttcctccaaaaaggaagaaaaatgcttatttcttagcatttgggagcttttttttttggttatttatttttaaattttaaatatcctggtttggttgactcttttgttgttagggttagggtgtttggaacaatggtttttctcctttttttgtgtttggttttaataggggagtttaatttatgatctaatattttctttgtgggaattattgttggtattttctttgttattgttttgttatccaaactagtagtaagtaatgtatgtcttgggttttcttatggacaacaccgtatatgttcactgagctacctactttaccctttttttgctctattttcaagtgtgtatatatacacattattaatatatgccggtgtttatttataagtcaactaatcttttttcttctgctttacatattttaatgcgatattgaaagttactactgttgtttattttgattgtgatttgtttgtatatgaaattctcgttgaaacaacaatgagatagataggttaaaactaaaagtgaatggtgtgtttttaagtgaagaaggaaaaacaaacacataaatataagagaattctataataatctatgaaaatggattatttgtgttcaattgtgtggcgctctgtttgtgagtttcgtatgaagttggggttcttgttttgttctgtacggtgtggttttgggcagatccttc

SEQ ID NO: 228933 - DNA, 1081 bp, Cannabis indica
aaccatggaaattaaggttgaatcgcggccaaattcaagaaacgacgtcgttgacagtgaagaagaacaaaagctcccactcttgaaaaacgacgccgttgcacccacaaaaactctagtccaaaaagccataagccaaacgtttgaaagcacagcccacttagccaaacttctaccgaccgggacggttctggcgttccagctcttggcccctattttcacaaaccaagggcagtgcgacccggtcagccggtcaatgacggtgggcctcgtagccctatgtggagcgtcgtcgtttttgctctgcttcacagatagtttcaaggacaagaatggtgatctctgttacggcttcgccacgtggcgagggttgtggatcattgatggatcaaacaccacaacacttccgcccgcggaggctttgaaatatcgtcttcgttttatcgatttcatgcatggtttcatgtcgttgcttgtgtttgtggccgttgcgctgtttgatcagaatgtggttagttgcttttatccgaagccatcggatcagacccaggaggttctgactgcgttgcccgttgcgattggtgtgttttgcagtatgttgtttgttgtttttcccaccaagcgtcacggcatcggcttccccctttctgtcagttgattattgttatagtttacttgtttaattgtatatgtgttctgtaactgtcttttttttttttttggtaccgatttggtggatattgtcaacttgtatttattttatccaaatcatgattaattttaattacaaaaatcatgagtaattgtttgaaatacacccaaaatttttttttttaaagcaatgaataaaatcatttaaaaatataataacgttatacaagctagtcaaataaatattatacatgtcatgtcatgattatcaaaatatttctatacatccaacaaaaacctagatcatcatatttagccaaacaagttgttcatccaagtatgcacaactaatccttgagcaacacagattaaggacactcttggaaatctggatgataaacttgtaaaaacttctaacaatgatcttaaa

SEQ ID NO: 228934 - DNA, 1920 bp, Cannabis indica
cttgctatccacagatgaaggctacgcattaaaggcttgccaagaaaaggctagttagccatgctcctaccatggtctggtcggccatgtgcttgccaaggtaggttggttgcacatcaagggctttcaagcctttgcatgtattggccagcctttgtaggtgatggccaaactttgtaggtgatggcaaacctttgtgggggattgacggcctttgtaccactttctttgcagaggtcaaggcttccttggtagaacgagctttttcttggtctgataatcacctttggtcagccagcttgtgctcaaatcctggccgaccatataagttcatcctggctggcctatgtactccccttggctggccaaacatagttgtctagcttcttcatagcttatttaacacctctcacttatttcttaacggttctgccatgccccataaggagactttatcctcctattgacaattttttattccatgtgtactttgttttggcttacgtggacatgccacgtcaagtggaaaaaatttggaataatatttgccccccaaaaccctgttcgatcatctggtcggatagggacttccaaattcttgtcttgcttatagtagcctctatcgagcactcttatctagtcgagtattggattttcgcatggtatgcatttagatcttctctctccatatatgcctcatctttttttctttgacatctcttctttgaaccaaccattgataagtttcaagctttttaagcttttagaaactttttgattctcacattagattgtatctttttggtattttgatctgcatgatagttatgaaaagattaaattttgaccttcgttgtgattcttgactctttgagtcatgaagaacatattcaagtgaaaaacacaaattttgattaaaaactaaccttggccgaccctcggggtcttatttgagacttggctagccctaggattcaatggagttggccaactctagggtttcaccctaggaagatagcctattcatgcttgggttttctagccctaatcggttcttggctgagttgtgggaccctggtcaaccctctcaaggcttgggaaccctggtcggcctggcctttggttccaagtaggtggccaattttttgtcctcttttgaccttggtaagaatccttttatgaccttgtaggcatatacaaccttagtctcatgcgtgggtcctttaaaaactttgtatgaaacttaatggtaggctgatttttgcccacctgatgcggcatgtccacgcgaccggtattagtgccacgtgggagtatagctcgtcaacaagaaggccaagccatctagttatcactacaaccaacaagaggtccgagtacttaggaaggacgacgaaatgacggattaggcacctcaaggggattggccggccttatggccagcataggtcagcataggccagccagcttttggacatcatatggccgaccaacatgcactctacaggtgcacgaccatccaacctttttcctggcaggattttggtgcacaactttcatccatggacagtaagtaaaacaacgaattaggctttaaccgcccacaaaaatagaggaaaatatcagcaatttccctattttcaaggggtaattcagtcatttgtatttattcatttattgtgtacataatagctttatttgcctaattttaagggatattagggatgtaagctctcttatataaagtgcattagtcaagccctaaaatcctaaatctcaaaccctaagccttatgctctaagcatgataactcatctcatctctctctctctctcatacgcctattactttactctcacttgagatttgctatacttatctaagtggcattatctctgatatcaatacaactaaaaggag

SEQ ID NO: 228935 - DNA, 2164 bp, Cannabis indica
cctgaaacagcttcaataagagcaccaaaacagtccctagcaatgtacccgaagccaaacttctgctgatcttcgaatatagctccatcgacatttaccttgattgttgattgatctggttttcgccacaatttgtttccaagagcagcacccgtagcaaaataagcattgggtgactcgaaattaacaactttccattgatcaaggataaattaataaatatatatataaattaataatataagaatttattatatataaatatatatgtggtgtgatgcggatatagcagattttttaaatgtatttcacttaaacactccacactgcgatgatagtaaaaaagttaactataactgcaccataatagaaattaaccacatgcaatgcagtgcaaataatgcgggttttgcggttaagaagatattctgctcagtcatattcgatatcatatgtagatatatatatatattatagggaaatttgaatttccatacttacaataccttaaaattttatccctaaatgcatagttattaaaattggtcatatatgaccacattactaatttctcaaaaatatccctcacatttaaaatccctaatctcatcaccctctctcttcctctctctcaactcacttttactcaacccacccgattccaacaacaacccaatttctaaatactctctctccaaaattactcccttactgtcattccattaataacttgaattgtttatttaggtttttattttttttattaatatatccaggtaaatatatatagatatacttttgtacgttatatatgtaatttatatatatatatatagatatacttttgcagatcaaatatgataatgaagaaaatcgaatctgagaagccattggggaagaagagggtccgatggggtccgatggtcacgttgcatggggtccgatggtccgacgggttgggtccgatggtcccgatgcatgggtccgatagatccgatgggtccgacgggttgggtccgatggtcaagttgcatgggtccgatggtccgattcgtggaggtccgatgatcctgctgatgaggtggtcggcggcggaagcggtggatggggatggcggagggagagcagttacaggaacgtacatgtcgtcaatggaggagtcgttgtggggggtaatttggtggcgacgtgggttgaggagagatcggcggaaagagggtcgaagaaataatcgtttggattgagccatttgagcccatgaaatgaagaacatgttagtcgaatatgcatcagctatgcggtggtcgaatgtgcaggctaccactatcccaccacacttcagttcagttacttgtaatactcttattaaaaatttagataaaaaatgtatatatatatactaatttataaaacttgttaaaatggtttgttttcattaatttttttttttttggatgtttcataccggccgattgaagagttaacatattaaattaaaaaaatatttttcactttttatcatgattcatgaagatgaagatgaagtttaatttgatgaacaagtcgttatattatatatatttaatttaataaataaaaaataaaagaaataattatttgaataaaatattaatttttttaaaagagttgaccgagttgaccgagtcaacccgaccaaccgaaacccgccaactcgtgacccgtcaacccaccaaaccgactcctattcgggtccaggttcagttttatttttttaaactcgaaacccgtgaacccgaaactcgcaaacccgaaattcggtaaacccgcccgatgttcaaccctactttattggtaggactaagatgggcttaaggtgtcttattttcagacattaaagttttattatttagctttcttaggatatctctcttatgttagttgtaattttgtattgcagctcatagattgactaaatatgctcttatgataaataatgaatttttttaaatggaagaaatcacctttatcggtatttatttatttatttatttattgaatcaattaaaatgattgtaataaaaaaaattggctaattcacgaaaacgggtaattctcttttagtcaaagagaaaagcataatgaggaggttatattaataataaattaattaaccttgaaaaat

SEQ ID NO: 228936 - DNA, 2774 bp, Cannabis indica
aggatatcttaaatagatataatttacatgaatatgaaaaaaaaaaattagactaaaaaagttttctggataccgaaacaaattaagagtgtatcagtacatcccttttataggggtgcattgtagaatcaccctataattattatgatttatgtggtagttggcaaaaaaattaataaattatgccaattctaacatttggatattgttgagatgaaataagagaagttaaaaggttataattaactacttctttgtacacatgtgtataacaaattaatatacctaccattaatatatctatgtattaatatttttagtgaaactctattatttttaattaacacgtagcaggtgtatatatatgtatatactcatttatatatctataattattgagggtcctacactactactactaccccatcacaaaaatatatatagatatatttataagggtagaaacagaattgatatcaaaagagattatactaaggtcaaatcaaatcaaacttgttcccctctaataattttgtaaggcatacagacaaagtattaaaggttatgatgaataaacccctacaactagctataaagtaaccaaacaagaaaatctcatcaccatataataatataacatattttagaaatagacacaaaaacaaacaaagcatggcatagtactctatcaatgttatatgataataatatttaaaattagggtttaattgattatgaatagaggtagcaatttgtgttcgtgagtcagcttaggctttataagtaaaccaaattaaacccatttattaatagtgtcacattctatttagagctttaaatgtaacaatacacataccttaattcttgtacaatgatccttcatgaaccacttagaatcatcaactatagttttgtgtagagctaaaggggatctaatggatagcaagtccttaaataccctataagggggtaaaatgaacatgtttggagcttataatactagtggtggtggactatgattttaataggtctaattcaaagttattagggtgctacctgtctcaaatatcattaactaaatcgaccatctcattatagttctaattacacaataagcactataccctgcatataaaatatacaattattcttatatactaataatactgtgtgaaataataacattgtgtgaataataatttattgtgtaagtccatataaaatattttaataatttttcacctggactacataattaaactaataagtattcacaaaacaatagtgtgtgtaagcaacaaaaaatttcaagaaactcaaatatctgtaaactaattatgcaccatactgtaacgataagatacaaatataatacataatgagacatttagagattcacatgagcataaatatgactattaatatggatccactcataacgtagcacaaaaactaagtctctagctcacatcaacaagtgtgcatatacaaaatataaagagtgatccataatatcacatgtattcaacaaccaattgtaatctttaacatgtctatcgtacataaaattggaactcctatcgaccaaatacatcattggcacctaactatctaattaaaaaatattttcttagtacacaattttaggtgagtcgtgttagtctagtcgttgacatgttatatgtaaatgctagttatgatactaatagaggactccataactttctcattacatatgagacgttatcattatcaatagatcaacaagactcttaaagttccaagagaaagatataacttctatattcatcacataggtttagtaaattcacattagagtcgactactcttgacattgaaatgaaatatcgcaattatgatatacaatcaatcaatgttctcgtaacacgccacacattatacctttacaaatgagaatgttgtaaatgttcatgcaacacctaatcacatataactccccttactaaatactcgccttttatgagagaggaagttgtaagtgttcatacatgacacttaattcaaaatagctagctcttcctagaatcattaatgtttataagtagattttatcattcatgcaacattttcaatcgatatcaccaaaaccaactactatgttataatattggtttgttgatgactaacacatcattggtactataagggtgacaactcaagtacaaatctagcatgcatgcaacagatattatgataggaatgcatatacgtgagtgaactctagactgcctttgataagcatacatatatatgtgagataattttaaaattgatctctcgtcattactaatatacatagactttaggtcattcataacacatcacactttagacttaaaaactctcaaagaaaacaaaacattaatcacaacagttgttagtcaatgcaaactataatctcatcataaagcatttaaatattcaaccatgtaaggcttatcaagtattcttcatctgacatatattatcaaataacgacttaattcatctccaaaatagatcaaaatcataaaatatgagtaatatattatatcaagtgacagtataaacatatcattgctccaactgatctcttatatagtgttgactaattaacgataatatttcgaattgactatttttataattacagaattattatcttgatgcccttcatcaaaatagatttaatctactgaactcgggtttccttgtcagttacattcatcaagccatataataagatatggtct

SEQ ID NO: 228937 - DNA, 2026 bp, Cannabis indica
attggactagagtaataattctgtctacaatactacactgtttgttcttcagtcttacaacacttttaaatctctaagtaaaattttacatttaatcctattaatataactttttcttgttcaaatttaattgaaaaacaatacgttgttcaaatcattagcacaaactagggttaataatatacataaatctatggagaagatgataatcattatcgctgcgcgtacatacttacctttctagcaataattcaagcacatctccttgaaatttcaaacttcagaattaattcaaagtaagagatgaaagaaatcggaactcttctctcgttaaagtatcgacataaatttcaagcttcagtaatcaattcaaagcaagagataaaacttaagagctgagatacttctagaccattattgccattattgcaaagtaaaattaacaaaaaattaatgtaattaagagaaagagtgacataaaaaaacaaaaagaaatcaaagctatgatgatacatagagtgagggttggagtaccttaccttgccatggctaataagactaccaagatttattgtgttgtagagaaattgaagacagcgacgaaaattagagagagcgatggggagaagaaagcgacgaagataggttgctatattttcgatgtttgatttttgtttatttgaaattagaaattgctctcagattttttttaaaacttaataaatatatgagattattagcgaatggtcttctagtgaaagggtccttcatcaattttgtacaaaacaagtcgaagcaaggagggaggagtttttctttttgagtttgaggttgttccattttttgggggagcttggctttgttttttgactttggtttgactttttcaataaatgactcattattcaaaagaaaaaaatgagggaggagtttagcttttttttttttagaaaatacattcaacctattaaaataaaaataaactaaataatagtataataattttaaattaaagttacaggtgtaataaaaatataattatgaaattatgtgtatgattttaaattatgaagagtattactataaaaaatttaataatttaaggacaacaaaaatattaaaagatcattatttagtaataaattataaaaattaattaataattataattataattaatttaattttaaaatataattaatcttaagtaaaattttataagaaaataaattattatgtgaccatcaggttataagttaattattatttatttttatttaatttttaaattaatcacaattatttaatagtaatccaatagctaaaaaaatgtaattatgatggttatatatttgatgtaaccattaaaatctcctcctttaaattaaaaatcaataaactataatttcaaatcgatgttttcataattttaatattttaaaattatttaaaatatcaaaaaattatttttaaaattctttaaaaagcaaattatttttcttaaaaaaaatacataaactaaacaagaatataaaaaaacacgtgcaaaataaagcgttgctgattttttttttaaaaataaaataattatatacatttatataactaagtgactaaatcaatatatttatatttacatataactagttggaacaacacgtgcacacgtgctatgcacgtataattttaatgtaccatgtaatatacttaatagtaaaataaatttcacttagcatattcaatataaaatataattatcatatggtcattagtatggcactcacacgataatgatgcatcatctattaaagagttgcataattgtatctctaatggcgatgcatcaaatatgtgatgtgtatagcttatcttgtaaaaaatttgttccaacagtattttaaaaattgtgccaaaaatgatacattgcaaaaaaatatactaaattcagcacataatatagcataatctaatatttatatcactataaatacactactttttcatttatttttatgtttttttaata

SEQ ID NO: 228938 - DNA, 1226 bp, Cannabis indica
gatgttaatgaaacatacttgttagtaaatctacatcctggtaaaatatatccaacactaatcgtgttgcacatatttttttacctctagcaagtctcagcttcatcctgtagttctattttcaataataatactcgtaattctgttgttcattgtatcgctgtccaaaaatagcatttacacctgggacacacttctatacgaattataaaatcatggaataaaacattgaatttttttattctgattctcctatatctccttgccatatttgtcactgagctaagcaaaagaaactttatttcaacttagctaacaacataaaaactgttctattttatttaatacatctagacatatgggggccatttcatacaataagtattgatgggtatagatactttgtcaatattgttgatgatcacacaagattcacttaggtttatatgttcaaaagcaaagtagatgctcaaacaatcataccacagttttatgctcttatattaaaccaattttctacctctataaaaggcatcaaatgtgacaatgcaaaggaactacacttacaatccttctttgcaacaaaagttatcacaccatatcattcttgtgttgagagagatcaacaaaagtccatagttgagcgtaagcatcaacacatattaaatgttgcacgagcacctgccttccagtcacgtttgtctctcactactggagttattttatgcatgcaactgtctatctaatgaaccgaataccctctattttattacacttaaagtcttcttttgagttattatataacaggttgccttcctatgaccacttacgggtcttcggctgttgcctatgcatccaccttggacaactcacgacacaagttcagtccacgatcctggacttgcatattcattggatattctgctagtatgaaagcttatacattacttgatcttaagactaacaaatttttttactcttgagatattattttttatgaatacaattttccagctaaaagcacatgttctagtgcaaccattgatgcttttttaatctgctaatgtttcttctagtgttcatcctcatgtacctaacattgtaccccaagccaccctatccgagccacccaatgtcgtgactccaaccaagacgagtgtccctcctccttccaaatcaaaagctaactgtcccattgttttcccaaatcacctataggattacat

SEQ ID NO: 228939 - DNA, 1038 bp, Cannabis indica
taatacttagcagtatgtagccttgataatgtgaagtattatatcaaccatgtcatatgtaggtagagtgtgatacttggcccataggagtgtaggggggtaagaggtatacccctagatttttccatcaccttgggtagataagttaccttctgggcaggagtagtagtgtataccccctacactaatttgactccattggggtgtggtgattgtttagcccattgtgaaagtactcatccaccctcccccgggagtagccaccttgcttatgctagggggagaggtgaccgttaaacttccctcctaacggttgtgactacatgttcttcattaactcaattttgatatcctcagatcacgtgtcatcatccttgccacatcaccattatcaaaatttaggtaaatatttgccctcaagtttatagcagtatggctataaggtagaaacttgtatgtgtggtctgtgcttcaatcttgttgttgatgacttaatgatgaggtgtcaagattaccatgcttatactagtaattacatttcaaacgcaacaaatatctttcccactctttacatttttacaacatcaccccaatgataattttccctttacaagcaaaataaattacaaggccacaaggaagtaactctttgactttaaaagaatttttccacctcgaaataacgttatttttcaaggatttgaattttgaatgaatgaccaacactcgtttccctattgaaaactcctcatttgatttctttttatctcgaggcttctttaatctctcgattaacttcattggagttacaagactcaatcatattgcatgtattctcggtattggattgattaaaagacttataaatgtcaaacttgatttcttcatcattagcactcaaggttaggtgacctctttgaacatctataaacacaccaccagttgctaagaaggggcgcttaaggatcaatggtatgtccttgtcttcttccacgtctagtactacaaattcagttggaaatactaacttacccactt

SEQ ID NO: 228940 - DNA, 2179 bp, Cannabis indica
ctatcatagttcgggccactatttgattcgcaatctatacttccatgaccagggggtcgttgtgtgagaagtggacgtgattagcagatgcttcagtgaaagttattatgcgttcccctacccgaggtatttttggctctctttcttctatggccaaaactgtttcgtttgtactgcaaggctcgggcatacttttctcgagctttgtctatgtctccagcaggatgtggaccctcaataataacttgtaaatgcccatccactagtggaggcatcaatcgattttggttgttgtttgtgggaggccttcgagttctggtcagccttgacataattttgtaagtgcgggttattcttcttgatcaaaagttcaatttcttgcttcaggttattgcatttcttgcttcaggttattgcatttcttgcttcaggttgttgcattcgttggtgtaatggccttaatctacgttaaaatggcagaacttggatgtgtctcttttactcacgtccttcttcatgggagagaatttcttgtatgggacaatagattgagttgttgcatatattgtctctaagttttttattaggacagaataagcagtaaactttgaggcattgtccctaaggtgttgttcgacatttcctacaaacttgcctttctttccgtttccctgcctgctatcgttattagacctcttcccattcgagttcgaattgccaggttactgtggactctgagcggacgctcgtaccgagttgctacgtggctggctcttcttttgtccgacggtgtccacacatggaaaaacttttttgagcttaatacatccatctgctcggtctaaaaatttagccattgatcccacagtcagcctcttaatatccttccatagttctctaagtggctcaacgccccctagtataacggccagccttcgttcttcggtccaccccttaaccttgctagcctctgtcacatatctacttatataaactctgagggtttcccctggcatgtgttttacctggaccagatcttctagatgcgagggaagttgatggcaaaaggaaaactgcgcatggaatttcacggagaaagcattccacgaattgaacctcccttgaggcagcttgaagtaccattgttgggcagcttctattagggttgcttggaatatttagcatcagacatcacctcgtaccccttgcagatccatctgcattccaaaatatttcagatgttaatcgataagtatgctagcatacattcatctgtatccattataactctatgtatgccaatacctctatttcaatgtaatcgaacagacattcaaaaacatgcacgctaaacatgtaatcacatatacatatcattatattaagcttacctcgattccaaattaaggtgtgatggttaatctgaatagaactgcagctcgacagtttacaggcccctaagtcacaacatacgcaaaactgataagcgatacactaaaccactttctagggacttaaacgtgaaactaaaagttttcttatcgataaataccatgactaaaatctaaatatcgagagaatgttgaaaaatagggttttggaaaaaagtacccaaaaaaattgcaggtccccattgtaaaaacggtaggccatttttttgagtttttttgcctaaaaaaaacgaaggtcattttcccagaaacggcctgccgtttttacagcaaaaaaaaacccaaacctcaaaactcaacaaatctgattccaaacattacaaaaagctctaaagcacctagttgtgttataacaaacataatccaagtgaaaaatgcatcatcaaacaactaaatcaaaatctacaattaaaatgtaagtttgagcttaaaagctccaacctagctcaaacaccaccatagtacaaagccaaccactcaacatcatgaaaacttcaatataacatcagaatcaacactcaaacaaagctaaccaaaacaacaactaaccactactacaatttggacttttagtgacattatttagtgactcgcacttttgtgagtgtcactaaagaattaagattagtgacacgcacaattagactctaaacttttagtatcagtctcttataatatgtgtcactaagaatatgaggtgtcactaaagaacaatacccataattttt

SEQ ID NO: 228941 - DNA, 2116 bp, Cannabis indica
ttgacaaaaactggcatctaggctagaaattctagcacttcttgccaaaacatccactgcagttaaaagttcacgcttaacaaaccagaaattacaagagctaaaagttttaacaatatctaaaattgcataagaaagatgagtagtacgccaatccgggatacaaacattttttgcaaaagctgaaattgccacttgacaatccgagaacaggacaatgtctttccaattcagcttggaggcccacgataaaccatatagaatggcttgggtttccgcatcaagagccgacgacgatgtcacacattgagaagagtagaaccaggtattatcttcatgtttgactaaaataaccgcaatccctgccttaccattacaccatgaggcatcagtaaacactgaaaatcttgagcatgtaaggctagtgcagggaaaggactttttggaggaaggaatgctggtgcaaggcctgattatatctgaatattctttgaacatagcactcacacgagaggaagaaataagcccatcaggaattgtaagtttgatccttgatttattcctttgcctccaaatttcccacgaacatgaggcttatggatagggagattagacactaagttttcaataaattgaatgatagagttacccggtatcacctcaactcggatcggaaattcccccagaagccagacaaccttagcaaacggacaatctctgaataagtgaagagatgactcatcgtttcctccacagaaacagcaagctttatccgagatgaaagggagtctgcctttgaaagggaaagcctcattcagaactctccacaaccaggtagcaatgcgaggatgtatactggggtgccaaatccatttccacagcctacacacaggttgaaatcggtctaattgatcaacaatatacgcatttttgacagagaatttaccgttttgcgtgttcttccaaataatctggtcttcatgtgcctgtggtagtctaggaattgagattattttctttcccatctcttcaccgaatatctgcaggacagtttgctgattccactccctgccttcagatacatctgccactgttttcgcagtgtagccccttcctttaatgctccccatgagatctttaaactcattataatttaaccagggaatccaaggaaggtgccaaaaatccacagaacacccagttcccaaaattgtggaaactcctttcaagattgtgcttcttccctggacaatacttttccaaatggccgaatcacagtcctttgattgaactgtccagaagttttgagatgaacaatatttctttgtgagacattcaacccaaattttattttcctgagttgcaataccccatgacagcttggacagaatggcattgttggtgtcttcaaatcgccgtaggccaagtccccactctcctttggttgacaaatttgatcccaagacttaagcgccataaaacgatccttctccttattcccacaccaccaaaactttctgaccatcgaatccatttctctgcacgttgtcacagggaccctagatgtcgacatcgagtaaacaggaattgatgcagtaatggacttgatcaaaaccagtctacccgagtatgaaagaaattttgtcttccatccttctaatcttcgcatgagactctctttcaaccttaaataatcatcttttcttcttcttttaaaaataaaagggttacccaaatatctttcatccccactagcttgattgatatctaagcaattgaggatggcttgtttcttgtgactgtctaagttcttggagaaaagaacattagattttggcttgctgcatacttggccagaccaagattcgtaccttgccagacagtttaacatttccttagcctgtccttcatttgctcgacaaaagagaatggtgtcgtcagcgaacatcaaatgagttatcgggggggcattcctagagatcttgatcccatgaatttttcctctgttttcctccttaataagaatctttgaaagaacttcttgacataataggaaaataaatggggacaacggatcgccttgacatagaccacgatgaggatagaattttttaag

SEQ ID NO: 228942 - DNA, 873 bp, Cannabis indica
ttcttggataaatgatactcagaataattgtcttcaactatatctgtactccatttcagaatctggaccacccaaaactttgccataatgtcagaagaaaagaaaaacaattgccctttattattaaccatgttatgtgccatcagaagaactactgcagcacaattttagcttagcttagccgcaaaagtaatgcatccatctcataaactacaaagctctacataatagaaagaaaaggatgaaattccatggaaactagaacagacatcaccatctaataacatcttacagttacaatggtaaaacatgtgccaactatgatggagcaccgaggtaggaagcgagacgcaatatgtcgctgaagactccaccagctgtaacttgagcccctgcaccgggtccacggacgatgagaggctgatccttgtaccttgtcgttgtgaaagcaattatgttatccgatccagacaactgggcaaatgggtgatctttcttgtatcttcgcaattttacttcccccttctgattaaccacatccactactcccacgtatctcagtacctacacattcattcatatatcgcaaatttgaatggtgaaaaaataattatgaaaacgaaaaaaacatcaatctaattaattaatatttctgattggtttcaaagagcagttgtgttttattatatggtaaaaaatcaaagactcacatctccttcatcctctgctacttgtcttttattagccaagtcgtaatcaaattctggcaatttttccatgaattcctcagatgacgcacaagcctgcaatgaattatcagaaagtttcatgttgcacttgcatgtataaacttggtatttaagtcaatgctgg

SEQ ID NO: 228943 - DNA, 2292 bp, Cannabis indica
cttgctcatatgcagcccaagattctcgatcccatttaatgagctttgagggggtatttatagtgttttggtggggtaatccctagaattgttcttacaaacgtatctgtaagtatccataaagttgggtattcccaatgaatataccatgagtaatgcatggtcaaatccctaggtgctgtagggtttttatgaggaatgtcctttttgccttgtgattgatgtgactcttcgcagagtagccgtcgctagacttaaatgatcattactgtggcgctgctgtttggaggttgtgccgtcagactttattgcgtgttgcagtcccaacacgcttcctcccatgcagcattaaatgcgacttgattgctcaggagaagcctgacacctcacggagaggctttatgctatgcgagcttccgggagcaccttgcactccgggtgcctcctccgggacctatgcccagggtgcttccttgtggcatacaaagacttagcaaatatttacaagttatctgatccacgtgtccctgttcgattggtccacgtatattgggtgaaatcaggggcaacatataataaggaaataaataccacttgcctccgttgtaatttatttagtaataattaagttttaaaattatattgaatttttaaatttttatatatttatatatttttgataataatatgagtaactattaactaatttttttttacatttaataaaaataattttatattgtaaaatgtaattttttaattgttttgagcttaataaatatctttctattaatttatttattataaatatatattattagtttttaaaatatatacataaattaaattaaaattaaaaatatatttataacaataattgataaatttaagaaaatatttttaaaactattgtcattatggtaattaggagtcacatgggctgggttggctaagttaaatgtgttttaataggctaaccctaaggggcggagccagagtcgaaattcgacaagaaccaaattatattataaattaagtgacagataattcaaaatatattattaatattataattaaaattaaaatacaataggtctctcttagatatcatgaaagtcatatataagtgaatttatgctaatttttttagcaattttttttttctatagacactaacaaacaatcacttaaaaatatattttttattttgttgcgaagtgtatcttcactatattcatagtggaaaaagattaatctgtagtaactgtagaaactggaagtgtagaataagagttactattttatacacaaatttaatttttttttacttttttagttttttactaactactgatataaataaatcagaaatgattgctaaaatagttaattaagaagttttccactttcttttaaaccaattttttgaaaaacattgtgaagtggtaatggtctaactagcaaataaaccaaataaatattattaaagattataaataaatactttaaaaagaaagatgacacttattattctatttataaaggaaagtaataattgtatatgattttgttagtgctatatagacaaaataaattttattttcttcaaattttactttgacttttttaaaagagctaccatgtaataattattaaaaaagttcaattacaatatactaaattttaagacttagaattacatatacttctggtagaagtccatagccgcaatccatctcaagataatctgaaacttgaggccgatatacttctcgaattggaagagattaggaatagagaacaggaaattcagaagtagaaatctcaggagttgtggctgaaagacggagaccgcaatactagatttttccatgcctccacaattatccgtcggagacgtaattttatgggagcgatctctaataaaggggtcaactagattacaggccgcgagaacattgggcagtaattctgtaacagattcctggatgtgttctcttcgagtcatcccgtgctgaaccagggagactttgataactttaccttgtctgtgtcgccttctgagaacttggaattggtgcgagtccctagccagcgtgagattaaggaggttgtttggtctttaggctctcttaaagccccgagtctggatggtatgcctggtcggttctataaagcacattgggatattgttgaaaatgatgtttgtgagactgtcatccaattttttcaaactagggagtttgttcgtacgctgaatcagacctttattgttctcatcccgaagagaga

SEQ ID NO: 228944 - DNA, 514 bp, Cannabis indica
tcaggaaatttttggcactgtatatgtgtgtgcttaatttatgtaatgaactttgttgccattaatgatttgcattcatctaatccaagtatcataaaaaaattagtttttactggaaagccatgtaaagatgaacatgttagtgaaactttatttggttttaggaatatagttatgggaacatatgcattttgtagaagatttgggcacttactttctccctacttaatatcagttcaaattaatcattgtactttacatttaaacgtatgaaagtttcaaggtttgtacagttgaatcatatttagtttaattcaatgatatataatccactagaatcaatgttagcaatttgaaatctcaacagttgcgaaaaaaatcaaattcatggagatgtgctatatatataaataaagcaaaaactgtatttctgctgatttgtttatgaagactcagatcctaaaccagatcataaaatagttgaaaacagttgaaatggatattatattattat

SEQ ID NO: 228945 - DNA, 2154 bp, Cannabis indica
ctaaataaaatccattttaatatgatattatttactaattaataaagatcgaaaatcatgttacttagttcacatgtcaatttcatgattatatattttttaatatataaattctattaaatctggaacatattgttattcatgattatagtgttatctgcacattgaaaataatcatgataatatgcttcatactatttagtccaatgatatatcagtatattggatttacactgatatgataatcagcgacgtggtttgtttacacggataagtgaaatgtcttttccaggctggcattggcaaattggacttgaccgatattaacagtggaaagatattataaacttattgttatatcttttataagtcaatatcacttagttgatcttacgacaaattatttcaatcttgagatgattaggttctaactttattgtactatatgatttctttgacttgttcgttaccaacttacccgtagaaataacccatacttatatctttagaatttggtggtgcgattgagtgggagtgttcatcataaatatagaatctatagtttttataactatttagaagtgaaacgacagtttccttagcatttggcttaacgaaataaatagaaagctcttctttaagtaattatactagtttgttgaaatatcatttataagtagctaagtattttaaagataaaatacattgaaggataaaatggtaaattttgttcctactcgatgtaaaccatccatagaggattgatgatatttatattgaaataatgtataaataatcataacatatctatatttttttttgataaatcagagaattaaattgcacaaatcaacatttacaacttgttagcaccccatccagggcctaaacaatctatacacaattaatctttctatacattccacatctataaagtgttgaaccaatctctatctacatctttgatctttttaggcaaaaataaagcaattcgtatctttacacaccccttaatttccttgattattctgttggttttaaggcagtagcttgccaaaaaatagcatttctaggtctccaaatgttgtgtactagggctgccaatgcagcagtaaaaacttgctttcgaaactttgaaattttagccttaccaatccatcttaccagctgtgggagattgattggtcctgcattccaggttagccattttttcatctccaagagacattgaagagcaatactacattcaaaaaataaatgcagtctggtttcattctgaacatcacataaacaacacctctcattcacttgcatcccaaatttcaccaatttatctttagtttttaacctgtttagcattgccagccatagtatcaaactatgctttggggtattcaatctagcccaaacttcttgacacaaaaataacctgtttgaagggggtgagagcagcttataaccagtagcaatagagtatttttgcctctgaaaatttgctatatcagttacacttttgagttggtctttaagagctaccatcttcttccaataccaactggcatgaatagaagttgagtagcttcaccattcctgtcttttaatatacacactatgtacccatcttagccaaagactctcttgtttattagaaatgacccaaatatacttatagatagcagccttattccacacctcaagcttttttatacccaaatcacctgcattttttggctggcaaatgttctcccaagcaacagcaccagacccatggaataaagcttggcctttccataaaaaaaaagctctaaaaatagcttctatggaattaagcaccttctttggcataatcatcatctgactccactatggctgaatagtaattagaaccaaattgatcaaagtaatctacctgcaaaggataggttccttgagctccaactcttgatcctagttggcattctttcagccagcaaatcacattctttaccagaaattttctttgcacatatagggatcctcagataagtgaaaggtaatgtttgcccgagaaaccaaatacgtgcataatctgtttcacacttgcttcatgcatgttgctgtaataaattgtagtcttacttgcattgggatgcaatccaaaagtgagcgagaaaa

SEQ ID NO: 228946 - DNA, 1306 bp, Cannabis indica
tatatatattttcattttcatacattataattatttagaatattctcttctaacaaagaaaattagtgttcaaacaatttgtgtgtgatttttttttttcttaatgtctattacaatcatggctatttatatatggaagtgttttacaaataacaatttatttctacaataatagttactaaatggtaacggaaaagacttatagtaaaaagttagttacttgctcacatagaaatactgtttgtagcagcaaaatgattgtagaaattaaagattgacacaagagaattatatgcggtattagtattttttcgaataataaaatcaattaataaaattacaaagattacaaagtttagaatccctctaaagatttgtcacaatcttttgtaatccccttgtctaatattaccttcgaaccgcatcaaacagtgaaattcctttaggttttgatgtgcatactcacttcctctcaaagtgagtctttgataagttctcatgaagacttttctctattcaagacaactcttcaacctattctatgaacagtaaaagaacactattacaaaataaacctaaacactctaggtttttacacaaagaatactctgctcacaaatatagagtatgaaacttataacaatagaagatatataacgtatgactgctttttaggttatatttataaatcataaaaacttttgagacaactacaaacacattttacagctgttaaaaacattccttaaaaaacaaaattactcttgaatttttcaagatatgcagtaattaatagcatcactagttgatgtggtagatcaatcagaatcttattttgttttcatatatatcatagtcacgatagcttcatatcatatcatgtcataaaaagaccacacaatttgctataacaaattaatttttaccacatataaacatattataaaaatattcccataaagagaattatgtaaatatctcctaataaaaataaattagtcataaacacagaataaataaaaacaatatttttttttcatcaaaaatacatattaaattaaataatattttgacaactaaattatataaaaaaaaaactttacgacctccctttttgataatcaaaatattttttaatttaaaaatattcctgcaaagcaaagttagcaagaaccacgtacacaaaaatacccatgaaaagcacacagaaatcataacaaaacgttgctaactttaccaaagtttaacaacacaaaacagactcaactcctcctggaaaaggatccaaagcttgaaaggccaaaga

SEQ ID NO: 228947 - DNA, 1683 bp, Cannabis indica
tgatattgtgatgtggtagatatgtaaagaaattgaattgtttcatttaaaggggagcagaaatgcagaaatgcaaaaggaaaaagagaagcagagttcaaagaagaaaggatctgaagcaaaaactcgggaaaggaaagaacaaaaccttaaggagctatgaaagcgagaagaggaaagcgcgtaaaggagcaaaagagaagaccccctcattcgaaaaggaaagctaaccatcattcacgcatataaatagaagaccccctcattcgaaaaagggacaaattcttactcacactaaactagtcgaaactctgtcggaatacatcctcaagaacacttcgagtatgggaagcagacgacccaaacaaaattgagtgaattgataggaaaattgtgtaaactgacagagatattattttgattagaccgaacctggtgtaaaaaattcaaaatcataatacaatttgttgttgagccaattttcggcatcaacatagaagtataagataaatataagttttgacttatttttactgtttggataactattatatgaagatttttttttaataacaagtacttttcaaagtgtttgtatatcattaaaaataaatttagtaaattaagaattatgtaaattattttaattttaaaaataacttcttaaaagtctttttgagataagctataaatcctagcgtcttctaaaaagatttttaaattggggtttttacaccacatactgaaatttttaattttttaatttttttattgtggggtggatttttttcaaaaatattatgtaagttttatagtgtgtactgtgttaagttttcacggttgttccaccacggttgttttaattattctgtgttttgttgttttatggttgttttataaaatgagtatttttgtaaaaaattctatataatattaaaattgtaaacttttttaatttagtatttttataaaaaccacttttaaatttaataaaaaaaactttttattcttttatccaaacacatttaaaaagatttttataattctaaaaggctaaaaaagagtttgtagccaataatgtgagcagcatgtcctataaataacacatgaacttgctgtttaagtgaagcccaaacccacctagaattgttttaagttttaactagtgttggcagaaatatcacatgtaagtgagatgggtttgatacgtagaagctcaattgtcaaatgtatcaactaatagaattacttacaaaaataaaaaatattgaaatttgattattttacaaaaatactgtcacacggaaatcttttcaaaaatactgtgtttttataaaataacattcgaatacaaaacaaaacaactaaaaacaataatggaacaactaaaaaacaacagtaaaacaacaatgaaaacttaacacagtacacagtataaaacttacacactatttttaaaaaaaatttcgcgccgcagtataaaaattaaaaaattaaaaatgtcagtacgtggtataattatcctcaaatatgctctagctgcacttttattttgacacttctgcccattagtgtctcacccgtttgagaattgagacagcgtgttctactaggggtgttcacaaagtatccgatccaatccaatccgcacgatccaatccaatccaatccgcaaaatgcgga

SEQ ID NO: 228948 - DNA, 1801 bp, Cannabis indica
gtaaaattcgctaaataactaacaatacgaaatactaaaatttacaaaatagttttacttaatttactttatgagaccatggtaatcgcacagtgtaaatttatggttgttttgcgccataaaagttgttatgatcgcacttttgtagtcatacaaaattatttttttaacaataagttttataaatgttacttttacaaaacacctatgccactaagggccgaagtctacactttagatttagaaaaaaaaaattccaatttaagaatgtgaatcaagataattttgaactattgatttagaatattgttttgttcaacttgattaaattgtgatatcttatactcatatatttttccatcaataatgtgttaaattcttagacttaaaagaaaaacatttgtattaagttacaaaatttacttcattcatatactgcagaagattctttttcttagagaaaaaaatgatcaaatgcttattaaagaaaatattttgatatgatttttttactagaactttaactaaaattttcaggatgttaaatggtaaacattaaaatgtttgtggattgaaaatgtgatacatcgaattttatcaaaattaggatgttagttcagttagttgagtcggttttagtctgttataacctgttaatttggtctcttgattccgttactgttattacttctgttagtcttgtttggactaaacttactgctatatatacatagctcttttgtatcagacacattacagtaataagaatatacagagcaatattcagttgctcctttttctctcttctcgagtactctgtactctttttcctcatatggtatcagagcaaaaatcaaacaaaaaaaatctcttcccacctaaaaaaaacccgatcgaagtagagccaaaaaaaaaaaaagagccaccaaaaatctaaaaaaaaaaactgattcaagagccaaaaagtaaaaaaaaaatgccacttgtgattcgaggatagtgagcgaaaaaaaaaaagagagccaccaaaaatctaaaaaataccggtccaaaaaatagagcaaaagagctacttgtgatctgggatagtgagtcaaaaaaagagccgcttatgatcgagttgtccaagatggtgagcatataaaatagccgccatcttgagggggatgttagagagtcccacattgccaatgtgtggaaagataatagaatatataagaggaatgggctactcctcccattgccaattggttttgagatggaacctcattcatcttattccccaaattctaatatggtatcagcagaaaaccttgccccttcatccatggcacaaccctccacacgctcacaagatggtcttcctccatccacaaatgagcacaatcctttggatctccatcccgaagctacttccgcaccagtagccaacaactccatggctccacaacgtattccaacttcaagatccagatctaacaatgaagaagacaactctgcaccagtccgttcttctccagaccatccaaatcacaacaactctgaacctgctgtagctacacgaagattgactccgcttgatcgattagctcacgacgacctctccagtccattctttctcagcacaatagatcatccagggctcattttggtctcgacagtcctcaatggtgccaattaccagtcttggaaaagaggcatcacaatggccttaactgcaaagaacaaatctgccttcattgatggttctctccctcgacctgtgattggtaacccccttcttaattcttggaatcgttgt

SEQ ID NO: 228949 - DNA, 2692 bp, Cannabis indica
ttttgcccttgtggctatataattggctcactttgtaaaataagacaaaatattgaggcgttacagtcagttttagatgtggatacttggtttctaacaatttttatttttgaacactattttgaatcttacaatgtgttcggttattgcttgagttttattgccatgatattttagtgtgtagcctggcattttgtatggatatataacaagagatgacgagatttgtatggatcgctaaatatagcttcttgcttttgatgttactcacatggtaaacaaagaacgattgctagtgcttcttattctcatgtttaagctaaaagtttgaagtaccctttgtttttaggaaatagtaatttttggttacttgctgtttttgtaggaagagatggtgtaatgccctagtaaaaactttcccacaaactaaattttattattggagatgctctaatgcgccagtaaaaaatttcccagtcgagtaattgtagacgggcgaggaagaaattttttacgtgtttgaaacaattgtaggcgcattagagaattttataaatacgcctgcaaaaactttaattcttgtagtgtattaagttatctaatcaattacttgttattaatttgttattaattaaatggaagtggatcactttgtcatagatttttaaatattatataatcaaatacgtgtatatttaaaataaatattcggcgcgaaagttaccttccaactactttcttcaatttaataaattcaagtatatatatgaatttaatatattcaagcatacatgaattattttatgaatttagtataaaaaataccaagacagccaaaagcttacgaaaccaacttgtctagtagtaataggttttttttttttttttttgataatggaatttgtctatatagtatatagttattccgagttatatctatataatatatacaaattaaagtaaaaaacatatggtatatatggccattaatttacatattatatatgttacagataaataaaatattcattcgtccacaaacaattttcttcagaaatgtatatattataggcactttcatattattttattattattattatttttcaaggaagtctccctatatatatacgactcaatcaatacgttcaacaataaacttacatattattaaatataagaatattccaatcaattatttaggtataaacaccaacgaccagattttattcaattatttcattgaatataatacatattagtatgacttttatttattatttgcttgctggttaattataatactgtacagcgcactgaatttcactttcttttatgatcaatgtataaattagatcgaaaatattttaacctaagtaaactataaagtcattatatattcctatattacaaacataaaataaaacaataattggccggtcaaatgattctatcaagtaatcaatatacaatacaaaccgcgtggtaggttacactctaggtcatgcctatatttatatatgtatgtttaatatttctgtaatattgatttataatattttaagttccatacttcgtgttctgtaatcatataaatacataacatatgtagtacatacatacatatcaaattaagaatatgtgaccataaaataaaatgtcagaaaagccatactggttattacaacatggggtgcaagatttaatcttaggagtaacagtaggaattgcagttatactaacacaactccctaatgagaaagtaaatggaggattagtcccaataattatatttaaggctaatcctcatcccttccatgccttcatcttagctctcaatttcgcctttttcggttcgtttgtaacgatcaatcttcgccaaaggaatccgaaaatcgcaaggttttctctcctgttttccatcttctctttgtctttagtatttacatacccctttgtctagttttatttaccttcttttgatcatatacttagtgtatattattattcctatagtctgtaaaattatatatactaataaaagatattattattattattgtcacaattttataattttctcttaattactattattattattattacatttaagtgttgcaaaagtgtacatgattactgtccttgtttttctgtcagttgtgatgtggcttttgtcaaaaataaaaataaaaatacatgatgtgtttatttattttaaacatttggtttgagttaattatacatataaattacgttcctgttaatttctaatttgcttacaatttcaccattaattacaagtgatccctctacaacagacttctgatctaaacataatatatatgatatttttgtcaatatatgtatagagaggattctaccctatatatggacgagtaaatatttctatttttacatttacataaattatacatatacatataacaattttgtatattgtaattatttatagtgtctccaacccacaaatgcggtttttccgattttgtaaaccatacccgcacggtgaaattaaaaaaccgcagaaactgcaccgcaaaaaatagtgtggtttttgcagttttttgcggttttggattatcactcataattaaactatcaaaaatacaacaaaatttgagcaacacttgtcaaaaatacaataaagtttgaaaataaatataaaaaa

SEQ ID NO: 228950 - DNA, 1720 bp, Cannabis indica
attgatgcagttttttatcaacagatataagaagatcataaatgagcatgacaaaaataagaaattgttaatcaaagtgaacttgtttgtgaaagaaaatttgacaaagacgaacacgaggattttgtagtggttcaccccctttcagcggtaatggactaatccacttgtaattttattattctcaatgcttgaggatagatctttagggttatgttctccaagagtttactctccaaatgagtttttggagtaagacaatgggagttcgtgagaacgagtttcagtgtattcagagtgttctaagtgtgtcttttacaattgatatcatcacctcctttatattggtgttcatttaggactcacttaagttttttctccgatatatttgcctcccaactactgtttagtcaaatttaaagtttaaaataataataaaataacattttaaataaatatctagaaaaatgacaaaagttgaagatatcttatccattgcttatttttgtcatgaggaacacatgctaagatcgcgtgttgttggtaagtcatgagaagaacgtgaggcattccccactttgggccaagatgatcatctagggcctaggtgatggtgttggtcactacctagggccaagatgaataagcatgttgaagctcaagttgggccgaggtgatatcttctccttgggtagagatgagtgtcttggagccttcttgggccgagatgatcatctacgacctaggtgatggtgttggtcacacaccgcaggtcgagatgaatgaacatgttgaagtccaagttgagccgaggtgagtgtctcccctttgggccgagatgagtgtttagggcctatgtgatggtattagtcacccacctaggaccgagatgatggaattgtccccttgattggttttaatagtattggggggtcacccatgagtttcttcaatgcctaaaatgtttattcacactcttccatccattcaatcttattgcttcctcacaataagttaaagaatggtcaatatttatcggtggacttggacacaaaccagttgagtgcaactatgcatcccatcaggctttagacattcttctttatttttaggaaaagaatgtctatcaatgcatttatcttctctagattttctttgataccctgtgagttgacgataaagccaaggaactttcttgatgattgccccaaacgagcacttaagcaaatttagcttcatgttgtatctttgcagtatagaaaaactctcttctaagtggtcaatgtggttcttggaaagtttagacttgacaagcatatcatctacatacactttcacgttgatctagatctgatctgtaaacattttatttacaagtcgctggtaggtagcaccaacattcttcaactcaaaggacatcatgttctaataatagagccctatgtcaaaagtgaagctcgtgtaatcctagtctcccatgttgatgggtatcatgttatatctagaatacacatccataaaagacatgatcagtacatggactgtaattagtgccgactagttgatcaatgcaaggaagcaggaagcaattcttggagcatgccttatttaagtcagtgaaattaatagatgttcatgttaaggtttatgctctgaaaagcctataaaaatatattttgattattaataaagagttgaatattttgatatatacatgaat

SEQ ID NO: 228951 - DNA, 2851 bp, Cannabis indica
ttagatgattctttcaaatcatcttttcttttcgtgtatgaaccactaggattgtcttctttagttgagattatactcgctattgccgtacttgtgccgtgtttacttcccaagctagttttcaacaactttgtttcgcttagccaacgaaaatgagtcttaattgtaagcgataagtgatataatatagatataatatgaaaagataaataaagaacacaaagtttttaaagagattcagccccgagcagttcggtaatagcctactcctcttgatttgtattgacttaagaacaaagaatataatgattcttctcttagagatcttacaatgaaatctctgagtatactctcttagataattcttttgaccctttgcccagtgataatatatcactatttatagggctatgagcttaaaagaaggttttccttttgtttacaatgtttataattggtaagattacacattacatatatagagtacactgattcagggatttggacagcttgccatatctctgtgatacgatcccagatttatagggattgcttttgtgcttcatgatacaagtgctgaagttgctaagtgttgatatgctatttgaattgcccactgctcggccaggaggacttcgtccgtgcaggtataagtggtgttttgttcggaatatctccttcgggtaaatatggggagtcaattccacgtgtcaccagcgtgtgatgccacgctagagtgcaaaaattgagataatatatatacatatatatattgattgatattaatatttatgaaaattaaaaattaaaaatcataacattttcttcaattttatatattgcttgatagcctactatttgatcctagctccgcccgtgctaataggttgtatatggaagatgggatggagttgccggcgaggagaggacgaagagaggcgcatgtacattattaacatttgaaacaaacttttcttggaagcttcacatatataattgggagcttgcttcgtttatctataaaaacgaagcatttcctctccgttcaatccaaagtctctctctttttctacgcgtggggcgtgtgttgtgttgtaacttttcatttcatagaggaatgttcgaatcctctaatatttaatctctaaatacaaggacataacaaagaatagtaaaacaatataaagataaaatcaaagcaacctccttataaaaataataacaaaaaacaaattaacaaagaaaacatttctacaacacaacgattatttatttatttttttcatttctttctctcaagtcttccgctcacttttctttttgtaaagattattataatttatcaaacccacaatttttctgtacccaactataaatatatacttaatattttcttgccagtctgcatcaaaatctatgaataattttacgatgttagaaaggagaaaaagaaaacctttggtcactttaatagtggtttttggtttgttccaactttgcttttcggacattaacagagcaagttttccgaaggattttgtttttggaacggcttcctctgcttttcaggtttgtacttttattgaaataataataataacaacgtattcatcttcacatcagtaaatattgacattgtggtgtaataaaataatttaggagatgcttaacaactaacaaaatataacttttttttttattggaattgttatttgtttagtatctatcccaatggtttgtcaaaccaaaaacgaattatatttgggaaagtggatttaattaaataggaatataacaattgtactcttatcaaaataatgaattaattagagaagtttctgaagagtgtgtgtggtggacaatttttgttgtatatatattatatgcttagtgagagagatatgtttcacattttttatttcttagttttgttaattgtgattgtggctttgctcatccaaagttgatattactactggtgtaaaatatatagttttctcaattcgccttgaacaaaatatgattggtctaaatggttaatttttatttcagtatgaaggagcagtgaaagaagagggaaggggcctttctatatgggacactttttcacacactcctggttacattttattttatacttgctccaattttaaatattagcatacagagacaacaagaacttatgcatatagaacattaattctgcaataattaaaagagaaatgttatttggatactaataatgttcaatatcatcataagatatatgcacccctaaaaaagtgttcactgatgtatcctttattgttttggcatttaaaaaaactttagtataatttttttctttttatgatttatacgttatatagttatttaagacatcttataaaatttaaaataatttataatatagaaagctgctcaaacaatttatttcataagcatttaaataaaattaaaaaaaaataatccttgtaacaaattgtttaaactctattttaagagtggtgcacccctttgaaagagcactatagaattttctctaaatattttgtatgattattgatgttatttgatataaaatatattttaattcaataataattacaaaaattactaaccactcttaactaactccatctgtttgttcgaaatctggattgataaaaatttatgttcgagagcattatagtggtgctagatataataatgccttttaatattttcaatacagatgctcatagatattaaaaatatcagtttatatagttataaaataaaatacagcaattctatatagtatacctcttaaaagggttcttatggtacacttattttttttttttccgtc

SEQ ID NO: 228952 - DNA, 1675 bp, Cannabis indica
aagcgaaactatgtgtatatatttctaaatacgtatataagtataaatatatatatagattatgtaacacacaaatctaagtagttcggtagaatatcatttgccaacgtctacggtagtatttacgctatgattaggttttattaaaatggagatctacagagtttaagaacttattttatacaatggtctcagctgtgtgtaaataggtattttagcgaatagaagcgatactaacgcaaactttgcttctgtagagagaaacaagatgaaaaagaaaggataagataaaataaacaaagagcgtgcatataaacacacttatttgaagtttatctttctgaaggtaaaagattcaatagagtttgtatagaagcatgttgttatgctttgacgcttacaagcagcatgtatctagaggaagagaaatcaaggataatttctttcaagattgataagacaagcttgatgggactatagacgccttcttttcctctttccttctttctgtccgtctctagctaatagcttgggtgaatgtacatagagatggcttatcgtgcctcttcgaggtgaaccttatcttcgcaaaaaaaattaagttgcagctacttttacctttatgcattcacacctaagcccaagtatatattcatctcaagttttatgcggctactattcattgtttttttttttttcgttttatacacaattatttactaatttgcttttattattttattttattacacattttttttctttttactcatcaacaacatacatgaacatgacaaatagaattatataaacaaaatcttaccactactaaaatatctctcactaaatattaatctcttttagtttaaatataggctcgtattccttttaccagttaaggtatttatggtcaattattgtttaagctttttttgtgaaatataaattgtctaacaataaaaacaaaaacatgtgtgtggctcattaatttattcatcaagaagagaagatcaacctaagttgaacctctttattacatatttacattacataacataaaaggaagtggttctagtagcaaagcatatatatatatagtttcttttccattcgtaattccaaacatagagccatcatcatttcttttcttttggtaatctcatattttattcatgatcgatcagataggcatttggatgtgagcatcaaccgattggtcgagccaatatttcaagttatgtccatggctcactcctaacatgtcacagtacctcttgtagtagccgatggcattagtagctgtattatctacattgattatgtttccaatcactccatagcttgggatattcactttcacttgggaattagcattgataagtatatcatgacaagaaggcttgttgtcatgctgagtcatccagaaccatatggctgttttgaacgatataattgggtctgttgctaccaaatcagggtggttgatcaaatctagcccaaggctttctccagcaagcccgtaattgtagttgctgcaatgcacgtcaagtagtaattaaataaaccagtttggattcaatcccttaacggttctcacaatatatattgaatataataatatatgatgtggtcctttgtctttattttactaaaataattatatattaaataaaaa

SEQ ID NO: 228953 - DNA, 1379 bp, Cannabis indica
aaaaaaaagaaaaaaaatgtattgaacaatgaagaccatgagagaaatctctactttaaaaatttcaatctcaatcttcctctaataatttcttaagagcattagtgataacaccacctaaaagtgacaccttacaatcaattaaaaatactccataaaaattaatatattaagttatatggaattccttaattaattatatcaatcgatatatcatatattacatgtccgaaggtgtaagacacctatagtatcttttagcatttctctttcttgaataatggcttacgaaaagagtgtgtagtctaaaccttgaggcataaactcttgccagaaggtaaacttcgtttcattgcaaggtaccaagacaacttcgatgccctgccactgaatggccaggacccttacatgccattcatctcaactaatacatatgcatttttgcagggaacagaaagtaaatttgatccacaatttacgtaacaactcaacgagtcagctccaaaatgccatgattaactactcatagtagtaaccacgtataacatatgtcattcccaaattggaagaacacagccttttctatacagatttcaagtgaagtccaaacgcaaatgtcaccgaaaattcaaatcctttcttaaggccaaaattgtgtctacaaattttcataaaaaaatttactttaaagcaaaagtgaagagcacaacttgaaccatttacctcagacccccaaatatttctcctaacctatcaagacccgcaaatatgcagaatttttaaaggtacagtaagaagtactataaacacaaaaggatatagaagattggatattatacctccagtcaaaaatttctgagctgataccatataaccgaatgactaaactacttgttcattgtagaagacaagcagaagttccagaatattgaacccattgacatgaaggctacgcgtgcttgaagaggtactaccctgtatagatgccatgcacatttcacaagttaagacagtaaggcctccaaagataccaaatgaaaatactactaagaatataaagtgaacagcagaagtgtgtcagtgtctgccatcacaatccactctcttcccttatttattttttatttttttaatcttctcttatgtcatctcccatcatatacaccaaccttggtgttgcactaacaccaaatatagtattatagtttgtttcattcttaccacaacaccaaaaaaaaattattctctattatttgtttcaacagtctatttaacaagcttataaaatagtcgtgttaaatttttctgaatttattaaaattgtaccggatatcttaagtaactaatgtacacaaccataaagaaaaataaactaaaat

SEQ ID NO: 228954 - DNA, 1331 bp, Cannabis indica
tttttaaaaaaaaaaatcaaagaattagtcattcaaatggcgttaatgtgctactttttccgaaaacaaatgtcgttaataatatgcatatgcaaaattggtacagaaaatatgcatatacaaattatgtgccatatataaaaagtcattaaaaaaaaaccaagtaacacaaagtgccaaatcaagaacggttacattacacgagtccaacaaatgaacaaatatggtccccacgtacacgctcttaacgataatttcactgacacctacccgtgaatgtaatcatcgtcccaaaatctattcacagcatactcatcaacttttttgttgtttaaattcttacaaaatagatcagatcatataaaatatccatatatatatatacgagtcctcaatttgggaccaccaatatatcctaggagtataagctaattccctaactaattcatagcatctaatatccataattctatacatttcaagtaggttgaatctggtaaccaaattaacaaaaatatattatttttaatttagttttttattctaaaaaatgatttattatggctggttatcatttctcctgcatggtcctcatcattaatgtttttgctaaggtgggccgactttaacccaccttctatttgcagacgaccttattctagtgggtagagccaatatcttagaagctaatagggtctggagttgcttggaggagttttgctcttggtctggtcagagagtaaataaactcaaaacatcgatctttttcagcaataacacccctgagggtatgagaagagggattaaggaagcgttgggtatccaatccccggaagggcctataaactatctgggtctgcccctattcagatccagacagaaggatgcagatttcaattttattctggataatctcacctccaaattgcagggatggaaagcaaaattgttatctaaggcggggcgtgctactcttattaagtctgtgggtttgtcgatgccggtctatgctatgcaaaccaccaaactctcaaatagtatggccacgaggattgatggattagtcagagatttttggtggggttttgacaaaggtaatcatggtctttatctaaaggcttgggataagctgtgccttcccaaatctttgggtggactaggctttaggaaatcgaaggagatgaatttagcttttcttgccaaatggggctggaatttgctaaaaggctctcagtccttatgttgcaaaattttggaagctaagtatctaaaagggaaggagttcctcagctgtaattatagggactgtgattcctggttctggaagaatg

SEQ ID NO: 228955 - DNA, 2471 bp, Cannabis indica
cttaattaatttatgtttgtttatatattatagttgtttaagttattttttaaaattttgagagttttaagtacactaaaaaataacattcaatcagtaattattgaatgtgagaattttttttttttattttatatacatgtgaaaatagacggtttgaaaattttatatttgacgtattaaaattttacaatgtaaataataatttttaaatactaaaataaataaatagtgtatcagtagaactcttttaaattatgtattttgtaaaaattttctatttatcaatgttatatacgtttaaattgtttgaaaaaatatattatccattcattatggattataaaactttttatggttgacactaatatatataattaattaaattgtagtcaaaaaatttcaagacaaaatagatatatatggataaaagataaaggttcacttttttttttttaagtgcaaaacatactaaaggaaaaagttaatatcttttttctttttaatgagttatggatttttttcttttgtgctaattttataactatatacatacacacatgtgcctataagtccaaaaccaaaagcaaatatataattaacattaacatttaacagtaataattcaatgatatgtatacatgtgtgttatagtatcaatgatatcataggaataattcaagatattttttcttatatatatgaaaaagaaaaatgaaagaagatatatatatcataggaatataattatgagcagtagccccaaaaattcttatacttggagtagaagatttgacttacagcatttaaatcttgagcatatatatgaagccaagtgttggaaacttattgtagcacataatattttcaaacaaaaaaattacaagaacatcattgtacccataattgtagtagccacctaaacatagtgatatagtctctagtagtacttataatcaatgacactacataaatataaatataatataaatatatatatatctactcactaaaaaaaattaattttagtaataataaaattttatgattaaaactaaaaaaattataactaattataaattattatttttatattgtgactaaaaaatttataactaaatatattagttaattataatttattgtggctaaatatatttttaatcacaacaatatttattgtgactaaaactaaattagcgacgatttatatctaaatattatgttttgtcacaagtaatattttgttgtgacttaaagtcacatttagtcacaaaaaatttatgttgtgattaaaaaattttcattaattaaaaatattttgatctattgacgaataacaaaagaaaaattagaaatatttctatacttaattaaaaaaaaattattttttacactgtatcaaaatatgtttatataaaaatatttaagtaaaatttaattttttttttatttttgtgcctaatatttttttttcgaacaaatccatctcatataatatttaaaaaaataaaatatttttaattaaatagaaaaatcaaagtctaaaaactcttcttttttttttttaataatactcactcatactaattagtggtaattaataattattctttaaaaccatgatttttacttaaaaaaggtaaatataatgcaacctcagaatgaaactgcacctttgtttggctagagcaagcaaatattaataatggggttctttacaagtttggcttcttttatttatttttattatttatatgaaaaaaaaataataaaaagaagtaaaaacatttcagtcaagatcactctttttcatgttcctctaataaaatcttttgcatacaattttgggtccaaatttatggcttctgtttctctgtttagataaaaaaggatctcaaaattgagtaaatggcaacaacatacagccaaagaaaattaataatacaaatatagacactgatatagtatagggttttattcatttattttttttttttaaaaaaaaataatttagttttgacgattatattattttgattatttttcagtaataactaaccagctttccaaacataataatacaaatatacactgatatagtatatttttttaaaaaaataataatttttttttggtgtcacttttgacaataattttattttgataattatttttcactaccaaacactacatttactatgagaaataattttcaatacttctaattccaataaaaataataattataataataataataattatcattatacatttttttcaaggtttttggaatgagaattattcatattattatgtttcatataattaattattatttttcagttgtatataccaaattggcttttgtttagtttttttttcttcaacattttgacaataatttgattataattaattatatattatcttagacaattaagtcccatttttcttttttttttttt

SEQ ID NO: 228956 - DNA, 5804 bp, Cannabis indica
ttgagtggaaggagtcatttaatgcttgcagccaatgtaaggtttcttgcactttatatgtgtttgaattccattattttagaaattcatatttaggatgttaaacaacatacatggtagtaaatctaaatcctagtaaaatcagcatattcatattatcatgtggaggtacaaggacccaagttcggttctttttatgtgcataaatctcatcattcatggctctattccagccaggatgagccaaagcctcctctacaaaagattgttatgtactaatggggttccatatggattgacgcaagtaagtcttaggtttaaacacccctacttggcccgtgtaaccatgggatgttttagggccaaaggagcaccatagggagaagcaacttttgtaatgggattagatgcctgaggattaagtttaggataagcttggggcaactctagtgatgctgcagtagacatatgagaaccagcaggtgatgagtgaaattcttgtacatgattgtgttgtaagaagggtgctttaggtgatggtattttagaggatgttttaggtggatcagaaggttgtgaaggagtgtttggagatgtgtttagagatggggaagagggagagaatatagaagcagactaccaagggacatgaatatggattgggtgttcaggtcggtgtgtgttgaggaaactagtttgaaatggaattcaaactcattgaaaatgacatgacgagaaatgtagactcgaccagtattgttgaggcatttatagcctttatgactatcactatagccaaagtttacacatttggtggaatgattttgaaatttgtggaaagcaagttgtactaaaggtcttaagaaattggtaatttggaagtttagaataaacaactttaaatggagatatattgttgagtatgagagtggaaaatctattaattaaatagacaaatgtctaaaatgcatcccactaatatgtttgaggcatgctagcttgagctaacaaagtgagatccatttcacctatatgatgatgtttcttctcagtttgaccattttgagttgagtcatggagacaagagtgttgaaaatagataccatgctcaacaactaattttgaaaaaacttgacattcacctccttaacctgtttgaaagattttaatttttctttccaactgatttttcactaaagttttgaactgaataaatgtagaaagagcatatgatttcacttttaatggatatatttaagtatatgtggtatgattgtctataaaatgaatgtagaatgtagtttaaattggacataatgggagctggcctccataaatttgtatgaatcatatctaaaggaaattgagtatggttttcattaatttgataggataaagaatgagattttcccaagttgacaagtatcacagaaatgttgatcagtatttttttaacttttaacacttattttacttaaaacaagatctaagacacgattggatggatgacataaatgcttatgctatttgtccttaactgaaggggaaaatttctctgccattggctgagtaattacattggactgagacacaaaataaacaccaaaaaatagagtaagttggagagtggaatggatgttgaggttggagttggggttaggcacttcgaattgatataatccatccttaagcttcccattcccatgaagtaccaacatctttgttagtttttccttcacaaaacaataatcagcgaaaaattcaacaaatactttattattactgtttagctttgaaatactaattaaattctttgaaattttagatttaaattatttctagctgtagtaaataaagaaccagtaccagcatgagaaatttttaatttgtttccatcatcaacagtgagatttttcttaccagtatactccatcttttgcttcatgtgtcctgtgtcagtaatgatatggttgatggcacttgaattagcaaatcaaacatcatgttccacaatatcaagggtagcaacaaaggctgaggaaccaagacgagtaggcttatttgagtttgagatcttgtcaggtgaagaccccatataagattcatcatatctattatagcagtgagttgccgagtgaccatacttggcattggcttggcaagttggtttagatccattaggaccaaatttactatctcttccttgaccaccaaatcaaccacaattgtggttattgttgttgtagtctcctctatttcttacaggttgattgtttgttgaatgtctacttgatctagaacctttatttgcaaggttggcaggaggagaggttagacctgtgtgtgagttattagcacctcagacagcaaccaacctctccattttgttgttaaaactaagcagcaaaaatcttgtaattccacccaagtggtggaagggcgtgcttcagtgataaaaataataggaagatattctatatccaaactagaaagtacattagcaacaagtattttttttcaagatatgggtcaccttcttgtgctaaaaatgtctaaccactgacatttatgttcgagatattttggcattatagaagctccctttcaatgagtctgaatcttaattatgtactcatccatcttagcctttgaatgtgctttgtatagtgcttctagtgcagtccatagctcagctaagaatgcacatcccataaattcagtggctataacttctgtcatagaaccatatagccaaccattaaaagttgggcgtgacaatccattgttcgaactctagattcacctcaatgtccactctaggttcttcatcatttatatgtattgcaggaatgaactttgcaggttgaacacaactactattgatgaaatcatccaatcaatgtccttttacaatggttgaaaccattgtttcccaaaagttgaatttattcttgttaagtttaaagtcaaaaagttgattcaaggtactcctaaattgaggtaccacaatgttagagagtcttgcattctaatttgttgatgcttgtggttggttagcaccattgctattagttggagatgatgtagtcgccctgggtgtagcattgtcatctgtagacatattgaaatacaagaaaaagaatagagggcagaaacctactctaataccaagttagaaaaatagcagaaatagaaaaaaatgataaaatcagctcaaatggagcttgatggattgcattgtatttatagtatgcagggaaatattttagaacaatccttacaaaaatatcttcctattattagcattaatacaaaaagaatattctaacaaaataaaggtgtccagtgataaggtggtacaaatgtaataatactagtgactatgttgaggtacattggaaagaattcaatgcatctctttgtattttcatttgttaacactataccataagttttgttgaattaattgtaataattagaaaaaaataatcgagttgtttcccataagtcttaagcttgaaatggtaattatcacacaacgcacatcaacaatcttgttctctacacattgcttgcacgcctcacctccatgaaaagtgttgggtttgtctccccagctcaagcatttgggtattgtaaattcatgctgaatattttaacatgacacgaaacttgtataaatttaagaggtacgagcacaattcaacataaattggcataatatgtcatgaaaaatataattttaaatacgatatgacacatacgtatgaatagattagcccaaaatttttatttaatatataaaaatataaatgataataaaatttaagtacaacatagtattataattctatattaaaactattactatacatcttttttcttaaaaaaataccatttataaacactaatttagaagagacatggtttatctctcccaccctgttggtggttgatgtttggcgccattcccctcaagattggctcaaactgaattatgatattagagttggattggagagcatgtgtatcactgtggtagcaaggaaccatcttggtgagtggtttgtgttagaacagaacttttacattttgttaatgctctaagtagggaagtgacaagtttttttaatatggtcttgtcttttgacatggtttctaaggtttagtgttaaggtttctatccattaagtctggtgttgttttctggttctcgtgggtggtcttggctttgcttgttgctgctgggagtaagcatggcatcaactagttggaacagaggaagtacagaggaggaaacattgcggttccagattgaggaggaggatcttgaagaagttgtagtattagagggggaggagatgatggtatcgacgataggtggtgtttggttggacgatttttgactaatcgtgtgatcaattttgagaaaatgcaaaatatttggcttcattatgacaactaggtatgaagatgtttatcaaataattggctaataataggtttcttttccaattctatcatgaagtggacaattaaagagtcatcaatgggagtccctggacttatgacagaatgcaattgattatagatagattgcagattggaggggatccgaaggcattgccgttgaatactcttcacatctgagttcaactccatgatatggagcctgggtgtatgtctaaaagtacagttgaaaagattggtaataatatggggaagtatctagaatctgatcctaagaattttataggagtgtggagggattttcctcgaattagagtcacttcgaatattgataaaccgctacgacgacgtatgaagctaacaaaggatgatggaagttggttttggattaatttcaagtacgaaagggcccttaaataccacattatcctctttagtatttgattgtgtaacttgtaacaacgacaaagttttcagtgatggaaaactaaatgaatgagtactatccaactttactccgctcaattccaaaatagtcaaatatcttgcgttgtttagtattttaggtaaacaataatagaaagtcttagccccatcaagatattttcctcctaggaatagatatatttccttaaccttattctcaacatcaaaagataacaatttatttagtaaccaagccttacgacatccataataactaggcatgttaaacttaaaactagttatgctcgaatcaacaacaagatccatacctttcttgcgattttccaaataattatagacataatcgtaaaacgtttctaggtcttgtctccaagtaatgacatacttaaccttttcgaagaaaaagagtgtgggaactgaataccatatgagtttccaacgctttgaaagaatgcatgttcgaaccacatcttcagttggtagaaacgagagaatgtgatggattaatgcatcaggaagtttcaaaagtatgtcattatcatcatcaacaaaaccttccaccattgatgatgtcatgatgatgatgatgatatcactataacaagaaagagaagaaaaaaaagcttaatcccttagatggaatatatgaatataaaaggttaatcctttaaggccaatttgtttttagagttagggtttggcttaagtggaatgtgaggtgagatataagtacgtacaagtaaaacaataaatattttcaatgataatatttattttttacctgaaatttcgctgatattttttttaaaaaaatttaatgatatgaatttcgctgtatgatttttattaactaaaaaaacttactgtgttatcttaattttacgttg

SEQ ID NO: 228957 - DNA, 1326 bp, Cannabis indica
aattacttaaaaatctacaatgcagtattataatgcttttattgacgatcttttactttgacagtatttaaggtttctcgaacaatatgatatcaataaatccttcatccttcctcctcgtaaaagaaataatcaaaacttgatacctattatgtatttaattaaaaagacaaatgaatggaattatatccaaagatcatacgattttttagagtcttagtattaagaatgatatgtgatttcttaatataaattgagaataagcattagaattagatcctatggtagttaaatgttgacaagaccattatcatcaaatacagatcgaagaagccaaaaaaaaaaaaaagagaatctagtcagggggatgtgttaatattactgtagtttcattaagattaaaaaaacatcacatctttaatgtatatatatataataattaatcttagggataagttgagtttatagtactcgttaattaattacttttactaatacttaactaattaagttatatagcctcgtttcgtttgaatgattatatgtagtgaatgttaggaaagttttatataaaataaaagaagaggagaatataaaaaagtaattaattaaaggactatttatagctagaggcgtaggttgaaatgcataaacattctccttggtagtactaattcctttctgagttttttttttttttttgatttaataataacaaaaagcacaatcagttatttcagggaaaaagagtatacaattaagtgtcgggtgggagaagagatgctcattttaatagtttgacacataacagaaatatagatgctcattcgtagtcattaggccataatagtatcataaaaatatgcctatataccaccttatgtttatcataattaaaaggcttaattaaatgcatacatatatttatatatattagtattttacatttttatgaaaaagatatgaatagtaggtagctcatgttcgtggaggttattataatgcagcttgtttggcataattaggtgatatgccgcttttcctgtattccaaataaatatgctacagatttatattctaaatgacgaataaaataaaagatttatattctcatatataattatactcattataaatatataaaaacaataaattgtcatgaaatacatatatggatattcaatttattttttttattaattactattaattataattactatttatctttttattagtttcttaattcatgacttagatatttgtatatataaagaatcatcccattaaaataaagcactgaaaaattctaatttaatttttttt

SEQ ID NO: 228958 - DNA, 861 bp, Cannabis indica
cgattcttccttggactcgaagtgctagaacaaaaaaaggcatataagtttctccacgccctttcacacctcaacttttgaaggatacaaggtacttaggagcaaaacctacttcctccccaatggaatataatctcaaacacaacaaagataaaggggcccttcaacctgaccccactgcataccgtagcctaattggtaaattgatttaccttaccatcactagactggatatctcctatgcagtaaatcatctaagccaatttcttcaacaaccacaagtaccctaccttcaagccactaacaagatcttaccatacctcaagagcacccttggtcaaggactcttcttccctgccaacacttccccaacaatctcagcatatgctgaaacaagtttatcaacatccaatgaacaaatttcattctttgctaatgccaattggggcaattgtcaagatactatgcactccatttaagggtattttgtattccttagccaatcacttgtctcgtggaaatctaaaaaataccaagttgtatctcggtcatttgctgaagctgagtatcgtgcaatggtaaatggcacttccgaagtaacatggatccttactctcctcaaagacattgtcatctctcccaaagttccagcaacattacactgtgacaacactactgcaatgcacatcactgagaatcacgtttaccatgaatgcaccaaacatgtggagatcaactgccacttcatttgagaaaatgttcaacaaggatcactccagcttcttcatctctcatctcaacagaaccttgcagacatcttcaccaaaggtttgctactttcatctttctcaaccattgtat

SEQ ID NO: 228959 - DNA, 4992 bp, Cannabis indica
aacataggctaattataacctaacatatatgtatgtaagaaaagagacatattctcaaattttgttttcactctctcaatcaccaaataaagcgaagagatcaaaagctgatccaaaataaactaaaagtacctttctagcaaatgctccaacactgatagattgagggtaagcaggatttttgagaatcttgacaagttctgacgctctttgtctgcaaaaggaatgttacattaagtccaaaatctttccactatattatgtaaaacaattactcatttatgctagaaagaaaacatgttacgtgaaaaccaattaggtaagtaacatgataataagccaattagataactaattgttaaataaaagatataaactgatgggcaaaaatccaatctcacttcacatcattagtccctgtaatctgacgtatcaatttagagatattcctttcatggcgaacgtaatcctgaaaagaaatagcaatatatgttagaaaataaatattaaacttatcgaaagaattttgagaagaaaaaaagcatgagaaatgcttaagaaatgacaatcatacattgcaataactgtggaatgataaataagaaatttaacatacagtaacatgcatgtttacaaaatccagtaaaatctcatttgaaccagattaagaattttaaaagaaatatgaataacaaagtagggagcaaatcttatttgtgttcaatcccaatgtcttgttttctttatccaaatcttccaacttttttaatctttccctctccaactttagtgcagcttctgcagctttagtaatgtcatctgccaccaatagcccgtttatgcatcagataatagaaaatttctggagagtatagaaagcatgcttcaacttggaaaaaaaagaagaggggaatacagtggggtgtcgagaagaactgtttccaatacccaaacctagctggtcattatgaaacctagggataaggtaaatttttagatgaaagagcaaatgattatatctatagatcagtacaaggttgctatatattgcctgatagccaaattacctgctgatgctgatgttattggttttccaagttcagatgcctttgttttggctttcatttgcagtcctgaagcatctttctgaactgcagcctgtcttgacgcttcattggcctccctttcaacagcctcttttgttgctctttgttgagcttccattgcagccctatttgcttcttcacctctgagttttgcctgcatatgaaaatacttttagtcctaacagcataaaaccaagataataataccaaagcgcactaagattatatctagaagaatacgagcataggactatacaagaaagaatagaggaatgtaacaaccatctttatgcatctaccaaaagaaatgaataatttgggaaaaggcaacaaacctcagcttctactttggctttttcttggcggagtttttcttccaggagagctttctcttttcttttggctccttcataagccgcatcacttcttattttgctttcttcaatctgggacctgagttcatggtccctttggatagcagtcaagtgattatcaagtgcctcggcactacagatgatggcaagtaattagaaaacagaaattccaaatcagactagaataaataaaaaatgcaaaagagagaagaaaccattaaaaaaaatcagtgttatagcaaatttattgcggtcttacatttttcgttgatattgggtgtcaagctttctcacattttcacgccttgcttctccgtacttatcaacttgaagaaatgcagaagcaaccttgtcattttcactcatcagatctgactctattgcaaagattttgttcctaatctcctcctgtaattgagccaattaatattgtcatacccaagaagggaattctatgaacataagaaggagaaatatttgcagggaaaccctggagcttgagtatctagtcaaaaggtatgagaaaaactctttaagagatatgtgcttggttattcttgatactagttgaataattatacaatttgcaagttgcaacaaaataatgcacaaattctataaaagacaaaacatcatcagctacataggtgcagaccttgatcccaaactgatgttcactggttagctccatcaaacctccttccaccaaacccgtttcttccatcaagtatggctgaatttcaagagctgactcattcttagagtcatcatcatcactaagaaataaacaagaaaatacaaagtactaataggaactagtgaaatctccaacaaacaatgtgatatggcataacagttaaataaagctttcagatgacaggacagggatgcaagacagaagacttcgattgatacaaacatggaaaagtataaaaagaaaagcaatcaaggccagttaaaaatgtatacctaacataaaggtcgttaaaattaaaccgattagcagaaagagagctttgatcttggggtcaatgtcatccacctcatcgtcaaggacacgcattacaaatggcctagaacttctctctacactcttccaatttgaaagttgactatacatacacaatttatagctgaaagcttagtaaaaaaacacatttgcaccaagcagttatctaaatcacaaacagacatacttaccgtgattgcactttagtgaatggcattggaattttggaatagcaactaagttttgtatccaatgcattaagttctgttaaaagatcatcaaaactccaatctggttcagggtcggctgcaattccctcaacacttttggggcaacgaagttccaacttaacagctcccctaaacaaatccaaattgatcccacaaatcagaaatacccatcatatcaaaaccccctttgcttatacgatttaaaaatcgtaaattttcagtcaattaaaaatgtcaaaattcataactttgttcatgataatcaacaaaatctgaacccacttaaaagaagaagaagaaaacagcactttctcactatacgtaactaatatgcaaaagaaaatttaagcagaatataaaattacaaaaaagaatcaagcttgaaacttacattgtgtaaaacttcaattagaaaaccttcggttccccaaaatcatagggtttccgcaatctactatctactccctctcttccgttcgtgtctcaaaacgcaatcacgaacatcaactgagttagggtttttggttcttgaccgttggaaaccccacactgaatgaaagaggttgttcagtaatcgccaagcaaacaccacagtttaagtttctccctttcttttcttttttttttcttttctgtttttgaacaagtttaaattctcttttcaattaactttaaatcagacttaagaaaggaaagtagttattatatttgacattctagaaaataattgattgaattcatagcaacaggataacacattatatagctgcaaatggccacttcctacaactagaagaactggtgctcatctccataaaatcccatcaaccttgtcaattttttaagctttacacaataattgtattgagggaggaatctttgtcagctatgtataatagtaaaagccaatcatagagattaccagtaatctccacaagagcattttccattcttgaaatgatgaaatcttttgttgtctctaacaatcaattccctcccaacaatcttggacatgatcttgatggcattatggcaatctccacagactcccagattcttaatgatcatccgtacacttatttttctgtatgttttcaataacaagtaaacatctcttctatcctatataagatcattttattatatgtactattctggaccactaacatattttttttataagagtactaaatcatatatttatttttaattcttattacttgttacacaatcaagtactctttaaaataacgagaatctcatttacttttaaaataattccaatatataaaaataaaacaaaacaaaaaccactcctacaattccaataattctaatgctcttggctaattcacttaatttatttttgtattcagaaagatgaatttggtgaatttgtttatttgaaaaataaatgaaagtacaactagtccaatcaagaataaaaacttactaattccttatcaaacaattttgcaggttttttaaaagtaagaaaacataaaacaaaaagagaaatattctatttaagtctctaattttaatgggttaattgggtcccaaaaggactgagaaggtaaaacacttcatcatttgtacatatacattcatctatagtttttcttgactcaaactttctaccattggcacatttgtttcaaaattaataagtatagaaatgatatgatttcttgattttatacaaaatcattttaaataaaatgaaaaataaatgtcttatctaggcaaggggaagtagtgattgtggcatgctttgttgaagcttgttaagccaacaaatttttgaactacctctattaaagtaccgtagcagttaacttcttaggatgtcttctctacccaattccacttgatctttattatatatgttcaaggcataattataacattcaggctaatcatgaccatttctaagtgtgactaagtaggacaacctaattaaattttacaattgtataaactctggcctttagtgtgtcatgcatgtttgttttttactactttcaataaggtacaccaccttttattgtaaatccaaccaaatgcagcaacaaattgttggaaatattttacgaggatctagatttactaccatgtatatttcattaacatcctaatatgaactctaaaacaatgaaataaacacataagagtttaagaaaaccttatattgggtgcagcggaatataatgatgttggaaatattttaccaggattcagatttactaccaagtatgttttattaacatcct

SEQ ID NO: 228960 - DNA, 3713 bp, Cannabis indica
ggtattatctgctttttagacgtagattttttttttctgatttcaattttgttggtatgcttttgtctatttatgtttatgttcgaagttcaactttgaaattctgttatggtatttcttttcttttttttttttgccctttttttaatacaacatttcctatgcaactaaagaagattataatatttcttgtcatatggtattttcaacatggttatgtgatatgaggccttagagaagttcttagagaagttagatccagtcattgatttggttatgtgagaattaatatttgaacttggttcaacaatgtgtctagtagtttaatagttgaaactttgacagtgttaccatactgatttcccttcaacaaatctgtaacagaaggtttgtcaaggagctaccaatgccatacactgcatactctaatttgttatgtaatataattttaatgtggctagaggtgatatgtatcacaggggtgttatgttttagattcttattatctgaattgctaattaatatttaattatctaaaaatcgacaaaggtaatgattctgtaaggaaatgcattcttaatagttgatgaatgaccataggttactgatcaaattcaacattaagtttgtgaggaggatagagcagtaattaattgtctgtatatgatatataaaacatatgatattcagtctttctactactgttattaatttgtttagcttctgttagtttgtaatctttatgtttaatattgatttggatttttgatgtatatttcctttatgcagaaatatttagccgcttctaaattggttttcctcttccttggagcataaagttttatcaactatttacatctatcattgcccatttattgattgaaaaccagtggagattggattttttttggatcatgtagcactcaattctcgactgcacaatagtagcaacatcaagaacaatggcatcgatccgaagaactctttcaccggcttaccacgaccgtcactaccagaatggcgcctccgtttctactccttctagcaagaacctcctcttcgcaacttctaaatactcgccctcatcacttccttctgtcgtggctgctttcgctcttaacttccgccggaagggacctccggggctggggaaagccttcggtaagtgggcaattttctttttgattggcttcctgctcggaatgatgcccttaggtcacgtcaacgacattcaggctcgggatttctctttcgacataaagccatcgcacgtgaacgtgagatttgaggacgaggccgccaaagccggcagcattagagatccgattgtgaagcctgagcagtttatggctgacgtgaggcttggagccgaggcccagcctgagtcgagcgacgggcttgtttttttgcctaggaaagagctgattgtggtgactccaacgtataatcggcctttgcaggcgtatttcttgaataggttggggcaggtgttgagacttgtgcctccgccattgctgtggattgtggtggagatgaattcggcgtcgatggagaccgctgagattttgaggaagactggcgttatgtataggcatttggcgtgtactaagaattcaacagaagttaaggaccgaggtgtgcatcagaggaacactgctttggagcatattgagcatcacaggctggatggcattgtttattttgctgatgatgacaacatatattcgcttgaattgttctacagcttgagaaacattaggtatgtctttaccctttatatgtaattacaagcgtttgtcatgttttgggtaatttctcgtctttgttaatggtaaggggtttctttgcgaataaagtagctaatgtaatcatggaccaattttttaaattgtaaacaaacacggtaaaatccttttgaaacccccataaaagtcaaatctccttaccctgcatacatcattttgtaagcacaatttgctatgtctgaattttgatttaccatgtgtaattcgaactcgaagaaatatgttgcgaagaaacctgccaagaacaatcctattaacaacaaaaagatttagcagataaacaagaaggagaagaaaatccagatttgttacaattcatcaaagcttactcaaacatatttaatataggaccatcgataccattcatacatgtatatataagaattgttgggtagtgatttttaattattatttagatgtacttttaatattttggatacatataaggtcgtaatttttttttgcatagtaaagttacagaacgtgtaacaaattttcagtaaattacacataatttaagatgctcaaaaattagcattcaaacatctaattgcataaacacttatttgaatatatatatatataaaatatgcgtgagtaataagttatttgaattttagcattttaaattattgtaaattttctaaaaatttatagaatatcctgcattcatttttcttccgtgcgttgtacattttcatttcgtgtcagtcacttcttccccttttacatttgattgttactcttgacactaagaatgtgatagatgcttattgcaacattttcattcttttggactatgtttgaaagttggattttggtgaaaaaaaaagataagaaaattgtaggaaaaaaagaagaaggaaagaaaatgaaaataataataaaacaaacataattgatcatttgtagccactattagattgagtcagccacatctactagagtaactgtttcttgtttagaaaacggttatgttttgttttatgacttgactgacaggaattgctacatatgttctgtttcctgttatgaaaatagaccataatcactatctgtttaatcctacctatcgatctttccaatttcacatgtttattttgataaatttgttttctagtcgttttgggacttggccagttgcaatgcttacacaaagcaaaaacaaggccatattggaaggtccagtgtgcaatgggagtcgagtcgttggatggcatactaatgagaaaagtaagagactacgaagatttcatgttgatatgtcaggatttgctttcaacagcacaattttgtgggatccaaagagatggcgacgccccacatcaattcctgtccggcagttagacacagtgaaggagggattccaagtatgattaatgtcattaaaattttgtagttttcttcagctttcctacatatgagcaagctgaaattcacttttattgtcattttgcttactttgtaggagacaactttcttagagcaagtggttgaagatgaaagtcagatggaaggtacacctatgggttgttcgaggataatgaattggcaccttcatttggaagctcacggtcatgtttatcccagaggatggctgctccaaaagtaccttgatgttgccatccctctcaagtgatcgacatcaatctagcagttttgatacttgtagcttacaggtatgatgttacttttaaccctatccaactctctcctagttccaagtgttggatcatggatttatgaaactcacctgagttttgcagtggtggaactaaaaagccacaagttcattatccgttaatagcttgttttgaagggtaattttttgcatatagcgaaacttactgctaaagtttggtagggagaagaatagctagcacgcttcatgattaagctctttttagg

SEQ ID NO: 228961 - DNA, 2437 bp, Cannabis indica
agggagcgggcatggcacggacataagtggcatgagggcacagagcgcgtgggaagcgcggggcgggcgggcttgggtgacacggggcgcgagggtgtgcgggcgatgggggacgcgtaggcgtgagcgcacaagcgcgagggcgtgaggctgcgcaggcgcgggtaagagcgacacgggtgcgggcgcgggcacaggcggcgtggggtgcaggcacgggcaatgcaggcgtgcgtgcggcgttgggcatgtgagcgctggtgcaggcgtgcagggatcaaagaacaacccgatgtgacaaaaggggattttaggacaaaagaggtggggcatcctttgtcctcttttgcttgttttgaatatcttgaattattcatccctttatttgttatttataagaatacttacttttcagacctttgcggttaacacttgcctcccagtccaaaagaccacttttaagtgacttttttgactgtaattgagctactttccacgctattgcggtgcaccttgcctgatattaaacttggaatggcgcaccacattattgatgagaccattcaatgaggtaggtgggcatatgttatttcttataaatgcatgtgtttaaccccaatcgttgatctcatctcgatcctacggtagtaattcatttttactccattttcacttcactatatttaaaatctttcttagttcttcatttccttaaaatccttcttacgccttaagcctctcgacccttgctcctcctttgagtttcggcattgcgggcctatcctcacttatgcttgtgccgacaggtaccttctccctccataaacattgttttttttttttttatatatttgtgtttctactacgcttacgggtgctactttatcttataataattttcgttccagtcttgctagtctttaattcccaacttgagtgccttttccttcttcacttatttatggagaactatagataacattttgttcctgaaggggatccttttattgttctctcatctgactcgaacagggatgtcaccgaccctcgggcgtcatatcaccaattaatgtccgagcatctaaaatgcttggaagagatttgtgagttttaggaatgtttggctaggctcaaggacgagattgagttcttggagggtcgaggtaacaacaacatggatgcttgcctttcccacctcaagcgactttacactgatataacggggaactcactcacttggagcacattttctcactcgaaccatattccccgtgcttggcacctatacctttggtcgtggagtcacctaaccgtcagtcaggtggaggaggctactcctctcatgaccatccgccgccacctagggtcacctaggcggcaaagctttgatcagatctaggttgagctggaaggcccttgcccaccgaatgaagaacataaagtgcagtgattctctttctaactttccttgtgattttacagatatggacaagccgcatcgctcaactaaaccttgctcgcccttcccgattcgcgacccgtcactttagtacgggatagctggcatccaaagtattgtggcacaatccgacattaagaggatagtgaataaatacgctgtgaagtggggttttaaactcttaccgaaagaccgcgctaactccacctaaagacatggtggccttgagtgagtccattcttaaggcgggtgtaccttggctgcttaaccctttctttatggaagtattgaagtactttggcatagctccccttcacctgatgcccaatgggtggaacatcttgacctgcttctacattgctttcagggaggctaccggcagagctcccactgccagggaggtgcattatgtgtacaacttccagcacaactctttgttcaggggttgttattacctccacaagaaggtttctactgacccgacggtggttggctccctctctaatacagggaagactaagaaacaagactttttcctcgtgcttagctaggagggcatgcacaaagtcttctgaatgcccagtaagtgactttattgcttgtatctacgttaattacttaatactgaattttccatgatgacccttcaactctctgtttttgtttctttatagcgtcgcgtccccctcctatcctcacacaagaggagtactcttctggcttgttgaagctgtttagagcggattatgacaacaagctctgccatcatctcttgactctgcctgaccataatttaaaatataaaataattacatttaaaattttaacctcaaaatattaaaaattaataataatctattaggatatttgtggtttgaaaagtaaaaaaatttgaaattggtgaaaaaatccccccaaaattgaatttttgtgcaaagcaccttggctgcctagtaggaggctgttggcagcctctac

SEQ ID NO: 228962 - DNA, 1671 bp, Cannabis indica
tttaaggtcaaggttagggtcagggtcaaggtcttagtccaaggctaggactgggtctgaggtaaggttaggtttgaggttggggtcaaggttgaggtattggttggggtcgggtcgaggttggggtttgggtcccaggtctagggcccaaggtccggcactaggtctagggaaaggtgggatcgatgtctagtttatgataaagatagtataattttacacaatctattaatataagtcaataccatagtattatattaaataatagggattttgacaacaatactacctgaattatacaacttgtaacacttaaccttacaaaccaaattcttggggtaaaaccctccaaaccttacttttgttttgcttttactattctatgagttaaaagttgttaagtgtcattgtggactgctaatgtgtacacaagtatacacgtggtagatttttagcggtccagatcattctaactatttaaatatagtaaaattatttaaaaatttaaaaaccataaaaataaaaataaattacaaaagaaaaatatttcttacctttctttcttttctttctcttctttctcttgaaccatggagaccatctttctcttattccttcttcttcttcctctgcgcaccctaactctttctcatatctcattagcctcctctctcaatctttttccctatcaccatcattccaatctctttctttctctctatgtctaatttgttctcagaggtttgcgattgtaggagatcatagttgggggttgcgccagagaccctgttgtcgacagagatgggctttgcagaggtggggctacgattgtggggcatcgtagttgtggaagttgatggagacaacttcgtgggtgtgggggatttagaggggtattgaggatttgcgagtgtggttattaaggaatggggctaccaaaggtggaggcgtgaagatggattcgtttagaacgaggctagtgcctgtgaagcccatcgttgaagtcacatgaaatctcaagaagtcgcacaagatctactgcccctttaagcggttttaggaagccgacgaaggtgaagaataatgcgatgatgataatgaaagagaagataccaagttgaattgggagccagaatcatctatggtttgagcttcatcaagatgagatctgaatgaggaaggtaggaggtagaagaaaaaagaaaaagaatatttttttataattataaatttagaactattttttatttatttaattggaattactttttaaatattttaaaactaattttaataattaaaatgcatggattacgatgacttaccatgtgtacactatgacatgtctatttgacacttaacaactcttaactaacagaatagtaaaaaacaagatagaagtaaaatttagaaagttttgcactaaaaattttgtagagattcaagtagcatttatgctaatatttttaaataatgatacacaatacaatacaactaaataaatacaatacagaaattgtaataatagatatataagaaaaaatgattgtataagaatttttgccgtaatttttttttaaattttaaaaattaaaaacaaaaagtgcgtttagtaatattttttaattagtttttgtttttaaaattagaaaagtaaaaatatttttcaaa

SEQ ID NO: 228963 - DNA, 1441 bp, Cannabis indica
aactaagcgggctttacaatgtcgatctgtatttcacccaaaatcacttgtgtttctcgttttggatgaagacaaagaaaatactcgtgatagttcttcaatattaaggtttgaagtgccccaaattggaaatatgtcaacttgggtgttgggtgcctagggcacctgatgcttcggttgctcaaaagtgatagtgctccaagaacttgaacacgatctcacatgccaggaatggctccaagaacaatactttaatcacagaacatagaacacttaggcaaagacttgttttgataaaattatatctttattgctctgagtatttgaaatgatgaatcaactattttacagttaagagttagaggtatttatagactaaatacctctactaacaaaattcttacatactcgagttaagactgagagcatagtagacttaattcctaaatttgctaacaactaactacctaactaattgactaaagacatagtaacacgtgtataaaacttcgcatattggtttaacaacaagtctaaatcgcaatcatatatatgtttggaacacttctgaatgagtattacccatgaatggttactaaacaaatttaactataaatattaattttaaaaatatcaaattatcgaactttgatctaataacgaataatgaaatgacaaatttaaatttctatacttaatttaattacttaattaaaaaaaatatcaaaaaatatctctttatacactatatcaaaaatacgtttatacaaaaatatttaactcaaactcaactttttcttttcttatttctcttgctaaaaaatttttcttttaatttttttttttatcgtgggtaatacacattaagagtgcacccatatatgtttatatttaatgcaatgcagagttcactgtatgttcaagtcgcactacagtattttgtgaaccatggtttagaatagtagatcgagagcatcatgctgaacaccaatgaagttctaaaacaaatgctttttaatcttatggttttgcagattgcaaggtaaacacaactccataaaaagttgacatgtttccaccataatacaactacagacaaactgaaagactataccagtaccaacaaactatcaatagcatcaaccataatgcaacattgaagcctataaaagatctgacaatttcaaaaatttcactcaacagaagattttctagttcatttttaagtgaaacagtacagagaggacaaaaaaattgttttgttacaacataaattaaaaaaaaaagctgataattattacaagaatagctgaacaaataattctatagctggcagaaggataataggaaaaccccatcaaccaaaaatgaatctttcacactgttttgcctagtacgtttcatgtttctattgtataaaacaaatcttgttgctcttgta

SEQ ID NO: 228964 - DNA, 1964 bp, Cannabis indica
ttctatcatcgtcttcttcttttttttttctttctttttttttctttcagagtgttcattcttcgtttcatctttatttttgagtaatggctattactcgatctcgttcgagttcattgttcccttctcctaagaaaccaaaaaaaaaataaaaagcctattaaacaatctaaacccaaatcggttgctcaaaaaattttgaaaccccctaatcagaaatccaaagttgttgttgatgtcggtgagccatcatctaagcttcctgattatacatctagtgatgctaggaaagctaagaggaagagaaatgataatgacgatgatttcgttgttgttcgtcctagaaaggtatatctgaattattatttttttgttgttttattgttttctttttgttgttcatttgtagttcaaataatttattatctatttatttttttatttgattaatttttcgggtttagagtttttttctttgttgatttgatgttgtgggtttcaatcttaatttttaaaattatttttatatgttctatgttctttgtttatttataattttgttcatatttcttcaatcctaagttaagttttatatgtattatatttttttgttaattttttgtttatatattgttacggggttatttatgttttaacttagagtttttttgtcatctattttttttccatatttttctttaatgtttgttggaaactttctatttaggcttttttatctagtatatgattgttttcatataattttgttatttatttatttttttgctgaattatatattatttgactatttgttgatttttaggattttctattatattttgtttattccctgttcctttgatgttgtgggtttctttttccacttttaaaatacaaatgtatatgctctgtttttattggcttttttttttccctaattttttgttttctttaagtttataatttgttcatttatttatgtattgtttattttatagttgttgttgttttactattttattgatttcactattttattttttagttatgggataataaatttagtaatgaagattttcatactacgcgggtgatctctacttgctcttttcaaatcattgagactatcaactctattttgtcccctaaacagaagaaaatgtttggacaaactgtttttggatgctttttaagaaatctttcttatgttttgcaacaccagttgttccgtttgttgttgagggaggtggtccaaccaaatgataatgagatgtggtttattgttactggtcggatgctaaggtttagcattgagaaattcgctttggtttcagaccttgattgttctggtcaatgtgacaagttgaggtataaacaagaaaaaaaattgttgaaggagaagatttttactagttttaaagaaataaacaagaaggacatggagaacgcttttattagaaaaaggtttggcaatgatgatgagcttgcgttgaaagttgttgtcttatactttgttcactgttttgttttaagtgattcagacactaaaaaagtatatgacttagagttgaatattattgatagtgaaggtttaataaatatgcttggggcaaagagtcttattatttatttcttgattcagttagaaatgcgattgtaaagaatcttgttaaaataaataaagttgataatggagagaaaatagatttttataggttgagtggtttggcctatatttttcaagtttggtttaatgaatgttgtgtttacattgatggcatccattgaaatttgattttctatacttaaaaaaccttaatattttattcttaaaccaatacatttcaaactaaaaaatatatgacacttttatttaaaacccaaaaatacccctctcataactcagttccattttttcccaacccgcatatgcatcggaccccccccattgggccccatcgga

SEQ ID NO: 228965 - DNA, 2697 bp, Cannabis indica
atcaccgaatgcaatgaagccgaggcaaccgcgaatgcgccaacaccatcgatccccacctggagagtatttgtggatggagcctccaatgaaaatggatccggagcgggggtagccatgatatccccgactagacttcgactacaggcagccctacggtttgacttctcagcttcaaataatgaggccgaatatgaggccttgatagcagggctgagactagcaaaggccgtaggggccaaaagagtagaagtctacagcgactcccagctggtcgtaaatcagatatcgggagagtaccaaacacgcggcgaacgaatggccgcgtattagcagaccgcttaacaaaattaaaagaaacattatcaagagtggccaacaaagccttacaatctaaaattatatgaccataaggagaggtcatatttttattactttgaagatccaaaacaactctccgactatcagactctacaatcacacctgaccaatcattatttttaatccaacttagagcctcttttattccaatggcctccacttcatgaggttgtaaagcaccagccttcttgaaagattttgcttgtatgaccgcaccagccgcgcttcgagccacaaaaccaataccaaaacttccagcatccgcaaaaagtgcaccatcaacattaactttgattaaaggaaaattaggaggggtccaatgctcaattcgaatctgattggattcattaggagttcttaattcttggtttgagcattataccaatcaacaaagtttaggtttgccaatagtaacacttcatcatatataggctatttagcattccaaaccacctcatttctaaccctttaaattgaccataagatcatcccaccctctaaacattcagccatgatctacacacccaaaccttcttcccaccagctgcaaaatgtcatagcagcagtaccaacattgggaacctgaacctgcctccaacatccttgagcaaaatcacagcgaacaagaacatgaagtgtcgtttcaggagcagccatacacatcaagcagctagaattaatgggaacatgtttatttgttagctgaaaccgagtaggaagactattagtacacacacgccataggaaatgcttgactttcggagggagtttaagttgccataacttcatccaaacaccagaattattgggttgcaagttgctggttttttcctgttgcaatatagcataggcactttggacggtaaacaaaccagaagactccttccttcaataccattcatcactctcagcttcatcaagcaaaggaattttccacaccttctcttgatccctcacagtatgaacatcctttagcacctcttcatcctattcacgcacatccactttcatgagagcattcaccattcttcccacaagacattcttgctgagattcaacaaaaggattaacatcatcaactagccaaggttcagttaggatattaacttgtgatccactacccaccaatcttctagctcctgcccaaaccaaagcttgggattccaagacgctcctccaaatgtaacttgggttatttcctagagatgcagaaaggaaattaccatttgcaaaatatcttgctttgaaaattttccccaccaaactactctcacaagtaagtaatctccacccttgcttagctaataaagcaaggttaaagtaacgaaaaatcacgaaaacccatcccacccgtagtcttgtgtttcgagagcttatcccaactcaaccaatatatacctttgttgttatttgatcgccaccaaaacttgctaattgatcgctcaatctcctgacagataccaaccggtatgagaaagacattcatagtgtaagcaggtaacgcttgaaccaccgatttgatgaggacttctttacctgcttttgaaagaaatttgttgtcccaactctgaattctcttctgaactttatcagtcaaatagctaaaaatcgcctttttatttcttccaatggtacttggtagacccaaatacttactacgctcatcagcctcaagaattcccaatctttgacaaatatcatgtctcatagtatgagtagtattactactataaaaaacagtagacttctcaaaattaacacgctgccccgaagcattagcaaagcaattcaaaagacgcacaatgtgggacacttcatcattcgtagctttgcaatacaaaaagctatcatccgcaaacagcatatgagagaccttaggagctccattcgccactttacacctgtaacgccctaaataattaggcacgttacccaaaatacttatgaaaccctaatcccctaatcgggattactaatcaaaatagcgcagaatttaaacttttatataaaacataatgaaaataaacttgcaatacatttaaacttttaaacagttgggaccccaaaaatatttacaaacgttattacaagtcttttctttctagccgacctaagcagtaaaatagaatttcaaatgttcaacactagtaaacccttaacccgcttggtctgatatggctcgaacatgtacattccttgctcagctcctgaaactcatggctgatcaactaatgctttaccctttcctgtacagtagagcacccgtgagccaagctcagcaagacagtataaatcataacaaatataatatgctca

SEQ ID NO: 228966 - DNA, 2162 bp, Cannabis indica
ccgtcccaaacctgtacttggccaaggcttgtaccgaccgctatgtaagatccctcccgggtccactggacagagcatactccatcattaggtcccaaatcgcacaattttgttacctgagggaaaaataagagagtatgaaaacaagtaacgttactgactcgatatagtttaacataccactacaagggtatttttttaccttgctatttgatgcactccatagataaacacaggttcccaatccaacggcaagcatattttgtgaggaccaatcaacaaggttcaaatagaagtcatcttgcagagatggagcatctaaaacctgcaacaaaattcactaataaaccaccaaaaatttaaaaaataaaaataaaaaagtagagcgtattctatcaaaaggcaaatatgccacaaaattcattaatacataaacagatcatatcaaaagacaaatacatatgaattgcggttgtaatttttatcaaaacagaaattgaattacttaccttatggggagttttagggaccttccgtggtggcttgggaggggtagaaatttcagaagagaaaccggagtcgtggcccaaaatggaaggggaaaatggagagctaggacccgaatgatcggtcttaaacctcaacatgtttttactgggactactcatcggggaagacccgagaacttggttaccacctgcaggagaaaaagacgcaaagtcagacccgaaaagttcagatttcaacaatctcgagtaggcttcattgctgccttctttaaccggtgaggccttctccattaacccaaaagtgtggagcctagacgaagatcgacaaggaatgaatcgatcactacaggtggaagatttggatggtgaagataagcttgaaaggccccgaaaggaacccgaaaaggtctcgagacgaagagatgtctcggacattccagatgggaggtttaaccctgttttcttcgtctgaggtggggaatccattgttgggagcttgtgatagagagaaagatggttatggagtttgaatgaaaaagaaagaaagagagaaatatggggatatcggaaaggccactctctgcaaccaaagaggccttttttttcactgagtgtgagctcttttgtgtagccgaaggatctgtaacggtcgaattttggtagggtttataggcgcgggtttggaccttttttaatataataattaatggaacatacgtagtaaataaataattataaaactaaaggaaaaaaaaaggtaataaataaataattatataaaaaaaaggtaattactatttatttttggtattctcttccatgtaatactggatctaacggtcaattgtattgatcaagctaattttagtaatcttgggtatagttaacgaatcatgtagccgttgctctttttttatttattttttaaatatatatatatagagagaacattttgtaatgggcagtaccgattgatagtactttacatatacaaactcattgagaaaaataataacaattagtaacaaaatactatacctaatatatcaaaaaaaaaaaatactatacctaaatcttaaaatttattcttatatattggtattagagttagttctttcttttaggaagaaaacgtagttgattaatatatcaaaagttaaacctcacggtcattacataacatgtttaaagagacggtggatagcggaatatcaccaaacaccttgtgggtaaatgcccacttagccacattatgggcgacaaaattacaaattcttttaatattagagaaaatacaactataaaataaagaagagtgactattacaaaatgagacgtagttgtcaatgacccaacatgactccttcccattgagcgcattgatcactactctcgaatcactctcaacaataacaaacttgactttcatatctagcgttggaaataaattgtataaatgaactatttttttcattatcaatattctaaattttaaccataactaaatttaattattaaatttaataaaataatatattctaaaattattaggaaaatttgattatatatgcatactaatgggggaaattatttctctaaacttatgcatttcaaaattaaaaaaatatgaccactttacattaaacctaaaaa

SEQ ID NO: 228967 - DNA, 922 bp, Cannabis indica
aaatgggctctcctaacagtaagatgaggattaacagcggtgcaaacttgaacgacttcgaaagcgatattctctccttcacggtcgcaatcaagccagaggacgagccattggcacctccgggcttcctcctcgagcgtcttcttgatatcgagtttgtcactgggaacaaatttgcgtacaggagcctggaaaagttgggcgggatcgcaggaatgccattttcgaaagcggtcttcgaattcgagctccataaggtggccggtgacagaggtgacgagcatatttgtggattggccattgatggtgtaagggaactcgaatatcctattgtatcgagaacggccgtccctcactcgaagcccttggttgccagacagaatggtcgctaccgacttcgcaacggatggcttttcggccacgttgagaactctgatgctgctacgcccgccggacatggcggatttttggggttacagacaccgggcaggactgtgttaagtgacaatgcctgatgagtttcccgcctgatgatgcttgggctatttacataaaatattcctaattaagattttggctaattaggaaatgttaaaaatatctcatgaactattaaagattattggaatgaaaaacttttatctaatttcattcaattttactatttcaattattatttatgcactaaatcatactctccagactttgatatctactaaattccctcaaattttactaaatcatgcttcctgaattttcatccatgttaaacttttttattaaaattggacaaaatttatcaaatccaacaatctcaatattttagagatatttttaacaaccttaaaaattcaaagaagataatttattatatgtcaaaattcatagggcaaaaattctagttagcctaagatttttagcc

SEQ ID NO: 228968 - DNA, 1528 bp, Cannabis indica
cctattcagttcaacttttcttactgcaattttaatggagtaagaactaaacagccaaaataataatatgtaaaaggtaaaaaaaatttaataaataattgcatggattaaactagatactactaataatttttagcttattagacaattaaatttcaaccacaaaaaaaaaaaaagtcaacttttgttgtttaatagtttgtattattatatttggaaagaaatctcgaaaattatagtgctttattttgaaagtgtagttcaaatatatgatttgtttgagcatctctaaaatttgagttaaaataggaggcaattttttttatttttgtctccaatcatgctgatttgattattttaattatattttataattttaattttgttaaataaaaattaatttaataaaataataataaaaataataatgcttttgattaaaataaaattaaaaaaataactagtaaaaaaatagagaactccctactcattctttattatagggagttatattttgcataattaaaactcatttttctaacgaatgaagtaacaaatattatattgacattttaacacaagacttctaaatgttaatttatataattttatttattatgatcattagcctcggaaaactaataataagaaaatacatagaattaaaagcaaattatttttttagcaaaaattgaatgcacgtacattataatttagaagaaaaaattgaaataacaatttagaagatagtaagatatgagttaaaaaattaaattgctaaaaaaagtactttcatatagaagttacttgaatataattttaaaagtgattatgaatgatttcacacatttttttctttagtaatttttgctttaaatatataaggcaagacattaagccaaagccactacaaaggggacagctccccataatcaaaacaagcaaagatgtagcaataaatttgaaaaaacaagactcaaaacgagctttttaacacccaaatgcgattgagcattgggactaatccctaagacattcaatagtgtcaattaagaacttagcaatctgaaaaaacagttaaatgatgcctgttttggtgtaaggcaaaagaaagaactgtcatggcttcaacatggagaggtgacgaggccgacacctccttggaagaaagccactccaacaccgcctgattgatccaccaaagattcatccacacaaaccgcaagcctatgctgcggcaatttgtgaacattttctttggtgctgagagaattcagctacccttttagaaatctcggtaaaagtttgcttgcaatctactttcggttgcctcggaacaaaaccatatttcttttatcccaaatttccaagagagtgcaaaacaaaatgtcaaaagctacaagacactagaaaatgagctctttggtgttggaaacctgaatcgactccaaaaataatcctcaataccaatccacacatttttttttcttcctaattttgtttactatttttcactctataaattatt

SEQ ID NO: 228969 - DNA, 1182 bp, Cannabis indica
cctatatcaacaaggtacatcttattttctagtagcccatcacgaaagaattttacagttaagcgtgcttgacctagggtaatttcaggatgcgtgacctcttgggaagttttcctaagaagcgtacgagtgaggacaaaacacgctgaaaatactcttgttagtttatagagttagtcgtcattttatgaagtaaccaaagtgacatactcgtgtataagaaccattagtagcgaggatgttacacctttattttgatggttgttcactttttggcgtgagaactaaaaaagcattttcatcattgacttacacctcgatgccagagtatattaattgtctgacacgtttgactgctggactacttagccgtttgatgtatttgtgcttttgaagatgtgattgtggattgtccattcctcttcacacggatagccacctcgagtataaatacccttataagactctatttactattttttttattccaattttgagatttgcagccattagaatttaaatttctctgcaactttgaaagttaaaactaaacccagattcgaaacaacccaaactaatctggagcgtgactttgagctttgtatccaacttctttcaaggattagggttcgagaatctccaaacttttcacccccagtgatctcgagtgctacatcaaaagtaattgcgactatagattttaacttagaatttgatttgttgattatctttgccgctcatcttcgcaaaaggtgtgcttaactacctcgactagacccagtgatgtttagtttaatgttgtcgattccaccaagagatatgcattggtttaccctttcgccttttaactgtgttttttagatttactattgcatgtaggatttacatgttctgttctgaatgaagtaaggatttcttaagcttgtgattgatattcttggtagtcttaggcgtaagacactatattgtctttaggttttagcactagaaatttatgggaatgactgttttgttgcataagtgctggcaaaatttctccgtgtccagaatccttctagttcttggtaccttttaaatttcttcttaattcgtcatcttgatgttcctgatttcctatttagaacgaatgacccctgaaggtttttatttctggatagtaaatcttgtatggacctcttcaag

SEQ ID NO: 228970 - DNA, 731 bp, Cannabis indica
cttttcctccatgaatgtagctttgtagggatttcgagctccatttttattggaatttatggaaaaataattagttttagtttctagttttattctgtttggtagaggagaaagtggggaggaaagaagaaatgagagaaaaatagatagaagcaaatttgagattgttggttaaaagaaaaaggagtggaaaatagagagaaaaatattagtaggttctaccaaaatgaatggaaatatttaaaataaaattaataatatggataaaataataaataacataaatataatttttttttgttcttccacttttcaacctaatacctaatgattaaatggtgtttggtatcatttttttgttctttcttttaaaaagtaattttagaagtgagaataaaaaataaattttgaagttttcaaattacaaatggcattggttagtgttttctaccatattgatacaaaaaaaaaaaaaaaattaaacaaaaataatattttattgtttgtttttaaaattcttatttttgcaattttattttttgaaaacggtttttaaaaaataagaccatacaaatctaattgttttcaattttctttttctatttttaaaaccaaaaaatactttttaattatgacgtcaaacgtgcattaattttctcaatttttttttttagtattttctttctctttaatatttttcacttctcttattttcttgggatttttacata

SEQ ID NO: 228971 - DNA, 709 bp, Cannabis indica
aaaatgtagtattttttaaaatttgtaaaaaaaaatatataattttaaaaggagaaaatttttttttggttcttaagctaggtgagtcttaaatacagacttagcttgtctatacctaacatcagacttgatccattggtattatgtcaacgaaatttggatgaaatgaatatagtgtaactgagaaaaaatatttgtaatgattttcataattcataaagaattttataagagagaaaagtttgttgaccaaaactaaataaggtagacttgaacttaattagtttgagagtgatgtgagaaaattccatcgtctagttatacaaattaattcccattaattaccatggatattgggtaaggccaaaccaaacttagtggacttttctcacattatttttggaaggttagtagaacttagaaggatgtatatatagaatagaagatagaattagataccatgcatggaaagaaaaaatgtttatatctctcacataaaaaacaaagccacctttcttcactttttttggcttggtttggtgtttcttttctacacaagagggctaatttttgactttgtgtcatagtttaatatttttggttgtattctgttaacttatatagaaaaccaataaaaaaaaatattttattactaaaaatttatttaactagatcaatttgactttaacaatattaataatattaaaaa

SEQ ID NO: 228972 - DNA, 1366 bp, Cannabis indica
caacctaggcgcccaacattgatgctggacccaggttgtgccttgggatgtccacgtgacatcatcagctttatcgttcttcattttaaaatcatggtgaccttttgttaaaggataacactcaaagacaacttcactggatctcgatgcttacctgggtgcccctagtgtgtaggtgacactgctttatcccgagttgtggggtctccagtgttgtttcctttatgctacgtgttcaaaatattgtccacatcatcaagccaactttttgggtaaacataatattcttataagatgacacaaatcactatgtaagaatgttgataggcgcctattacaaatgataggcccactatgcttgtttttgaattaataattcaaaaacataaatatttatttaaatttgaatttaaaagttggttatagatatttatttatggttgacatattctcttaaagtggttgagagattctctctaagtggttgagatattctttcgattcgttattagatatttagtgtaaactaaatatttaaatttagaaataatatctatagcagaatcgattacaactatttatttacatattataatatgattatttattattttaaataaataaacaaataaatattttatttaatttgataaaaaaaatattttatttaattaaatctttaatattattttattgtttataattaatatatcagtatagatctaaatgtatatatttatataatatatttaggaaacctaaaaaaagttaagaaatacaagattaattctaagaataatattgtgtatatgatctatcagcccatactgatactagtgtgttgtggttaatcataaagatcatggtgtgagatattactgttctttgaatacaacttacaaaaagactcgagaacacttgatagtttttcaaaagaggtaatttttttcgttcatctttccgttttattatttaatatatatgaatgtggatgatcgtaaggtgtggtatgataataatcttattaaacgtgtttgctgcaaatctaattatattagtacctctttacacgcaaatttattgtttaatgatatttttcttgatatttttcttattaggtttacttaaaagaagttttaatgaagccattttctcaataaaatgaaatactagcagtaggggaagttgcattcgttaatatttgtttcatgatccctcccaaatacttcttttctaattaataaagggaaatttgacattttatgcttaaaaatgactaatggtgttaaattatacctaattataacacatagaaaaaatataccaatctttctcttttcttccaaaaatacccttctcatttcaa

SEQ ID NO: 228973 - DNA, 1252 bp, Cannabis indica
agaataagattcgaggatggaagaggtctcttttttcgttggcggggaaggaggtgttggtgaaggatgtcattcaaggaatgccaatgtatgatatgagttgcttcaggtttacaaagaattttataaacagtgttcctagtttagttgctaaattttggtggggttctactgaaaagaagaggaaactttatttgtgtaagtgggaaggattgtgtaaaaggaatgagaggggggtcttgggcttaaaaatctagagttgtttaacaagtctatgttggcaaagtaggtgtggtgattggttcgtaatggtaattctttagtggctcaagttctaaaaaattcttaaaaaattttcgtaggtgatgtgttgagtgctaaggtgggttcttgcccatcggtggtgtggaggagtttactttgggggagggagattattttagatgggtatcgatggcgtattgggtcgggaaaatgagttcgtattgtgaaagaccgctggttgcctaggcctttgcgattttcttttctagttaagcctgtgctaccgcctgaccttatggtggtgaacctgaggttggcttttggggagtgagttttggagattttatgagctaatttttgtcatgaggatgtcaaacttattcttggtatggtgcctgcctcattagattctgaagatagaattatttggcactataatacaaatggtgagtattctgtgcaaagtgggtattaggtggcaatcaagaagaaggaggtagaggaatggttggatatgacgggggtggaacaatggtggaggcaagtttagggtttgaaagtaagcactttctttggcatctttgtcatgggtggatgctaacctttaaggtgctaagaaagagggggatgcaagatgtggcgtgatgttgtagatgtgggttacaaaaggaagatgaagactggtatcatgctctttggggtgtgattaggttaaaagattgtggaaaggttagtaaaatgtgtgatggtgaagatccgatagcttttttatgtcgcattgacaggttggtggtgccaaaagacaggtttgatttttttattgtattaacttggcaagcttggtatatgcaaaattttgtgttacataggtcttttggttccttctatggatcgagctttggattgggtggctgaatatttgcatgagttttgggataaaactgcgggggagcgtttggttgaagctaaactaaaatgcaaatggcag

SEQ ID NO: 228974 - DNA, 1050 bp, Cannabis indica
tgctttgtgctgtagaaaattgttaatgaaaagccctattatgtttttattacattggcctcgcaacgcctgcaccactaactgttgaactatacaatcatgctgattgcaattgaaatgggcccactgatgtatctctttgaaatgccaatattaaatgagtaagacaagaggctagttaatagcagaaatatctactcaatcatatcatctcatgcctaactatgagcttcaatattgatatttcttaggatgatgtgaggcaccagttaggattggacaagatccaatccattccaattgaactgaatcaattcaattacaaaaaattgtatatccattacaattggattggattggatgtcaaaagttaaatgtataattagattgaatcagttattagatgtcaatctcaaaatccaattacaattaatatgtattaaaagttaatttatgtataataaaaagtatttaaaaaaaactgatccaatccgattataaataatatgtttagttttttccaacttttagttaccttaaacctataaggatggtactttttttttagaattttaaacttaaaagggtgataattagttttaatgtaatttttttttcatggttttaagtttacataattaaaaatcaagtgtgtatttgaatattcaattaaaaaccgatttaatctaactagtaattgaattgaaatggattggatgttgaggtctaatgaatcagatgatgattttccaaatctaattagtaatgggattggatcggatgaggagaaaattattggattggatcggatgtccattcctagcaccagtggtgccttttaacatttctcttattttatgagcattgttatttggtaccttaaggtatctatcaccacaccgatgtgacaccgtataattagttagcagtttcttatatcatttattaaattaaaatgtgttgaacccaattaggggtgtgcataaatcgatccaatccaattacaactgaccgaatcaatcacaattgatcttcaaacattggatatct

SEQ ID NO: 228975 - DNA, 2166 bp, Cannabis indica
tggctagtgacattattgaagtcgccaataaggcaccaaggagaggagttcgaagcatggagagtgcgaaggagttgccaagtattcttgcgaagagccctgttgggttctccatagatgcccgtgagtctataggtaggaaaagtgctactggtaacaaaacaatcaatatgattattagaataaccatttaatttaatttcatcattctctttccaaagaagagcaaggcctccactatggccttgggcctccacagtaaaagccccttcaaaaccaattgctcttttaatttcatcaactttagcctttttacaaagagtttcacacaaaaaaatgatgttgggtctcttttgagcattaacctcaataataaactgagaagtccgttggctcccaagcccccgacagttccagcttagaatactcataatgagttgcgagcctcgtcgagacccgccaatatcacattttttggaagctcagtgtcatttttgataaactgttgtggaacagtttgggccgagtcagcattgtggcccattaagtcattgtgatccatgtcttcatctaatggatccaaatcaatagaaccttctatagatgttctcctacgtttgacatcagagattggtacacccccctttttaatgccattattcttctgtgttgcagctttattgtgcagatcagaggaatggatatgttgactatcccctgtattaattgccgaatgagtgccttgatttcctccaataatgttgggattggcattaactttgccaatattctccacgctggcttcctcaatttcagcatcagaatttgtcatcatttttgctgagctggtagatcgccggcctgagggatgaagaccaacttgctccggttgccatccaacgttgcgtagccacttggaaccaatgaacttggattgacgggttggttgagctctcatccaattaccgtaaggcttgacaattttttcaggaggagtatggaaaagttggctgcagaagttttcagtgtggcctatgatgccgcaaatgaaaaaaaaaacgtgggggcacgttcatatttgaagttgatccaaaagctatcttctccttctgggctaatcttcattttccttcgaagtggtttcccaatatgaagagtaacccgaatcctgagaaattctttccagtctccagtgaaattgttcgggtcagattcaatgtaaactcccatcctatttccaacacctttaaccacatgttctgacataaaacctggttgtagattgaatatttgaacccaaatgtcaagtttagacaaagggattgatcggggatcatcaccggctttgagtctgtcgaatatgatgagcttacgaaggcatgtccaggggctgccatctatgactctattgatgtcaacatcatgatataattgaaagagaaaacgattcgatcccaattctttacaaaacatacccattcctggtttccacagagaagcaagttgatgttggatagtgtcaaaatccatttgatgatcttggatgaaagttcctactaagcaccatctcgtatccactcctgtatcaatgctgccagtattgtgtataataacatcctcctcttcttcttcaagattgaggttggcacatagatcatggatttcttgaaaattgtgacttgaggaggccataaggacaaccgaaggggataacaaaagggacagcaggatcagaatagaaaaaaaaaagggagataagtcaatggattagaagatcagggcttacagcataaactaacagggaaaacaaaaaacagagaaaactatgtcatcagacatcactggaatagtctaaacgtatttaagtcaactgtatttgtaattttttgagactttactaatattatttaattctaagggcgtggccccgtggactagaagtgtttgaaagaatactgataccacgtataattctcttgtgttaagttttttaaattctgcatttatttatttctagttttagtttgatgctggaaatctgtgttcagcagtgacaggattgcaatctattgctgcaaactattacagttgtgtttttactgaaatttagtaaaattattggcatttgcaaaaacacaatttttcaaaattaatgtagcccaagtg

SEQ ID NO: 228976 - DNA, 1336 bp, Cannabis indica
aatgagaaatctggatccatagccaaatgagagtgagtgttaggccaatgcatgcataaggaacctgagtgtaaaaatataaactaattcctaaaccgaaatccttgcctgtgaatgcacagacttgtagagttcttgtgaactcccaccctgcaaacagaacaaagaagtgaaatgaagctgacatttgatcaccaatcaaacttaaaactataagaatatctgtatagacattatacctgaaaatcagttcttccgcatccacgtatcaataaggcatctccagtgaaagccattcttggttggggttgattgggtccatctcctgtaacataggtcacacaacctaatgtatggccaggagtaggtcgaacctgcaatcaagaagacacgaaaacagctgaagctatcaccagcatggatttatttcatttgcagagggatgaaactgcagcatgttttataatagaaaggatcaaaaaagaatcaaatttatgatgtattgattgagcatttgaaaaaagttgcagtcttaagttaacattctattttcttcatattcccgaaacgaaatcaacttagaagaaaagggaaataaaaaaaaaggtttggagtaaacagtgtcatgtaaaaatattgtaggacaacaaaagatgccaacccatcagaaaataagattttgcacataaaaactgatattaaacccttctcttgaaagatgttcaagagtaaaaaccaaacagaaggcggatgctttaaatcacttctctaagaaaataggaaacaagtaacatttttgtttaagttcatccaacatgttactttaactcatgaaatttacagaattctatcttcttcttttcattcactgatggaggtctctaatgaaacattttcctattcaataattcaaaaaagataagcaataatttcccacctctaaaaacagatcgccaaaatatattttatcaccagcttcaattagaagatcagctttcgatttgcttgctttcgaaatgactgactgcacgccggggaccttactctgcaaaaatggttcttttgattttggaacaagacattgatatttatgatataaagacataaataagttgcaatagaaaacctttatggtgccagtgccagttacatggtcagcatggacatgagtgttcatagcatatattagcttgagtcctaactctttaacaagggaaagatccctctccaccgttttgtcaactgggtctatcaactgcagaattaaaatgaaccaagaacatgaaaaagtaaacatttttttttttttgaagttcaactctcaatggaataaagc

SEQ ID NO: 228977 - DNA, 1746 bp, Cannabis indica
aatagatattacggtaaatttctcatatctgattcaagttcaatatcggtcccttccgatgcatactccatacatccaactcaagcttactttaaccaatgccctggaagggacataacacttatataaggtgcaagtaaactacattgtaaattatcctatcagttaaaccctgtgtattgataaatcattggaatacatttaatcacacaatcttgattactttctattgtattgacaacacaataaataagaatatcaatgtgataaggatttggatgaatttataaatcaaataaataaataaatgatcacatgaactaaataacactttaaataagtaataaaaataaatctgtttctttattgataattgaatagaaaagattacattgaaatagagttttatttagggcacaaagtccaacaaaaggttaccgacattattttatcaaggaagctgggtagttttgcttgagaaaaagagaccttcaccggcataggtagttttcaccgatgcataaagttctcgatgaaatgtgagttgccaaaatttatttgtcggttgagcctcatttgaaattttttgtcggcgacatactgtactggcaaaagtttcctacaaatttagattattcacgggaaagttatgatagctaagttagaagtgctgacaaaactttctcgcaaacaaggatttacacaagaacatatttttggcgcattaaactgcgccaaaaatatttttttttagtttttttttttaaattttctttaccttttgccagcgatagaaaacgcaccagcacaaatatcttaattatttttttaaaaaaataaattgtcgaaattaaatgaaatgtaaatatgattttagtttaaattaaaaataaaatttcataataagaatttaatgtaatatactaaaataattttgagcagatattataattacactaagttcaagtaaacattacagaaataactgaaaagtagttgacaaagtttatagaaaatgctaatatttacactgaaaatatcaaaataatagtgagactaaaaatcaatggaatcatcatcatcgtcgttaatctggctgggatgggcaacttgtgatgaagatctagcgctaggaggacaaagtagtggaatcaaagacatctcaggcatgttgtagtcaagaattatgccagaaaattacttgaactgctcctaaaatgtcactaggtactttttctaagtctgcatcatttattttttataatcatttcatgattcctgctcttccacctttcgcttcaacaccttatattctttgacgttgacagtaggctgtccagaggtggaaactgcccaaggagttgctcttttggcccctgtcctaagtctaggaaaaattttaatgcctcttaggtagtatgactgctcaccaagtacatgtttcataacaggcaggtctgtgggaaatttggtggattctacatcatactaacgaggctaatcactcaacacaggttaagattcacgtctctcaaccatttgagtcaacaaaaaatattaatactgttaaaattgaatagaaatgaaatatcaaacgatatggtcaatgttaaaattactgacatgcacttgttacgtgtatattcattgcactaagtgttgttcttgtggtagaacttctcaaagtatccatcgcactaggaagttcctcaatcttaaaaatttgcctatttaatgaaaaaaaaa

SEQ ID NO: 228978 - DNA, 1132 bp, Cannabis indica
aaaatatatattatgaataagaatgagatgacacattgtgaacacaaggcccaaccaaagaattagattgtccagtcgttcactttaagtcaattccaaatctattagaatccacaaatcatatcaaaaggaaccaacttaactaatatccaaatcacaaaacaaaaaactcaaaccaatattagtaagcccttctcataacatcttgttatttaatggaatctccctataaaaaaaaaattaattaatctacacatacgtatatgaaatgaaattatgactgaaagtagagaagtgcacatcaatcatcaatctacgagaacatgataaagcaattttttggtgcaataaaagaacaaacaactgtcgctagaggctcaaatacatgtcttgtttttcctatccaatttatattcgaataaatatatgaattatattgagatgccagtataaattttctttaattttgaccatttagtggaaaattggaaaaatacaaactaattaacctctctctctcttctcctgcaaattttcttacaataaatcatctattttttatttttagtttaaaaaaaaaaaaaagtggaagagaaagatagatgatattgcatattatagctaggtaggttaatcacatggtgtagtactttttcagggtgttcatcatgtatatatttgtatatatatagcttttgaaaagcagtgattagactgtatgttcccacttaaagtgcaagaaatgaaaaatagttgagttgggctccctctatctatatactccaaattgcgagaggcatgctctaactattccattttctcatcattattttcatagtgtttgtcttatggcaaaaataatacacatatttttgtcaaatataaaataaaagatttaattgcagtaaaatctcctaaaagcttactttggtatcaattattcttgaaatccaatttgtgctctgttagtatttagtcatttttattcaattttaactctaaactgtcaaagtaaattgtctatgtgtactgaaggtattatctacatgtacagaatgtataaatgacacactttaattagaaaaattataataataaatgaatagataaaaaaattaaaaaactaaattaa

SEQ ID NO: 228979 - DNA, 2494 bp, Cannabis indica
aattaatatgattttgatatataataaattaaatataaaattaatatgtttgtttttggtagtttaatattttataaattaaaacaataatatttttttgttgccttgtttgatttactaatgctaatgaatttatatttatatagtgttggaatgagtgaaaagtaatttcttattgggattaaccacaaaaataattttatgcattattttctaacataataattagacaataaaatcgaggtagagagtgtttgttatgaacttatgggagaagtatatattaggatgtgggagcatttgaagggaacctcatgtatttttttaaaaaatggatcccatagaattttagtgggtaatatgaaaacttttacacattcgaattttacatatatcttcacatgtgattctcttgccattctcatgcaaaccaaaacttaattattacgaatactcttttaaactaatctttatggtataatgcaatctaatgtgactcagactatgaagctcaaagaaatacccaattggggtcaaagaaatgcaatttcagaaggtgcaaacttaacttaattttggggctcaaagaagtacttatattgaaatggactgcttgattgtactggtgcaagcagtgagaagttcttcttttatgctttctttgtttgatttaattattaaaagattgtaaaacctttctcattgattacttcacgtataattattttataaaacattgatttggaaatcgtaggactcatgttattgcaagagctagcctagtttttgctgattgtctttttggtgtgtataatgtattagctgaatataagccattgtatttattttaattaatgaaatttgacaaatgaatctttcaaaaaagaaatgtcttaatgtaataaatttgagatgttatttgctttctaaattccttaattgtactttaattttctttgaccattaaaatattcatactaaaaaaaagaaaaaaagatatattatatttttttgctagtctagctttttattaaattataaacaaataataatgtgcagtataaataattaagtttaactcccgattgtagataaatacttaagttaagtttttgacaaaaataatacttaagttatatttttagaacttcagtagatacttagccgttaagtgtcaagtcaatagccacgtgaaaattaagtccaaatcattaaaattttatttttaatttaaaaaattaatttaaatttatactaataacaaaatgacacatggataatgacttgacacttaattgttgggtacttacgtaagttctaaaaatatagcttaggagttattaccattaaaaaataaattaaggtatttatctgtaattgagagttaaacttaagtgtttatgccgtaaattactcaattaaaaaagagaaatgcttaaagacactcacggtgcttagtacctttgtgatgtgtaatattgctattgatgcaatttattatcgactctcacttattttactttaccaattataggacagcaacttatagtggtgcaatgcactttggtatctcatagcaatactcattaaaaaaatagaccaatagacaatgagggaagaataataatatgtagagtaatttgcggcgtaaatatctaagtttaactctagttgtaaataaatacttaagtttaattttttgcggtaataatacttaatttatatttctgaaatttttataggtacctggccgttaaatgtcaagtcattatctacatgttattttcttattagcatatgaagcaattttttttagaaaaataaaaatttaatgacctaaaccaattaagaattttcacgtgacaatttacttaacgtttgatagccaagtacgtacttaaaaatttaaggctaattatgatttttgccccccgaactttgacatgtactaaattatgccccatgaacttttaaggtcgttaaaaatgccccctgaactattaagattgttatatttaaggacttttatttaatttcattcaattttactatttgagtgattgtttatgtactaaatcatgttccccagactttgatatctaccaaatcatgatcctcaaactttgacatgtactaaatcatgctcctgaactttcatccatgttagattttttttactaaaattggataaaagtccttaaatctaacaatctcaatagttcaggggacatttctaacgaccttaaaagttcagggggcatgatttgatacatgtcaaagttcaggggacaaaaattctaattagccaaaatttaatgaactagaccaattaaagattgtcacgtaataatttacttaacacttaacaattagatacttacagaaattttataattaattataacttaagtatcattattacacaaaattaaatttgagtatttatattagaattattggaaagattttgtagcaatatgaaaaaaaaaaaaaa

SEQ ID NO: 228980 - DNA, 1283 bp, Cannabis indica
ttttcaaaacatatataatgtcacttgtttttttaaatgtaaagttgagttgacaatttcgtaaagtttgtttttcttaaaaggaaatccccaaagtttaaaagttgtgctatgttttaaattattttttttattagtaaatttttatttaaatcacattttttcaatcataaattgtagttaatcattataaattaatttgaaaaagcatacttttggcctccctatgaattagggtgttacacttgtactttttgaagtttcatattaagagaatttgatccctgttcgttctttctataaaacgccttttgtatatattcacaaggtacaactcaaacagttatcctatctgtttattccttcctttatcccagtttgcaacctgcatattgccctgacttttgaacattcccctgaccctgcatccgatcgacctcttttaacaatggaagaactcaccaacaacttatctgccaatctgaacttaactgagattgagacaaaaatacattcctttgctgaaccatctgaactgcctgaagatgaaaacagggaagagccttctgccttccttgctgtcaaactgctaactacgcgccatttcaatcccgaggctttcaaaaagcgtttaaaagaaatgtggccagagcgtttctcaatcaatgtgctggaaaaagagcccaatttctttaccgtggaattcggatgttttggggatcgcagaagggtactcattggacagccatgtcattttgattttaaacttattgtgatgtctcctcttgaagctggatcggttgtcacagcggagatgctcacttcaactccggtttggatccaagtttcgggtattcccttcctcaaacgttccagggctcttgctagaaaactgggggaagttttaggccggttcatagaggttgacactgcctctctcaaggaaacctggggtccctatcttcgggttggaattgagatcgatgttactcaacccctgccccgtggtacaggctcccactttcaaggtatggcatctccggtttggttagaattttgtttcgaaaatctacctgacttttgccatttctgtggccgccttaaccatatcgtaaatcactgtcccgagtttctagcaaaatgtgactcctcttcagccccaccaccacttcaatatgatcacaccttaggagcaaaaatccgtataacttccaatcctttttacatagccagcattagaacccgtcttcgccctcatgacactcaccctgtttccctagccc

SEQ ID NO: 228981 - DNA, 2579 bp, Cannabis indica
attatttttaatcttacttacaatcaaattctccttagcagcagtcaaactctacattgtatcatttttggcatgccacacatggtaaaccagtgctgtcattgcaacaaaataaatgagcttgcaaaacttgttgcattttgcttttcctatcaacctgatcaagcttccaaggtgttacgaccaatgctgccaagagagccattctttcacctgctgcaaatagtttagtagcaaaggacaatcgataaataaatgatccacaatttcatttctaatattgcagaatacacattttgcatcaacaattatgtgatatttcagcaacttgtccttggttctgaatcagttttgcatggctatccaacaaaaaaaagctatgtttaggcacattaagtcttccccacacttcttggctccatcgtattctgttttggatcagggacaatagcttatatcctcgtgaaatctgatatttttcatttgcaaactgtcgtatgtcaactatttgtttgagtttttctttgacagatatcagcttcctccaataccaactcccatgattaggagcttggtacgaccactaatcttcttctttaatatatataatatgtacccatcgaacccataagttctcttccatgtttatttgcaactgcccaaatatacttaaataaggctgcaatattccattcatcaatccttttaaagccagatcctccatccgctttagacttgcatacattatcccaagcaataggaccagacgctaaaaataaatgttagcctttccaaagataggcacgacagatagcttctatttcattgagtactttctttagcaagatcataatctgactccaataagaatgaaaggataacaacacagaattgatgagtacaactctacctgcaaaagataaatttcgagtgctccatgctttaatctgggctgtcattttctcagctagtactttacattccttgcttaagattctttttgaacatataggaatgctaagatatctaaacgacatctctttcttgccaaaccccgaagtatcaacaatcagttgcaatttactagcttgcattccacaacaataaatagcttattttgatgaattaggttacaaaccagatgtacatgaaaagagcttcaagctttgtagcagataataaacacttttgaaatcaccatgacaaaataggataacatcatctgtaaagcttagatgatttaatttcatctcagtacacctttcatggaacttgaaatctgatctagtacctgtctgttgcatgatacttgataaatattccattcctagaataaaaaaaagtggggacataggatcctcttgttggagccttcttttttctttgaaataaccatgcaaagaacgattaaacattagtgagaatctaggtttcctaacacagttcataaccaacagtacaaacttttcagaaaatttaatggccctcatcatttcttctagaaaatcccacttaattgtctcataagttttttgcaagtcgaactttattatgcaccttgcttttgttgatttcctcccacaatgtcgaataagatcctggcaaatcagaatattgtgggcaataaacctgcctttaataaattccccttaattctgagctactaagtatggaaggataagtttgagtcttgaacaacttaatttagtagctattttgtaaatcacattacaggaagcaatgggccgaaaatcactaaccgtattaggacacttaattttggggataagtgtcaaaatagtagtgttaaatctctttaaggatttgtcagattgtaaaaaggaagtaaccgcttaaaagatgtcttgcccaatgagatcccaattatcctggaagaattaattggagaatcaatcaggacctagcaccttgtctccaggaatttcaaagattactttcctcacatcttcttttgtaaaatctctcaataacattttagcttgttggggattcaccacaggtccttgcttgaccacttcttcctgaactgcttttcgattatctaacttgtttccatgcaaactttgatagaaggaatgaaaagcattagttacctaagttggttcatcaactctagtgccatgtcgagtttcaattgaaagaattctattttgcctttgtcttactctaatgttgttgtggaagagtgtcgtgttctgatcaccgtccttaattcaactaagcctagctttttgttgaagaaaggaatttactgccttgtgaagtgctgcatatttggttctagcatctagctctctaaaataaagttcttgattgagttgattagcttgaagattctcttgacactcaaagagagccttttttgcttgatccgctgccacttgaatattagaaaaactttgtttattaagatccttgagaacccctttgagagctttcaactttgtaaccacttgatacattttagtcccacaggttggttgctaccatgtttctttaactaacactgggtaccgaggatgtgaagacgacatacaaaaatatttgaatggtttttt

SEQ ID NO: 228982 - DNA, 1769 bp, Cannabis indica
aaatttttggattgaagggagcagttacaagaagttttaaagcgtatagggaagaaggaaagaagaaaaaaagaaaaaccatagaaggactaataactgcctcattgcaacataacggcagacggctccaaatataattaatttatttcattggcataattggcatttgaattttattaaatattttatgcaaatctaagcatgaagggggtatgggttttagatcttttgtccacttcaaccaagctctcttggcaaaacaagcttggagaatttatgatatgcctaattcattgttaagccggctccttaagcataaatacttttcaaacaactcattcttggatgctcacattggccactctccttcatatacttggcaaagtatttgttggggtagagacctactggttaaaggtatgagatttaaggttgggaatggaactaacattgcttgtgactttgatccttggattcccagccatacaaatttcaaaccagtaagttttcaaggttcttctagcttgtcggtttcaacattcatcacagaccaaagggaatggaatattgagttattaaattcttattttcaaccaattgatgttgaaaagattctaacaattcccttaagtttttttgctgaccaagaccgacttatatggcatcactctacctctgggatttacaatgttaaatcgggttttcatctagctactgctttggaggaacaaaatgattcatccacttctgatcctaatcgtggctggtggaaatatttttggaacttgaatttgcctccaaaaataaggatttttgcttggaaagttcttaacaatgtgttacctgttgcagctgcccttttcaagaaaaaaataatagattctgcagcttgttccctttgcacttctagttgggaatcaatagggcatgccctctttggttgcaagcatgccagaaatatttggaaggaaacaaagttctcattggattttactcaagctcagcatatgaatcagggtgactatctgcaattgctgtcttctgctttcaatcaaactgattttgaatcactaatatgtctgatgtggggaatatggaccaatagaaacaaaatttttcatggtggtaaggcaagacagaattcatctatagtggcttttgttactggtctacatcaggactttagccgtgcaaaaacaagtgcaaaaaccagtaatattgctgctggtttgtctcttccagtggacagtcaaccaccttgccacaccagattgcagaaggaggttccttggtctccaccttgtgttaatgggtacaaattgaatgtggacgctgcaaccaattcagaggataaaacactaggtgttggagctgttctacgtgatcataatggtatagtcattgctgccttttcaaaaattgcacaaggtagttttcgatcagacgaaatggaagcaaaagctctttttcatgcgctcaattgggcttcgcaatcacaacttccaattacgcacattgagactgatgctttgagagtatctgcagcactgaattcaatatctgctgatctatcatgtttttcggatatcattacggatgttcgttgtctattatcttttttccctaatgttttagtttcccatgttaaaagctgctaatcaagcagctcatgaattagctaaatttgctttagggctagatgaagacatgtcttggataggagagattccctatcctattttctcagttgttgtaaatgatttcaattt

SEQ ID NO: 228983 - DNA, 1621 bp, Cannabis indica
tttcggatgcagaagagggtgaagtcgaagatcaagatacagaacatgaagcgggagttcgaatggaacaggaggattcactgagggagagtattcgactggaattcgcacaactgatggaggcaaaacaattcagggaggcacaacatctatctgcaactgctgttgcaagaggtacgactgttataccccctgttctgagatctggtagcataattcgaaacctagaaccaagtttctctggttcaccctcaaagcagaaaattaagattacttgtgaggatatacaggaagagattgatttttggactccttctattgtgtgttatgtgcttggggctaaccccccaatgtctatattcgatggttttgttagaagagtctggaaggataaaattgataaggtatgaatgatctcatatggggttttcttggtacggttcaacacaattgcagaccgagatcatgtcttatctgggggatacatattcttcaacaaacgtcctgtgattatgaaggcctgggacccaaataagaactttaaaaaagaagacattcattcagtacctatttgggttcagttgcagggtttggaattaaaatactggggtgaacaaatcctgttcaggattataagtcagataggaacacctgttatgttggattctttcactaaagctaaggagaagttgaattactcgagaatacttaaagaagtctctttgcaacaagaattccctgaacaaattgaatttgaagacgagcatggtgatgatatctcagtctatgtaaattatgaatggaagcctacaacttgtgctcattgcaaaggagtaggtcactctactattgactataggaagaaaggggggagcaaagctgaatgggtagttaaaaaaccagttgtggagtctcgggcaaagacaataagtgatgaggatgggtttttactaccaaaaaaagtgtggaaagagaagactactgagcaccaagtttcttctgctgtggcagtggcaaactcctttggtagtcttcaacaagttactgaaaatcagcaagagaatgctaatggaaacttagaaggtgaaagagatactctgctggttcacgaaggcacagagaccattggggacacaagaggagggggagatcctcctcttctcaatggataaaatcgttagttggaatgttcgaggagtcaacaaccaacaaaagcaacaaatggtgaagcaatttattaatacacagaaggttgggttggttggtctccttgaaactagagttaaggcctcaaaacttggggctttatactcgaatgtttttaacggatggtgcttcacttcaaataacccttggcatcctggtgggagaattgtagttagttggaaaccaactagctataatgttaatattctaagttgttctagtcaattggttcacttggaagtttcaactgtggatatgaaggagtcattctatgtaacattcatatatgcctttaatgatgaagaaggaaggaagaagttatggcgtgatcttcaaagcttatctactttgaagccatggattgtaatgggggatttcaatgacattttgtcaaaggaagagagaattggcaagc

SEQ ID NO: 228984 - DNA, 3053 bp, Cannabis indica
aaagaaaaaccttctcctttatgactgaaatatccagagaatattaacaccccacatgaggaaacaaacaatcgttctggaaaagatcccatgggctctaaaagatcaactaatccatagtccagaaggacaacccgttcgaggatggcccaacctgaggatggtcccattgctcggaccatacgtccgtagagaactcaaaatgacgttggtcttagtacacagaaaatgcactcaaggagaactcatcgtgggaatggtcagaatcccaggacgagggatgaagagctcaaccgtggaggtgcccaatctgtgggagaaaaagcttatgaaacagaaagccgccgcttgagacgacgactggaagaggcgcagcatcgaaactctgagttaaaacgagaggtagcctcagccagggcagcgcaggggatgaatgctccaaatcaacctgaacctagactgagaagaccacgaggcagacctcgtggctcacgaaccaggagacaagaaaaggtccgggaagaacaacccagggaaaatgagacaccccttaataatcaggatgaacagctagaaaggagacaaacagaaattgatgaacgagaaatccctcatgaaaatgaggaggatcttggaattcaaccgggagaacaaagataacttgctaggaatcaccagcgttctccaaaacccatagagcgaggactcgtacgtaccatgataggggaaatacgacaaattgcgctcgagaggaaagaacagatcgtgaagaggcaagtgtgacttcgaggcgatccataactcatagtttgattaactcaaagaggtgaaaatactgaacgagctaatgatcaggagagtatgggaacaagaaaatctacgagccacttaaaaacaaggtctataagtaggaatcagccaatgagtaagtcgagatctacaagcaattactcccaactggatctgcgagagcacttgaatcggaagaaacctgaccttcgccaacagcttggtctaaagcaagaggatccaatccaattgcggataaacatgctggaggacaagttcaagagatatcaagtcggggaattaggaaaatcatctggatacgactctaatgaggaacatgagctatatcacccaaatattatgaataccccttttccttcgagatttataaacccgcatgtcttgtcctatgatggaaccacagatctgctctcgcatttgaataactttaacacgataatgcgagcaagtaatgtgacgaacaatttacgctgtattttgttccccacctatcttgttggagcaaccagtacctggctttacaagttcactcgtcatttaataatttcctaggagaagctgtttggggatttcaagaagcaatttcaagtcgctagggataggcgacccgaagcggcctcgctaaccaatgtaaagcagcagcctgacgaaacacttatggcatacttaagtcattttagcaccgctgccactaaggttagaaacttggatgatagcatgcaacttacagcctttcaggcggggctctccactgatccattaaccgccaggggcaagttgtgggatgatctacaagaacgcccggtaagaaacatcactgagtacaacgagagagctcaggtgtttcttcagaaggaaaaagcccgaaaggaaatgaacttgttgaaaacaagctcgggaggtaaacccagcaatgtttaaatagggactgcttccacaagaattgataactcgggggcttttggtcgaaaaagaaatgatgcaattagggaaccattgaaggatagaaagaaaaaaaaagaagcatgacaaatatgtgccagtgtatactatttatatcgagcttaatgaaactcgaaaaatatttaccttgcacatgagcagaaggttgcctttggcaaaccagagcctatgaggaattcaaggagcaaaagagatcctaataaatattgtaaatttcataaagatattgggcgtacgaccgacgaatgtcgccaattaaaagatgagatagagagtctcgggttacaacctattcctgtggaaggagaggacatcctggttattttgggatggctgcatatttcatgggcaagcaataacgctctgaagtgatatgtgaaggaaataaagaacgagcagtcgatctttgccccagaaccttccaagaaggtgaaaactgaggaacccccttgtaatatcttagaaaataatatagtatttaattggacatattttattaaatatgtaattatttttgtaatggagtaagatatgatcttacctagcgtaattagagtataaattattaaatgattaagtaaagcgtaatttattaattacagaggttattttagaatatgtgggtatcatggataccatttcttaaataaaatatttttctaggcttggtgactgtggaagtaggacggtgtgatccgaaatgtcacaacatttagggatggattatgctgggaatattcaggactaatttagaattttttcttagaaaatcagtttggcggattagctagaattactaaaatgccctaggtttaatttaagattaaacgggtataatggcctttatgatttggatattttatattaaatgagtggctgcttttaaaaaaaatgaataaaaagaaattagaaaattaagttagtaaaaagggggggttattagttttgttagaagcattcgtggtttgcttcttcttcttggccgaaccctaggggaactgcatcctaaggattctcttgctaattcttcatcttcttagctgaattagttatgtgttggagtcaattgtacaatgaaggtaaccattcaaaactttgcccttatttttattgaagttttagattagtataagttagggttttaggaggttttggggctgtggtattaagataggattagagtatgcttttaggttagtttctgagtctgtttaaacttatgggggttagatataacggctgtttggattggatattattagtgaagtatattgagttta

SEQ ID NO: 228985 - DNA, 1724 bp, Cannabis indica
cacatacgggctccagagtctaaaaccggcataacaccccacggggaagcccgccataggtgggatgcaaaattgcagtaaagaaataggtgttccatagtctcatccccgaccccacaaatggggcaggaaatctcatcaatattcattctcctagcaagaaggaccctcagagggagagcattagaaaggatgctccaccaaaggactttatgacgttccaaaattttagagttccacagcttgttccacataaccggagctacattccctaaaggagctctccccaaggcttggataaggtaggcagacttagttgaaaacacccccttagggtctcttgtccaaacccacctatccttaccctgacaatttggcttaccaccctttaagatgctaccaacagtttccttgtcaaagagatcattcagctttctggtgtcccagttcccatcgggtaagagaagatcagccacaaattcaggctctcctcgggggttatgattgagtttagggaagaaagtacacccatggatgatccaagggtcattccaaatgctagtatctctcccattcgcaattagtttacaagccccctttttcaagatttcttttgtactcacgacatttctccagaaccaggagtcagaactcctaattgtacaatcaaaaaactttctgcccctcatatattttgcacttaggacctgacaacaaagggactgattctcatttaggagatcccatccccatttggccaaaaaggcctggttcatctccacggttttcctaaacccaaggccaccgtgagattttggaaggcacaactgatcccaggctttaaggcagatacctcgatttccttgctcatggccccaccaaaaatctctaaccatcccatcaattcgcaagacaagtttttttgaaagcttggtcgtctgcatagtataaacaggtaagggtgaatgggaatgattttaatatatcatttcctcatctttttgatctacaacacagaacattatgaaatgttgggaacattcaaaaccaaattttatgaaatgttgggacatccctttcttgcacaagaacattatgtttcccatgtattcatagggtggaactttattatttctaatatgtaaatcataaatcctacctaaaatgtcaaggttcttgaaattgcacattctccaattattcccatctgtaaatttatataatacattagactaaacataccaaaaaagcaaattttgaaatcgaaaagcctgaatttgtgcattaacagactaactcatgtcccttagtcaaatgctcaaaaatagagaaaagagaccatatgaaaacatacccaatacaagttcttgatcacattaacaatttgtgtaataaagctacaattacatagtcacaatgctaacaaacgtttctacccagatcacataaataaaaattaatcaaagaacaaagaacagtaatacacgaagcaaatactccaaaataaatataatgaatctaaaccccaatagagtagtgcatcaacaaatggagagaagtggggaaaacaaacttgctgttagtataccaaacaggttaccgaagcaaaaatctttttttgtgtagtggcatgtagtacaaattaaattagatgaacacatttataaaatacacacatttataactattatactagactaaaatgacttatcaaaaaaaaaaaa

SEQ ID NO: 228986 - DNA, 6194 bp, Cannabis indica
ccccgctggatcagatactcggatcggatctgatccgacccgccttatacggatcggatctgatccgacctaatttttttttttaaaaaaaaaattattttatatctaaatttataattttttttccaaaatttatttgtttaagaactaataatgcatcattttttttcttatatatttttattttatttgtcaaaatcaataaaaaaaatatatcaaattcttatcacataaaaatgtaattttactattgaaaaattaaaaaatttaccaaattttagaaattccactaatataatcatcaataataatgtagtatgatgattacatgaaataaatctcctctaaaaaatacatgaaattaactataaactttttatatgttgttcttctagtcttcaagatttactgtgtacggctcctgcaaaaaaataaatatgttaataataaaagtataatttaatttataaattttaaaaatgaaaacaattaccatattcggatctacatcattatcttgatcatttacggtaattagtttagtttttgtgcctgtaaaaaaaattattaaaataatataataaagcaactattaattaatgtataaacttatataataagaaataaataattataccttgtttgtcaattgccaaccaactttgagtacagaccaatgcctccaaagtagtaggatgaagtcttgctcgatgtggactcatgtgtctactaaggactctgaagcaacagtgctaaccggcacaatgtctctggcaatcatgttcaagataggatatttagatcctattatcttccaatagttgcatatatcaaagaattcatcagtcctgggtaacacttggtcatctaaatagagatccaactctgacttttcattcattacaccagatgaagctctaacatataagtcatagttagatagatgatcttgtgttgaagaagatgatgacccttccacaagtgaattgttttcaattaaagtaggaaatttagatttgtactcattgaatagatcatcacaaagcatacgcacctttctaatttcaacctcccatttatcatctccatagagttgaggaaaataaaattgaagcaacaaaaacttgtatctaggatccaaaaccactgcaatagtcataatcccatgaatctgttcccaacttaaacatcatttgagttgacatatccttaataaataactcatttgatgacattccttcttcaattttcctcttaattctacacatctctgggaagaatagattggcagtagggtacttggtaccagaaaataactctgtcacctcatgaaaaacttctagcctttcacataacttttgagctcaaatccaatcatcttctgatggcaaacatttatactttggatcaaaaagctttgctcgctcaaatactgttttgtacaataaagatgtctttatcattaagtatgttgaattccatcttgtaacacaatcaagagacaactttttagtacatgtgactccaaggtaacgagcattctcctcaaatttctcatagcgttttggtgtgcctgaccaataagcgacattatctcgaatcttatcaatgctataagcgataacagacaaaccacctctaacaattaaattcaaaatatgtgcacaaaaatccatgtgaagcagctctccattcaaaataaagcaactaggaggaggtacatgacttgttctgtccacctagattgtcccttgggtcgctatgacgccaatggtaagccactgaacaggctcggtgacccttcaaagcttggactggatcatgccctagagaagtcttctaagctagagatactagaggcgagatcacagggagacagttgggtctctcctacttctactcttttcgatgaggcctttagcgagattcttgctagcagcttagaaggggatgtcgaccgtgagaatccccgtaggaatatcgggtggacaggctccctctgggttggttggcatgatctaaaggccacattgagcatggggcagtgttaatgcttcatcaatattttctagacatcacggcttactttgagatgtgtccgacacagctcacgtcaaaaagtaacaagtatcttttggtgatgttcttctttttagcacggtagaggctggtcagccatgaggcttgttgcatgtggttggccagccttggatgttattttttggggctgcccggccatagcagtcccaaggggggacttgtcggccagtgttgtggttttgacactgatgttatttagttttgttttcaggctttgatgacgctaagatcagtccgcgatggctcttggggaaccttgagtactctttaggagtgggtgaaaaccttggaggcctccattttggtgaaggataatgccatatctgagctggaggctctctgagcggagagacaaagaatggtttctcgcttggagactatgcttggcgccagaagcacagagaacacggcacaagatgccttcatcttcagactgcagtctgaccttgatgactacaagaagaagttgcaggaggctcttgatggccagtagaccattagggaggagtatgccaacctgtcttccgaactcacttatgagttcaatttgtgcaacccccgagcaagtctctcgtacatggaccgtgaggcttttatggagagaatgttggctcgtgtaaaggcacttttcaaaagcttgatagaggtagaccaagtcgctacctatcaagaggggtcatcatcagggactcatgacgaggggctggccgacccacctttggaggaggtggcgggccaggaccgtgaccgccaggagaactattgtttggccctattgcttttttatcatggattgtgtgaccgaccaggaaaaccttaatcttggctatcttcttatggccttgacaagtaagggtccggatttacttttccaagttgaagtatgcctgcacgacttaaaggcaagtttagattcttatactaagcattaaaatttcgctgcataagttctttgtgctagtttaatgccttgtacagtatgggtgccccccaagtgaccatgcagacaagtctcttggtcacttgctattaaccgaaattcacagacttttcctgggttgttacttctgagggtacacagtatgcatgtggaactaaaagagtaactttaacaagttagtctatgagcaagtagtttagacactataaacagaatataaacattgttttctattcattaattggtatttgttgctgtgcaacttaagtaaattgaatctacaagcttacattacaaatttatcttctagatgtcaagtggctacccctacttgcctactaaagcagaggccaccgtagaagaatggtgggagaccatgccaaaaaggctgtgggtgctagagctttttgtactctaatgttgagtaggtagaactgctactttggagtagagttctataagctaattactggtagcctttgcattccagtatcttagtaggagaacgagctccatgttctcgttgtaccttcccaccttataggctctcttaccagttatctttgtaacttgttaatggccttcctggttaagtccaatcactcatgctactgagtctttagtgtttaggaacactctttgaagcatcaagtctcctacgaagaatttcctactcttgacttgtttgtttaagtgccttgctacctttttttggtaggcttgcaactttaggttggcttgttctcttctttcttctacttcatcgagggactctaccagcagggtgttgtttatttgttagtcataggttgttctcctgtaagatggtggcattagctccacaggcaacatcgcctcgtagacataagctagagcgaatggagttcgccctgtggtcatcttttcggtagtcctatgagaccataggacctccgggagaaattaaggtcaatttcctttcgcttcctcaaggcatgttttttaaagtgtccttaagggttttgttgacagcttccacctgcacaagtgcttgaggatgggccagggcggagaagctcttgatgatgccttatctgttgtagaaatcagtgaacatgtcactgtcaaactacttgccgttgtctgacacaatcttttggggaaggctgaatcggcatatgatgttcttgacaacaaagtcaaggaccttcttggaggtgattgttgccagtgactcaacttttatccatttggtgaagtagtctactgcgacgacagtaaactgtacccctccttttccctttgggagttgactaattaggtctatcccccacactgcaaagggccaaggagactacattattgtgagctcaatgggtggagctctttggatttttgaaaatctctggtacttataacattttctaacatagtccatcgagtcttcgatcattgttggccaaaagtaccccacttggagtatcttcttggacaggctttgcctcctggcatggttgccgtagaagccgtcatgcacttctatcattagtcgtttagcttcggctttggtgacacacctcaagaggcacatggagaagcttcgtctgtacattatcccatctaggattaggtacctagcaacttttcttctctgttttcttgcttcatttttgtattctggcaaggctccagtttggaggtaagctgcaataggtgtcatccatgttagagtgtcatccaaaattttgacttcttttgggataacgatgttggattcatttaggaactgtatggacgccaagttctctttgtcaacaattgtgctacttgccagataggcaagtgcattctgctccctggggatctccttaattctgtagcctttgagttgacttaacaagtccttgattttgctcaagtaggccaaaaaaatttcacctcaaactgtgtattcaccaaggagttgattcacaacctattgggaatcgttgaatatgtccaggtggttagctcgtacttcatgtgctagcttgaggccaactattaaggtttcgtatctggcctcattgttcgaggctttgaagcttaatttgattgcaccgtgcagctgttgtcctcaggtgttgtaagggtaatacctgaaccagacaattagtcagtcaagtttttgtaaacatggagtttccatgttagttcttcgggattttgctgctactcttgcttttggttctggctcttacttttatcctgagtcttgaggggtctcaagagttgagttggtgcactctgttgtgaagtctgctagggcttcaccctttatagatgttcttggttggtatgtgatcttgaactggccaagctcaatggcccagatgagtagtcggcctgatgcttcaggtttctgcaaaacctgcaacagcgattgatcggtggacccctttatggagtgtgcctagaagcagggccttagctttctataagcaaagagcaagttgtaggtcaacttcttcatgagtgggtattgaatttcggcgtcgattagccttttgcggatgtagtatggagggtgttgtacactgtcttcttctcttgtgaggacaacactcacagtatgttctatgactgctaggtacacgcctagctcctcattttctatgagtttagacaacacaggtagttgggccaattatttcatcagctccttgaatgcgtttttgcattcctctgtcaaatcaaattttttgttgcctttgagaatgttgaagaagggtacgcattcgtctgtagacttggacacaaatttacttaatgcagcaatgcgtcctgttaggatttatacttccttgacagttgtgggtgacttcatgtccaaaagagcttggatcttgtttgggtttgcttttattcccttggcgttgactatgaaaccatggaattttcccgagcttaccccaaaagagtatttgagggggttgaacttcatgttgtatctacgaaggattttgaagcactcgcataggtcatgttgaattaacattctacatatgaatatctctaatatgatgaaattatacacataagagtttagaaaaatccaaatcaggcagatctttacttagagtagagaataacctaaaagaattcaaacattgattgcagtagaataatatgactc

SEQ ID NO: 228987 - DNA, 2069 bp, Cannabis indica
ttttattaactttataaatattaattgattaattaatttaaaaataaaaatattttgtatcctatatattctctaatttttctgtaatgccttacccgtaagggcgtcacgtgtgtgcttttatattttagtttatcataataaactaccgattttagattttaggaagaaaatgtgatttaattaaaaattttaaaaagtcaatttaagtataacttaaactctttttcaaaatattattggattcggggatcccttagttacaaatttttacaaaagaaccattaaataagtttgttacaaaatattactacatattcaaaagattacaaaagatagatcctgtccactgagaaccaaaagatggtgaggttaatatgtgcattgtcgagagacctctgactcatggctgatatattttccttttacctttacttgcaccacaaaacactcgtaagtcacaaagactcagcaagaaaaataaataaaacacaagcatcacatgtagcacaacatttttaataacacagagcatacattgtaacatatagtttaggcaattagtcaaagcgtaattaaatgctaataattaaatatttgtcttataagacaagctgaaactcgatactttataatacacccttaaccctcgttatcaacaagtttctaatgtcactattgttgcttaattaagcaatcgataagtaagaaaccaatcaacggtttcaaaagagagtaatatttttcttagtaacggtaattactgtatcttatttttgacatgttaagcgatacaattgacttttcttacctcaagtccaaagtcaggtgtgcgggctgacctgagtggaataatactcaatggtcgcaggccctatgtcacgacgactacaattggtaaaaatcttaatttaccccgaaccaagacctaaactcaaaaccggacaaactcctatcaataaaacacaaaatctagctactggaaacactccgaaatggtccaccgtttcttagaaatggactaccatttttttgggttctgccctataaaaacagtcctccgctgtaaaaacggtaaactgtttttcctatagaacagcccaaacttgagtttttcacaccaaaccccacccaaaacttctccaaacctattgaaacttttcagaacaatttaacaatacttcatcattcaaaacacataaaagtatcaaattagcaaactcgccattgttgagttcttgaactcaactcaaagcataacaaccccataatcataaaattaaagcttaaacaaccttaatttacatccaaaaaaaaaactctagcaaatataaacattcacataacctaattatcaaaaaacccctctaaaacttaaccttagaatcctaaaaccttcaagatcaccaagaaaacttaccttaagactgtatagctcctagaattgattaacttgaccaagattgagatgaaaagagctcgagttttgctagtttttctttagccgaaaagagggagagagaaagagttaggtgatttcttaggtttttgatttaactcttaattatctaaactaataaaaactaatataataaatcaaatatctagcttatggtttactagataatcaaataaaacaaaataataaatcttagtaaaatgactattttatcctcaattaaacgattaagttagttaatattctaggagtattttggtcaatgttatctaccccgaataatttgacaactcaaaaatactaaaacaatccagtacaatcctaataaaacttattctattaccgtcatgacattcttggccaatccattgagttttcactgtcgccgaactcgaaatattttatttcaaaaataacatatataatactcacgtgtttcaataaaatcttcatgctcaattattactcaatcagaaatcactaattatctcataattgactcaagtaagactataaccttactctaatattcatataatttacatatttttaaaaacatgtctaattaaacataattatatttttacagatattacattttctctctctt

SEQ ID NO: 228988 - DNA, 1262 bp, Cannabis indica
atagagccctctcgcaaatagccctctcgcaaaggccactccattcaacaatttgcatatctaaaaataactagtcgtcgttgatcaaccacgccaagtttgagggagcgtgtcaaaattaagagtggaccttacctcacctgatcatgccttgtgtgtggtgtgctggcatttttaattctagataattccccaatcatgagctatcgtagaattgttctagaatctcccaaaagcatgggattcccttttctattgtagcaaatcattgagcaagggaatattttattgttagggaaaatattttattctttgtactatatatacacccacctattcgttgaaaataaaatattttttggtaatgtaaataaaaagatgaatggtgtattgtaaaaattgtgcctaaaatagagaatttttttttttgataaagtgttttaataaatagagtaaacaaactcttgggagtgttataatccactagaaacgattttgttgtgcattccaattgtttggaatctcatacaaagcgattagtaaagcagttattattattattattattattaattttattattattttcaaatagtaaacaaatagttattatgatgacagttatatttgatacttttagtgaaaaaattaatctccacatcttgaaattctttattaaattttggaaattaatatttaatttattttatcaatttttttattaaaattataatgtatgcataattttattatatatgtcacaccatttttcttttatatagtaaattattgtatatatcatttgcaactaaaattcagttattattgcttatatttgtgtcaattaattagtctttaaaaatactattttaatctttatttgtttaatatataacatgatatttattttgaattacttaagcaaagtatattttgtatattgatacatgagttgagttagatattattttttacttttattattaaataattttaagttatcaagttatttgagttaagttattgatgttattggatttataataattatttaattgattgaatgaatgctcgtggatctactacaaacactaattgcatttaacaagataagttattttcatattttccttttagtttttttcgattgaaaatattttctttatggtaactattgttagtaatttttataatttttatctattgatgcttattttagttatttgtagtaaaaataatgattaaatttacaataatattta

SEQ ID NO: 228989 - DNA, 650 bp, Cannabis indica
gcaaggttaatgagttttggatggatttttaaagaatataacttgcgttacataaatcacaaacaaatatgacatattttaagataggttctacttatttaaaaacgacttcacacttattattattactgttccttgtgcaatcattacttatatttaaaaaagattggtattataatttccaccgaaatgctaatatgagcatctccggtaccaaaaatcatctagtgctaatagcttaaatgaataatgagacttacatatttatattaattaatttaatttgaattatgttaattagttataatgggtagtttttattagtaccatatagcttgtatcaatgccttatttaataaagtttgtgacgtaagaacataatcctaatttaaccaaaccattataattttggtactagctcaatatttttgagctctcaaaccaaattttgatggaagaaacttgaactatcataaaatttggttatttatttattgagtattgttaaagatatatttaaattagacaatattaattaatgtgtatttaattttaatcactgataatttcaagtataaattatattatttttttattttataggtgagattaataatacataattatatataaatagtgttttgtaattt

SEQ ID NO: 228990 - DNA, 2193 bp, Cannabis indica
aactccaagtgtgacacctctctgttttttgaacaaatgcgacactgacattatatttgttctcatctatgtagatgacatggtggtcactggaaacaacagcagcaaaatgaatgatttattgcagaattgaacaaggaattcactctcaaggaccttgatcctcttcactacttctttggaatagaagtattcagagatgaaactgagctgtacttaactcagacaaagtacatagaggatctattgaagagaatgaagttcacaaacttaaaaccttgtccaactcctaccactgcaggaaaacccatgtctttaactgatggtgaaccgctgtccaacccgacagcatacaaaagtttgattgggtgcttgcaatacttatgccacacaagaccagacatttcatacgcagttaacaaacttagccagttcctgaaggctccgacgacaacacactggaatggagctaagagaattctaagatatttgaagggtactatgaataagggacttcacatcagctgtgatgaaccactccacatcactggtttctccgatgctgattgggcttgctgccctgacgatagaaggtcaatcgcatgttattgtgtatactttggcaacacactggtttcatggtcctccaagaagcaagccgttgttgcaaggtctagcacggagtcagaatatcgagcattaacacatgttgcagcagagatttcttggcttgaatcactgttcaaagagttcaattatcctacacctactgctgtaacttggtgtgacaatataggggctagtgccttagcctcaaaccctgttttccatgctagaactaaacacattgaagttgacattcacttcattcgtgacaaagtactaaacaaacaacttgagataaggtacattccatcctctgaccaaatagccgattgcctaaccaaaggattgtcaaattccagattccaatttcttgtcaacaaacttggagtaacagagtcaccctagcatttgagaggggatgtttaaaaattagggaatctgtcatgatcaattctgttatcctgtggtcctcatcctttgccaggtgtcatcattcagtgcattgctgattttgtggaattgtaccgtttgatttgtaatgattaggaaatcattgtatttagaatattctctttttctgttttgatttccttccagctgtatagagcaatttcaactctttcattgtattcgacctatggccctgaactctatataaggaaattaatatctcagcatttattgagctgagcaatacaatatcaatcttctctaaatttcaacttgtcctactcgtgaggacgacttttcagccatttataattgatcgatcatcgatgagttacaaatattaaagaaacaataggtacaatattaataaagtggccaacaaaagtgggagcaacaaagtccctaattattcacatggaatttttgacggtgcataaatgcgccgacgaaactactcttcaccgacacaatttgtgaattgcaccggcaaaaatcatgaatgcaactgtgccttttcgtgcgaacccatttcaaaggttcatttacctttgccagtggatatttgcactaacaaaaggtcaaaagaaaatggcgattgaaatcctgtgtgtggacaattcttagcagggaagtggaccttttgtcggcgcacatttgcgccgccaaaacgtcctattaaaatggtgagaaaattcccacgtggaaattggatttgaaagaaaaaaaaattgacgtatatttgcaccgacaaaagattaatgaaatgatgcgtttcgatttatggttaatgaaccagcttttactagtgtgattttagacttttaccaacttaacaaattgcgtctgtaaaaggttctaattaaaatcgaaggcacaaagccttcttcctcactttttttctctgcattttctctttgtttctctctctctccgatcaccatccttccctctctgattcttttactctctctaattctcactctctcatctctctctctctctgtgtccaaaaaatattgaaaaaaaaggcctccgaccattattgctgcccgagtaattttgactgtcgcctccctttctctcagtcaaggtaagttttaatttttattttttaaaatatttatttgtttatatata

SEQ ID NO: 228991 - DNA, 1338 bp, Cannabis indica
ggtttagaattcattgatgtgtttaggttgttgaaagatagcatgtcgttcatgtatttaaaaatatctatttgtgaaaaaatgattatggaatgctcagtgtgatggtctaattgagaagatggttactagaattagagtttggattctctccatctttattattctgggggagtcactctaattatttttgtgtttatttccattcactcttattgggcacaaattgtgttagtttctaagagggtcctgaaacaaataatagatgcaatttttcgctcttttctttggaaagggaccactgactttgatggttcatattatgtttcatggcatgatttgtgtagttctcagaaagaagtaacctattgcaatggaatcaagcgacacttggtttatatgtttgggaagtagctattaaacaagacacactatgggtgaaattggtgcataatgtatatattgagggtggagagtggtgggattacaaggctacttcgcagagcagtaggtattgaaggcaaatagtagaaatcaaggagagaaattcaggtaagtcattaacctccaacatatctcgatgtgcaattgacaattaaacaaggatatgaaaagcttatgcctgaacaagtagcgatgtcctggtatggtgaggtctagggtagatttatcactccaaagcataaatttattatagttgactatgctaaataggtttcagacaaaagatagaccattcatgttcaatattacaaatgatgataattgtttgacttgtgcacaaaatgtgaaaatagcaagttatttattttttgaatattaatatagcagacaatggttagaggacatttcaaagtggcttggttggaggcgacttgagtgttgaaacccaataaaaggaggaggtgcacaagatttagaagggaggtttttgctacaatagagttacagtagtgtaccatgtttggaggaaagaatgaggttttttggaatttttccaaacaaaacatggattgtattaatatatagagtgatgaagcatgatgttaagttcagattcttaagagttttaccaaagaaattgtcaaaagttgatattgtatggtttgaaagcttatgaaaggaatatatgtatagtatagtagtctgtcagatatttgtttggggtactattaggatgtacacgatgaattgatgcaatatagagtaatttgtggcattacatctataagtgcttagtttattgcaactaacctccaattttaaaattttggtgataaaatctctaaaactcgtgttttgttagtagtttaatattttcatctatttttaggtgtt

SEQ ID NO: 228992 - DNA, 1248 bp, Cannabis indica
gttatcgcaaagatttaaattttaatcactacaattaaataatattatttttataaaatgaaaaattacatatgaaaatcatgatgacattatcatgattttggaaaacatgcactaaagaaaaaaacttaaaagtctatttcatatttttatatatataattaatttaggacaaggcatgctatatagatcatatagatagatacaatagagtaatagagatctacagattaggtgcatgtattaattatatattgagtaagaaataataataataattaataataagaagaatgtttatctcatgtaactaaaagcagctaccacccataataatccacaattattaattaatttatacgtattaaaaacgattaattcattaattaaaaaattgcattactaattatttttgttattttattttatatatatatttttgaaaaagaatatattttaatttaattaccctggttcggggacggacccagtagtgcttatatgggggctatagtccccactaacaaaattattgtcttttaaaaaattaaatgtaatttttttaatttgataattgtagattaaaatagtagaaaaacccccacaaaattaaataaatttagtaagagtgattataatataggtataaatattttttaatgataaataaaccctcacaaaataaaaattctaggtccatcactgctggttataagcatgatgattatcacgagcatgttaattagtaaaaaattgtattatagagataagcaatattatatgtatatccaatccacaaaatcttttattttgccaaatgtattttcttcctttaaaacccacatcaatgcttccaattaaatataagaattgaagaaaaaaaacagtcatatatacattcacatggtaattaattaatatttaatgaacttgtaacgtttatatatatgttcatatagatcaaattgtctatatcaaaatcacattgtttctatctaatcttttacaacataaactattattattaattagggatattggcggctaaaccatttgaactttacgatttgtaacatttaaccacaaaaaccgaatttttggcggctaaactacctaaactttggttccgttttgctctgcacacctccgtccaaaaatcacagttaagtgtcacggtggactgtccacgtgtacgcacttgtacacgtggcaaatttttagtggtccacgtaattttaattttaaaaa

SEQ ID NO: 228993 - DNA, 1186 bp, Cannabis indica
aaaatataaattttttataaaaaagtgttttatgtaattattcctataatagatcaaataaaggcaaatttagtgggtcatatgaaaaaaaaaatatttttggactcttatttaaaaaaatataataatttccaatatcagtaaaaaaaaaatgtgtaactttaaaaggaaaattttttcaaacctttgggctaggtggactctaaatacagaattaacctgtctatgcctcggaccgagtcttcaagaaggatacccggccaccaaaccattgcatgattcaaaaaaatgaccaatttggccaaattataggcaatgatatttgtagctctaggatagtttttaaactctacaacaccctattacaattgttttttaattagtagttaaatatataaaagataatataaaataaaatcttcgaacatctaaatacagtagaatttttatataagactttatttaagaataatttttaatttagttataaataagaataacatctaaattattattaattaattatacatttttttaagtcttacattaagaaagtatacttctatataaaaataattttatcttaataaaattatatatagtttataaatttatttatggagtattaataattttatttcaaattataatacatgtataaatattatacttactaaaaaaatcattttataatgatatacattaaagattgtttattgttagtcttggtacatttaatactttctggtattttaatttttttagtatacttctatttacctataacctctcaattaaaatataatttgttctctctctctccaccatccctagcccaaaacacagcagccccttcgcactccttccgattccaggcgcagccactgaatgcgccttttataatctcggcctcgcctccaaccaccaattgtagccaccattcctcagtcttaggtgtgattgtgtgatatgagttttttgttgatttttttctatcatctttaatatatatgtgtgtgtgaatgtattactgtggtatttttttatttgatttcatatgtgtttatgagtttattattgggatttttttgttgttttatctttgatatatacatatatttatacgaacgtattaaattgggacttttgagatttatattagaactttattgagatttttttattt

SEQ ID NO: 228994 - DNA, 646 bp, Cannabis indica
aaaaaataaaaaaaaaagtaaagaacataggacaccaatcaacaatttagagtaaaaaaatattgtgtctaagaaataatgaaaacatgacatccaaaacaagcaagtatttttaagaaagcccatctaaatcgctcacatctttttttataaataaacaaaataaaataaaaattgataatttgccaacgaaatgaacatcatgtatgctttgtctttgttcctgatagtcaaactcataacaatataaatcttttattttatcaagttatagtctaatccaataagaacatacaagttatgcgggaatagaattttcttagtcactaaaaatattttaagcaatttaaactaaatgtgacaattttataagacaattttccattatatttcttttataataaaaatgtgtcaaacatttgtgtgtgaaagtgtgagcaatgaacattatctaatttgtcaaatagacttttttttgagtatatataaccaatggagacattgttacactacctcaatggtagccattttcaaaggtagtgtatcctctacataacccccaaatacatagtaccaacttacttagagaagatttttaaacattgagatatgtagttctattctgccaatggagcttgaacacata

SEQ ID NO: 228995 - DNA, 1213 bp, Cannabis indica
atacatttcgctctagcaataatatgttttcatggtagtggatgttttcatggtagtggttagcattagcataccttcatccccgtccacagcttgaacaaaaaattaatttggcattgagagcatttttgatgaataacaattttaaaatcaaataaattttagggtgactcaagaattgacctacttcacttagtacatttacaatgatttttcaaaaaacacataagtcttgtaaatagaagcgacatatataaaactaccaaaagtgagactaaagaattgattgcatgatcaacgatgcatgccattaatattatcactttgtcatatattctaaaattaattcaaattaaaaatttagtgttaatgcataatcctacatttgtgtgggcattagaaaattcatcactataaggtatcattttacgttttttttttccctttactttaatgtttaatatttataaaaaaaaacacatatttaatattacttgtttatatatatattgaagattccattcacattaaaaattaaaataatatataataacagttttttgtttaaattaataagaaagaaaaacaacattctccatgcttttattttaacaatgatgtgggcagttactcaatctaacccacgcttcatgtgtctttaattatgattaataggtcaaataattaataaaataaacaacacttgtttatactacaagtttcctactttgtatatatacatagatcaacatgttgagtttacaaagttgtattctcatttctaattcttttccaaataatcaacacatcaattttctcgaaattattactactactattattattattattattattattacgacatacaaaaacatattaattaataacatgacaagtgacgatgctcttcgaacagattcatttgactacaggacagagttgctgtctcctgcgggagcagcaacgaacggcatagcgccaaccgaaccatcgtggcggcttagcatggatgagtacaagcttccggagagccatacttcatctcagtttggcataggccatttcatcaactcattaagtaataaccaataaatcaataatactgtatataattattttagttttcataattttattaaaaatggttttctttaggttctgttcgggaaccattttgttttttgtttttttaaattttacttaacaaaat

SEQ ID NO: 228996 - DNA, 1166 bp, Cannabis indica
ataaccactcagtactttcctctcataagtaactttcacttctacgtttccttttttcgggtattatcccctttatcaaatctttacttctcttctctcttaactacgtataatgataaatgtcaatggcaaacaagttaaagatttgttatttactttcctaattggttatactaccatagtattcatagttttccaggttagattataattaaaaccacaagtttcctctcttataagaactttctcttctgtctccctaaaaatcccctgttctacttgcttgcttgccaatgacactaaaattagcatacaaagcagaacataccgagtcacggtcacagtcaatgaagatgtcatgcacattgatgaaattatttgaggtctctccctttgtccacaaagttgacctagagcggctgaagaatgtagcctttcgagacgaaattgttgtggccacagcatccctgttagcaaacccttgcattaatatggctccagtgtcaacattttgcgctatcgccactgctaaacctttgtcatcccatttaacactatctaacaatgtctcaacctgaaacgatttacgcattattactacataatccttgatacaaacagcaaattgcatttgtggattaatgcttaacataatgttctaaacacaagaataaaatgtacggtccagatgtagctcgacaataattagacgacattatcgggcaacgatgaacaccttcaagagggtacataagatagacgggaaacccgtcaatcaaatgcccttctctatctttccttttccaaacatgtaacagtctctaccataaaaaagttttggtagacacttgactatgtctggtaaaaaaaatacctaaagtacattcgaaattaacaatgtagggtccagatgtagctcgttaataattacatgacattatcgggtcaacgatgaacaccttcaaaagagtccaaaagatagatgggaaacccatgaatcaaatttccttctctagacttccttttccaaacatgtaacagtctctaccatagtcaactttggtagacacttgactatgtctggtaaactcataagcataacaaaaactataactattctagatcacattcacaatgcacaagcttaattgaatttttggggcaag

SEQ ID NO: 228997 - DNA, 1641 bp, Cannabis indica
caatttattgaaaaatcatactatcattaatgtaccagatttcatcataactctgtaattaagcgtgcttgagcgaaagtaatactaagatgagtgatctcttaaaaaattctcgtattacaccccttaaaatttgtgagccttggttacttgataaaacaaatccaatggtaacctctttaccaggcccggccctggcataggcgggctaggcctgtgcctagggcccacctagtccaagggccaaattttttttttcctcttttaaaattatatattcttttttactgattttaaaaaataccacattttttctaacataagggctcaattttttttttctctgtggcccactttgtttcagggccggctctgctctttacgcctaagtcttgtaaatgccaaagttgcaaatctgttgaaaacggatagttcggattgggacatggaagtgttgaatgatttgtttgaaccaagggatcgtgagtttaatccttcaaattccttcgttaactaaaaactgtcttttttggttcaaagagttgtctgtatattgttaagagtgcctacaaactaatccaggagattaaaggagatgccaatttggaggagactttattgaataaattttggaagaacttttggagccttaagtttccccttaaaatgaagaacctggtttggagagctgggagtggttgtctccccacgatgcttcagcttcgctctaagcatgttggggttgcatcactttgtccagcttgctttgtacaggatgaatccattttgcacgcattggtaacatgtccagctgctaaattatgctgagatcgcgttggtattggagccgaagtgcagcaagaggcaagctttagtcttggtgtgttggaaaatttcaaatgctcgatcgggaaagaagagagctgctgatggaaatttgttggtctgttaagaatgcgagaaatgacagggttttgcaaaatataactgttgttgtggatatatcatagtttcgtcagcaaaagaattccttaaccaatggctaaatgctcaaaaaagctggtttcgaggcttcattttttggttttccacctgaggacagctgagcattgggtggctccacaatacagtagtgttaaggttaatgttgacgcatcattgttcagtgagacccgtcaagttgggatttctttggtggctcgtgacgcacagagtttgttgattgaaggctgcacgaagatgtttcatggacagttttctcctacaacagccgaagtcatggggattcgagaagcactaagttggatcaaggtacgaaaatggtcacatgtgacacttgaaacggattgtctctcagttgttcaaagccttacgtagttttattgttatgatttccatgtttggtcaaatgggttaatgtatgtaaggctatgcttaatgatttaaaaaatgttgctatttattttgttagacaattagctaatatggtggctcacaattttgttagagcctctatattgtatcctgattgtagcttcaatttagagtctctgatttgttaccttgtttggtaactgagttggttatctaataaaattattatattcctttcaaaaaataaaactttcatattcaaaaaat

SEQ ID NO: 228998 - DNA, 947 bp, Cannabis indica
attttttaataaaagtacatacatctttttgtctttaaagagggggctcttgtatataatatatataaggggtcttttcgggtgggtttgggtttgacccgagttttcaggtgtcacaatttcaaaacccaaatcaggcccaatgggtaaccgggtacaacccaagccgagcctgataggtaattgggtgtaacttgaacccaacccaggtaactgggtgtaaaccaaactcaccctataatttattaaacctgtttttttttgtttcgagtcagccgagttttttaagtgaacagattttcaaatataaatgtgacgccctagtatatattcgtgaacacaaattgctactacatcaattgattattttatatatatatttttttttcatttcttcaataaattattattattataatatttaatatagatgtagcattatataataaggcgtcaagaacatagtatgaatgaacatgtttgaagaaatgttttgataaagtggtggaaaaggacggtttggacggtggagaattgaatgaaataaatataaaaattgaaaacgacatcataacaatttcttataagatttgcttttgttgttaacttgttatgttatggcttatagtatggtttgagtgatttaggtatgtaaatctcctatgacatgccaacccatttttcggtggtattgttaaaggcaaaggccccatcacactaaaataacccttcattttatttatttatttattttgttatgatagtatacattatagttatttaaaatattctgtaaaattttgagataatcaaaaaaatttaatatgccgaaaatagagtttaaaaaatctatcgcacgcgtgatatatatatattttattttaggctaattaggatttttgccccctgaactttgacatgtagcaaatcatgcccctgaattttta

SEQ ID NO: 228999 - DNA, 2205 bp, Cannabis indica
ttatattttttttatttattcatacttgaaattatcttaaaattaattttattaaaaaaaattaaaaattaaactcaaagtactattttatacaattttaataaatacagggttcaatttataatttaacaaaacagaatattttgttagtaacttttgtaaaacatgaggttcaaaatagtattaactctttattttacattgttgactattttaaaaatactcgattgtgattataccgcactaatttatcaaaaattacctgtagcacctcaaaacaaccacactatgtaataatgtagtatattaacacatagtctaataaaattataattttaccctcacatggtcaaaattagaaaaatgcccttgtacacacaaatggacttaaactcaaatattcacatatacatatattggattatatactaatataacccttcattaataattaattaagttaattaagattgttaattcatatcttatttttggaatattacttgttccaaatttaagacaattttcatacataaaatatattttaacttcacaatatatatacaaatatatattttacattttaataaataaattgtactcttatgataaccttagaaagtgaattaaccaaaatacattactaacacgttagtcttagttaccctactacttccaccaataagtttagcgtgagaataaatcattattattaattttctcatctacatatgataccaccaccactttagattttttttaaagcattatattacacacgcatacacgcatgtcgttaatatattaataaattgacatatttaaacaaaatctatttgtaaatggattatacgggtcgtgtcgtgtcaacctgcttataaatgggtcgtgtttggatttcatattttgacatgattattaaatgggtcgtgttcgggtcaagcataaacttgtaaatacataatgttatctatatttttggaaggaagacatgtggcattccatatacaaaaattaatcaattaaggctcgctcagaagttcaaggagataataggccaagattatacagagaaatcgagctcacaaccattcgagatccaagaaatttacattcgagactgtgcctctccaaatccagtagggcttctcgcctgaatacgaaggagcagctgagacccttagaatgagcatatgggatacaactagaagggcattccaagaggcgctctgaaagcttctactgatgtagcgattctctgacgtcaaatcccaccaaatcaaagccttgtcccatgttagtgatgtatattagttgtaaaattagctaaaattaggctaattagtttcctttattctttagtttcttaatttaacttcataggttgtgtataaatactaatatattttctcaatgaagtacaagtaaattattctcttccctattgtttacatgatgtacagagccactttagaataagaattcaaaattcaaaatttgggttgtcacaaaattagagtttatagttggttatagttgagtttctctttcttaaagagttcttttttggaaaacccttctagagtacttttctattctcattgtccacttagacaacttatccagccaccgatctcaaaatccttgaagtccggtcaccaaaatctttgcacgtaaggctcacgcactacctgaagcttttgcgcacatccccgcgcatcgacacgtggaggcgcgtgtgacgacattatttttctagttattttctcaattcttctaagcctactcgcatctgtcacaggtttgaatttggtatttttctttcttttgtatttgggtgttcgctttcttccttttctccatcaattattttttgctctcaagattatggcaaagacaaaatcagacctaaaatcaatagttgtttctgatgtggttcatgtgatgtctaaaatcactgactataaattgattgctttgaattatttataatggagtaagacgattcgactttatctaaggagtattgataaaaatgatcatctgactgacgatcctcccaaagaaaaagacgatttacgtaaaatatggctacgtgaggatgctcacttgtttctttaaattcaaaattcaatcgataatgaagtaattagtttgattaattattgtaaattggttaaagaactaatggtatacttggagttt

SEQ ID NO: 229000 - DNA, 1274 bp, Cannabis indica
tatatacaacacgttaaaaaaatatatattattaactcatttatttatataataaaaaaagaataagatactaagttttttaaaaaaaaaaaagatacatattaatactgaccaacgagaaagtggggtaagaataaaagtaatttgcggcataattatactcaagttttaatttttttttttctttttttgacaaacaatgattaatatcattgaaaaaccaaataatgttgtacaggctaaaaaactatatacaaaagttacaaaagaaggaaagtcctttagctaaacaatttgttcatctatccgaagaatatgcacagctaatccaagttaactcttagttataaataaatacttaagttaattttgacggtaataatacttaagttatatttctgaaatttaatttataggtacataaccgttaaatgtttaaccattatatccacgtgtcattttcttattggtatatttgaactaatttttttaaaataataaaaatttaatgacttagaccaatcaaagattgccacgtggcaatttatttaactagcttggtacctacaaaagttctaaaattataatttaggtattattatcgccaaaaattaaacttagatatttatttacaactgaaaattaaacttaaatatttatggcgcaaattactctaaaaataataataaactttccaataagctatgtaaaactattaatattagctgaagggtttgaaaatctaaaaccatggcattaattaatgcaatacttatatacatatctacctacaccattatactacctaacccaaaaataaatataaactaattttagtcttttgtcaaaaatatatatatatagcttatggttattaattatacgacaattaaatatttagtaccttatattttttcaaaataaaaacttgagaccttatattttcaataataatcacttggtagttggtaccacattttaacatttaatttgaatttaaattatttttaaaataatatctgatttattaaataaaacccttctatttttatccctactcccttccatgatgtgacttttttcttctatattcttttttatcttttgtatatggtgtttgcagcacatatctaaaatattatatacctttacaagattttgctctggaaaccgatgcatatatgtcgagcccttataagaatcatttgtattgaaattttggttttttatggtgtagcattctgaagtgggagatctgtttttttttttttttt

SEQ ID NO: 229001 - DNA, 1637 bp, Cannabis indica
agagagagagagatgtttgtttaatataatctatattattttttattattttttttaaataaaattttaatacttgttagaaagaaaattttaataaatttataaagagaaatattaaaaatttattataaataatgagatgaagtaacatgataaaataaggagagagtatgtgataacaaagataataatgatatagaaagtaatgtgtaataaagtaaaaaaaatatatattaaaacaacagtaagaaaaataaaataaatttcaatgcatatataatattaaattcgtgttaaattccgtttcagaaaaaaaaaaaaaaaaaaaacatgttaaattttgaattataatttattaatttttcttttcgaatttagaaaatgtgtaagagtaacaagttacaaattttctcatttagttgttatttgtatcagttataagcatgcaacaacaacaaccaacaacaacaaccacagcaacaacaacaacaacaataataataataataataataataatagaaaatattaactttagaatggatcattgtaaccttttttttagcttttatagattactagttacctagtattcaattacttgtctgctacttactatatattgtcttaaaatataaactttggtgactaaatagtacaactgcctatgttaaattaaaaagtaaatatgacattaccatgttactataccagaaaaaaaatacatatatgatgagagtcaagaacaaacttttactgagtatgcttcaaattatgactaagcacttagaaaattaaaatgaacaagaggaagatgatgactaagaaaagagaagaacaatatgttagaaagagggaaataataaaatgtatatatataaatataaataaattaaacttaaaaatatatatcttcactaaactttcaaaaatatgaatttctttcataaaattaccatgaatgagcagacaaaatcccttatgtactttaattaaaattttcaattcatgaaatatagcaaagctaaaactatgtaataatttatataaataatttgtttgtgcaaaatatatattgcatacctacttagagtattatataaatttaccagtatctttatttatttatttatttattcttttgattaaatcatcaaatatttttattattaacatttttaccattttttttctattttatatttgcacaataaaatattcagaaacttttaaatatgctacaatatgtttttttttaagaaacattttaatttcgaagaaaaaaaaatagagaaagttgtatttaaatgttagggaatttttcatttataattttttttagcaaatatacaaaaatatgggttttcttttctgaaaaaaattattttatgagaaaaattcaagaaaaaaatttaaaaattacaggaaaatagtttaaggtaaccaattaccgttactttcaaagagtaattggttacatacttttttggaaaaaaaaaattatatttttatacaaatgtataattttcactaaatttagaccagaggaaattacattgtatactcacttcactttatttgttttcatttttacctccattttcatattttttttagatatacccacttttatggat

SEQ ID NO: 229002 - DNA, 2934 bp, Cannabis indica
tttttttgatgtcatcaggactagtacacgcatggaggagataaacctttggttgtatttaaccatcgaggtgggattcgtggtggtttgccactaaaactgatagagaagaaaatcaagggagagagagtgtaagaagggttttaggtcttggggttttgatcagttttggaggccagtgaacctgattgtggggttcgtttctgtcatcggtggctgaaagcggcaagcctagactgggctgggcaaaaccttcgtgttaaagagagaggtgaagaagaaaaaaaaatttcttaaaaaaaaattacttgatttatttattttaaataaaaattttgatacatagttttttttttcttttttaatttgttatattttttttgaacaacaatttgttatatttattgtaaaataattaataagctatttaacacatggtccaaaaatatattatcatatatgttttatgtggaacttaacaaatttagttggcattaacaactaaactggtactattgtgttaaaatcgtaacaaaaaagtgactttcatcgttgctattattattattattattattattatcaagaaagaacattaatcacagacaaaaatacatccaagtccaaataaaaagtcaacaaataagactcaacaacacctaatacaactcacaaaacttgatgagaaaatatctctcatgatctttaaatttcatcagtaaaaaactgtaaatcctataatgaataccttttttaatcctttccacgatataagacacactataaaaataactataaaaaaacaagtatttctattgtccgatatgtagtaagtgacagttgctatgattgtcgaaacaacttcaatcttaatctctcgcttcaacccttgaagccaagaattccaatcttcaaaattcggaggccacctacagccagtccatctttgcacctgttggatcaccaactgagaaaaaagagcatttaaaaaagagatgctcatgatcctccttatcaacaccacaaactcagcaaaacaagctctcgaaatttatgctaatctgatccaagtggtctctagtaagcaacttagtattaatcacttgccagaaaatgaatttatgtttgggaatactcatcttattccaaacataatgatgatacctaacttgtttaagaggcaaagaattcctatataacaaacccactttgaaattacctttcaccatagcctgctcaatatcatctttggagaaagtatctctatgccgacacaatttttgccaataccaactaatatctcctttcaattgataactccaaaagtcttagccttttaaataagtagtatttatctatttgacccaaaaggagtcttgcttgaaacttattgcccataagtacttggcaatcatggctttgttccaaatagtttcttccccaaagcctaaacccacatagacttgggtaagaaatcctagccccaagaaatcagatgcaacttgcttctcccattatcatgaccccaaagaaacgacatacatatcttgtccacctctttaacaatattgttagagagcataaaaatactcatccagtaattccaaagaccaactaaaatagagttgatgagttgagatctacttgcataagagaggcgtcggcttgtccaagtgtacaatctcagctgaatcttttttagaataatactacaatcttctgctctctattttgttggtctcattagtattccaaggtacttaagagggtaatgtccttcttcaaattgaaggatttgcaacaactcttccttttcctcctgagaaatacctccaaaataaacgtgagacttgtttttatcagccccgagccctgtactattgtaaaacttttcaaacacttcttttatacaatggaccaaccctttgtgacattataagatcattcacaaagcaaagattgacaatctttagacttttacgcattagatggaatctaaagtagtcatgtttgtctttaattctgaattgaagaagccgagtgaaatactccataaccatcacaaagagatgaggggatatagaatctctcagtctcaacccttttgcccttcagaagtcaccttgaaacctaccattcatcatcaaagtgtaagaagttctattgagacaaaccataatccaatgaataaaacaagttagggaatttcaaaaaattcaacaatctctccaaaaactacaaatcaatagtgtcataagccttgcttcgatcaatctttattgcacatctcggagaggtgttcttcctgttgtaattcttggtaaggtcttgaaaaatgagaatgttgtgaacaagagacctattcttcacaaacacgccttgattctgacttacaagcaatgggaggacctctgcaagcttggtgcaaattagctaaaaaaatatatttatacaacgtattacaacaggcaataggcctataattaatagcctgagaaggcatatcaattttagacacaagagtaactgtagtttcattgtaaccaataggtagttgtctagttgcaaagaattgaagaattgcatccgacacttccgtaccaatttcatgtcacacactcttgagaaaatttgaaccataaccattggagtcagggctattattgttatagactaagttttctcatttttgggctagaaataataataataataataataataataataataataataataataactcttatcttataatatattattattatgttcatgtattacagattcagtatagatattatttaacgcaaagatgttaataagattgagtcattttacacttttagactattgtttgaaaaatgagtatttgtataaacattcacaaaagacaaaacaccgtaaagttccaatgttgcatgggatttc

SEQ ID NO: 229003 - DNA, 1756 bp, Cannabis indica
taattttatcaatatgatcaaatgtgcttttaccatgtataattaagtaattaaattcaaaattgacataattgagttacgtttgatcatatttatataaaaaaacacattggatcaaataaatattattaaaacaaacaaataccaagtaaaaaaaaggctaattaggaatttttcttcccgaactttgacatgtattaaattatgctcttaaacttttaagatcgttttagtaaaaaaattttaacatagatgaaagttcagtggacataatttagtacatattaaaatttgagagatataatttggtagatatcaaagtttggggagcatggtttagtacataaacaatcgctgaaacagtaaaaatgaataaaattagacaaaagtctttaaatctaacaatcttaataattcagagaaaatttttaactctcaaaaaaaattcaaaagatatgatttggtacatatcaaaattaagtgggaaaaaaatcctaattagcctaaaaaaccaaatttatattttaataaaacatgtgatatgtatatatccatttattaaataaatatctggttattaaacacaaaagctagtcaaatctagttgtgcagaatgaaaaaaaaataatggtttaaaatttaaatttgaaatctaaaatagaaggtaaaatgtcaaattaaacatggccagggacaggccaaacatgcacaaaaagctagaacaaattgatggaaactgtctggaaaacagtgctggatatatagtaaaagattaatgttattatgcataggtggtatttgtcaactttagatatatttccttgcgatttgttaacgatacttattaaaagttattatattaaattataaaacacgatatttaattggaccaatattgatattaacacataagagagtgctaaacactactggtaccttttaatatttctcatagtaaaagagtaaaaaatagtgaaatctattattattagataccagtagttcctagcattttttattggcggaacctttcgattgattagtgatattctttaaaagttattttttaagttatataagactcaatatttaattacaaaaataataatatgacaccgagcaaaatattaaacactgagtaatattttttacaatttttttctcaagatcaataattgaattattctagagtcaagcaaaagccccaaaaaaagcttcaccaaagaatatatatatttatgtaaacgttattttggttgttctagggaagagagtacacaataatgttgaaaaaaatctaaccatatctttcaatgggagcagtgaaatgaaaggaagttgtacaattatcaaaaattattatttattgttcttacaaattgtaggatagggttccaacttcctaaatcaagagatatgggtcttaatttcatttaaatcttctattacaatattttaattaatttttatacctgaagtcatatattataatatttcttttaattgttttttaaaatttttaaaaatactattttttatgctaaaattttaattacaaaataaagtttgtaaagatttaaaattataaaaatatacattattaataaaaataatgttataactaaaaaaataaatactcaaaataactataaataaaatataataattatattttatcttttggtcttttgtcgattttagctttgtgttagttttgttagtatctatgacgcttagctcaattaatgtaatgttg

SEQ ID NO: 229004 - DNA, 2552 bp, Cannabis indica
cttagatctattttatttgtgattattgtgtgtgtgattgattgagcacctcttacatgctatttatgaatttaaattaaaatttgaatatatagatttaaattcaaaacaacaatgtcagattggtctatataaatttagggttgagttcattgttattcctattatttaaatttctcatagatatatagattgtattaagtcgagttttatatttcttattgtgaatattttatatttttgtatgtctttcatcttagtgagaagaattatatttgtaattgtattaatgagtagtaaaataaataataaaggagattaaaatctctactttctcattatatatttgaatcaaagtttattattttctgcagttctttcatttaattttgctatctattattttagtttctaaaccatttcgattttagttaccaaatggaaaataaaattattagtacttgataacatggaacaataatcagtcttagcaaaataaactacaaaagtaattacacatgttggatagccttaattttcttaacaaaagtgttacaattaataagcatattgagcaagtataaaataagcttacgaaaggtgggattcctggatttctcatctgaaaggttttatcccgaaacctaagggaggggtaataaccaatgatcaatatattgatgacctattgcttgcaaatggagattggggcatcccaaagctaaatggtctttttgataaagaaatggtgtctgcaatagttaaaggtggtaaaccctcaggccttgggggagatagatgggtttggactctgaaaaaaaaatggacaattcttaagcaaatcggcttatctgtctcaagctctggctatggcccatcaatgtgaggtagctccgtcactatggaacaagttgtggaatagcaaaattttggaaaggcataagatcctatggtggtgcatcctatctaatgcgctccctattagacctgtgataggtagacggttccacattgaagaaacctgctgccctttgtgtggattaggggaggaatccatggaacatctgttcttgtcttgcgaggtggcgatgcatttatggcgatcttcaccttggggcatctatcctatctgcaataacgggattcgggtttgggactgggtcaaatttatatggaatctcaattctagggggatccaagtggaagcagttttcctgtatgcgtcgattgttgtagaaactatctggagagtgcgaaatgattttattcataacaattctcgtccggatgttatgaaatgtattgaccagatttttaattcttatgcagagcttcatgatactttcttgcctacccctgcaccatctttgagggagacctggagggcgcctccttaggagtggataaaactgaattgtgatgtcagggtgggcttagacagtatgtgtacatcggtggtagctagaaaccatctgggtaaggtggttcgagttcacacgactaggttggatttctcggatgcattatgtggagaagcagcggcttgttgtgcagcggtttcgatggctctggaagctagttttcagtttgttttggtggagagtgactcgagagtagtcatcaacgctctaaataggacggagtctcattgggcgattgagaactatatctccttttgtgttaagtcctctccctcttttatttgttgtaactttgtgtatgctcgtagaacttgcaattttgttgcccataatgtgactaattgggcttttgttaacaagttgtatggtattattctggtttcttcaattccgaaaaaccttttatgtaatgatcgggagctttaactatgtttatttaatggaatgattacgcgtttttcaaaaaaataaataaataaccttacgaaagaataagtagaaaatgaaacattatttttcttaagtaagcaactttctcttaagtcttaagttaacaacttggtcttactcaatagagtggagtggacaaccattgatgttggtttagaattgggaaatcaaccagattcatccattatacatatgtttaagttaatgccatgtcttattcatttcattccaaaaaagtctatctcttgtttcggtcccacccactttgtataatttatctttggaagttgatattctatacctgccaatgccatgtccatacgtcaatcattatgctcctatcatataaatatttatattattattgctcctccataaatgatgtgataaaaaaaaaaattgagaaaataaaacaaagcatgtcatataatataatgttaaatttccttaatgtcttttagcggactaagacaaatgcttacgtgtagaacgacacattgtttaagctactcagtaaaagcaccgtactacatgtcgttggtactcgtttaattttgaaatttgaactaacttttttgctataattatagtgtggttttaaaataaaataattagatatgaattcattttttgtaaaaaaaaatatatatttttactttaaagaattttttttaatttttt

SEQ ID NO: 229005 - DNA, 1923 bp, Cannabis indica
aaatttatatctaacatgcattattaatattatttaatgccttgacaaaaactttaacaacaaacactacatatatattcaataatttctagaagctgtagtagttgcatgcttttgtgtgaagtactacctagtacttggtacctatattgccttttttaatttatttatttttggttactagatatataaaatgcattattagataggaccactacttaaatgttaaaaccataatcatgtataaaaaaaattgttcatcaattatatcctaatttcccataattaacaattttattttcataatttttaataattttattattacaaacgtagaataataaaatggggacttaattagctgtttgagccggccgtagaaggtcaaaaagttgaaaagtttgtaaatgatatcattcaacgatattggcctttattattatttattataacaattattatttttgcatggaatgaaaggctttattacacaacaaatatattagaaactttaacactttagctatatatatatctacacaatattattaatgaatgatgaatcttaaaaagtgatacatagttatgggaatatttatgaaatcaattcatacttttctttatttagtgataaatagaaaaggaaaagcataattaaaaaaaaaagaagagtagtacaagtaaaaacattatttattattattattattatacgatttataaatttaagagagccaaaggtgaatcaattcttcattaatatttactgttattattttttagtgggttttgaagttgttgtgtgacatagaaggacgtggggtcgaatattaatgatatagtaataaaatccaaagctgttccatattccatcatgtttatatatataatataatatcctacatgtattattttttttttgaacacacatatataagagatttccatatagctatataacttttatgtgtataatatatatgagacgtgtataacgagttggggattgactgagtcagaaaagagagccataaataaaaaaagacaaagtaagaaaaagataagataataatgccaaaagtgatcagtagttcctccagctcctccagctctataaattaattaacatggggaccccatatattaaaacaaaaaccaatatgctatgctattctttcttttactttatcaatcttacttatttttaaaaaaaaacaatgttctgatcaaactgagagtgatgtagctagagataatatataacacaactccctagtattactatatactacttttcttcttctcaagtccccaaatttacatgcaaaattcgaggcaaattatgagtggaaacccactaaaacaacacaatacaacatattttatagcacataataattaataattaatgatataatgatatcactaacaacaaggcctgtggactctggacattggtgtggtggcactacattacacatacacacacacacaaacttaattatatgctctgccctttttggctcatgtgtttgacactatatatataataatataagaaataatgtatatataggtgttagctctaatgatccaattatagctctatcagagagatttatgttattatatattttaatatataataataaaataaaaaatcaattcgggagtacctgtattttatcttatttgagtagactctttttattattattattttaaagaataatagtatatatataatttttcaataattctctataaaattattttaagacacatgcaatcgaaatcttgcttgtggaaatcatgtctcatcaatttgaagccctgtatatatgttatccaaccattaattactttttgtgtcttgctcttgtcactttaaatttttataaaattgaaagtattaaatccata

SEQ ID NO: 229006 - DNA, 830 bp, Cannabis indica
aaccacaacactataaattacactaaaaaatattttcttattattatattattttaccactaaattttttctaattctaaacaaaagatactattcaattattaaaaagtaaaaaaagaaaaatatcttgatctacgatgtctataattattattaatgaaacactataaactctcaatatttcgtaaaaaaaaaaaatcacattatatataacattttaagtttagggttggaaatgggcttactaaaaaatcatgtatatttttggtggctcatatcatcaattacacgacctataattataaaattataagataatatatatttgttggtagtgtatagggcacatgggcatgcaatgcaagcatccaaaatatatgttttcagagcatagcttttcacatgctgcaaatcgtagcactttctttcttttctttcttttcttttttttttatttattttttattttaatatgtttataaataaataaataaataaataaatgtggttgtgtgataatgcaagcctgcaactagaatgggaattgaattatcctttgcacgtgtgaaatagttggtgatgatcactatatctagtgagttaagaccaaatactatactatatatatactatgatcgaggttcatatatattcacacaaattaatgataatatatatctatagtaatgttagagttacataaaaaattgtacctttttttagtaagtaatattttgggtattgtgtataataaaagttatttactgatctatctattttcttaaataataaaatagattatgtattttttaaaatggtaaaaataggac

SEQ ID NO: 229007 - DNA, 843 bp, Cannabis indica
agaataacaaagaaagacacactttaataccttagggtctagtttagtgacatttggatatgaacatcgcgagcaaaaatttttttgccaaatacctgaggagcaactggaaacaatgacttacttggattttttttaaatgggatcttaccattaagtacagaggatggcatgcggttaataagaaagtatgttgtgggaattgcaccatcccaaaaaagtttaggaacttttatttgaaacaagagggcacatgctgttttaagaaatctatttttatgttatgctacaccattttgaggtgcagtatcaatacaagaagtttcatgaagcatgtcattagaggtcatgtaagtttaaattgagcagatgtgtactctttggcattatcacctcaaagtacgaatagacacattaaattaattttaaatctcaatttaaaaagcatagaatatagaaaacaactcagaacgatatttattaaatctaatcaaattacacgagaataatcatctacaaaagtaacaaaagacctgaatccaagttgagacaaaataggagaaggaccccaaacatcagaatgaactaacttaaaaggaatactagcacgtttattaactcgagaatttaaactaacgtgatgatgtttggctaactgacatgactcacaatctaatgaagacaacttactatattggggataaagtttcttgagcaaaggaagggatagatgattcaaacgataatgagccgcaaaagtagaagcaactctcagacaagcaatagaggttggtggaagtaggtcaagaacatatacaattacaagtcaccagattcatgtcc

SEQ ID NO: 229008 - DNA, 2684 bp, Cannabis indica
tttatttttctactaatgcttttgtttataatcacctcacctccctgtagaattgaccgcccgatttatactacaaccaccgctaatgaaagtcacatttgggcattaaacaacatacaaacatttagaaaagaaaattcacaaaagctatgagaaaaaaattactaaccttctgtgtaaaaatcatttctcttgaatttgtgatcactctgcaaagatccctcaaccttcgagaaatcgtctcaagagaatagggattcgaagcttcaaaaaatttctaaagtttgaaattctcaagaaatgatagagtaaaattagaagaggaaagtgaaatgagaatcagtttgtatttgatgggaagcagacacgtggtagggaattgcctaaggtcttccaatctaatggtctccaaagagcacgcctacacataccctgaagggtcttgatgatgtggcatattggagaaataaaaataataattatagccatcttttcaaaaccatcaacaagacaatcaaaggtcaccatctcgtgacaataactcacctacctctctctgatagttttcctaatgacacatctatcaatcgcgaaactaggggcatgtatgttatagtgtaaatttttcacctagaaactcgagagtagtctcctataatattgacacgtggatccaatccccgaggaatggatgaactgttaattaatgactctcaaagagttaacctcgcctgatccaactcgcgagatgatgcgaccttgacagggtctagtcacatactatgccttgtgtagtgtaagataagtaggaccgagaggatttatataagtcccgcatgtatcgacatatatatgatgactaagtattattctcctgcgattaagtaagatagctctttacataacgactggtcggaatgacgaaacgtactcgaaaaggactcacatgtcccatgttgtcaactcgtgagatgtcaaacaatgcgactcaaatagaacacagacatcccactgctgggcccattagcaaatataggacacacctaaagcctgcaagcttgtgcgagaatatgaacatgcaacttgcactcgataggtcacctacgttgctacacttattattagaatgggtattgttcttcatttattcttttacgtttattctgatttaatactattatttaattgtaaaatggatctataatcgatttgttgtataaaactaaaagtacacttactttttatataaatgagtgatccaaatttaatagactaagcagaaattatttgtaacagtggactaagcagatcgaactgaacatctgtattcccttgtgttctttgtattttccagttcttctgttgttttggtagcttctcttcgaatactcactactctaagtgagtgttcgtaattttttgttcaaataatttattatgtatacataattcgatgttgtccaaattcctccaacaatagatgtcatccgaaagggcgtttccggatatctatcatatccacttggaaggagtcttcaggacatctagtcttcctccgaaaaggaattccagatggctagatgttccctcctagaaagaagtcatggatagtcgactccaattgtctctattcctatctggaaagacctttcagcgtatgcttcaattcttagtcccagaggcgtacacttcatccaaaagcactttatcttatactagtgtgggtatatttctatgaggagtttgttagatttcttaagtcgtaactaacttaacaacttagtacttgcagccaccgactttaggaattatatcctagatctataaataccaccaacacttatcattttcgtaaagaacgaaatcaaacgagttttgagaggtgattttaagagagaaagattgagaggtagagagagataatgggtttggatttcgtatgaagaatattctatagatgaagaagattttgggtaagagtgcgagagataaacattttgtgagaatccaacagacaattgttctctattgtattgtaccctattcttgctcaataaataaaaatttttggtggtgtttcagaattgagtagagccatagatcacatcaatctataggacttgaacaagtatatattttggtattgattttattattttattactttagtgtttctggttttaatactctattcatgttttaatctttaattattgtgtaatttgttaatcctgtcattactaattgtttgttaattaagatttagttaatttaattctgcacattgtaattttctcacacgcaattaataaaaattgagctcagtagctattttatataattttaaaaaatacaaaattaaatttatcatttaataaattaaaaaatttaatcaataatttttacaaaatacaaaatcaaaataattaccttctaaaaaattatatatttaaagaaaatcatttttttttttgttgtctaagaaggcggcatcattaataagcaaagcataagataggagaggcatatggcatggggatcttcggccacctaccctttcagcccatacgaattaggaatatgccgctcccaatttctcctcctcctttatattaaactaattaatataaatgcctttctactttccaaccagccctataatgattttattttgttttctttct

SEQ ID NO: 229009 - DNA, 821 bp, Cannabis indica
taaatagattacataactcatatgcctgaagttaaatctcagatatcttagcaagtaagcctagatccccacacaactcatgatggcctattcaacttattgcctcactacatgactacaatcataaattaatcaaatgaacacaacaattttgtactcccaaattcctcctctgttttaagttataaaattgataatcatattatcatacactaatctaatttttcgccaaaatttcattatataaagcaagcatatataattatatatatagatatatattagttactagatgattgattgattcccataagttacccaattgttaaccaaattataagttattattgtagtttttatataatatatattagttactagtaactgatgattgatcgattcccttaagttacccaattgtttaccaaattataagttattgttgtagtttgctaggtttatgcataggcccacctaactcaaggcccaaaagaaatttccttttaaaattatatatatttttttactaatttaaaaaagaaaaatttacattatgtactaactttttcccatttattacaaaaatactgtgatacgcttacatttacgtttttactgttcttttttttttttgtttaattcggcagtagactgccattagttgtaggtttgtatatattatatggttataggtgtcttcataggatttaccttctaaattttttaaaaaataatgctttaaaaagtgatgatttgacattttgtctcactttttgtgacattttttttttatcttttttgggttttattatttttataaa

SEQ ID NO: 229010 - DNA, 1202 bp, Cannabis indica
ctgcatacgacactactactcacttgttcataacccatttttttcagtgagagtaaaaacagaatattgcaaagtagtgaagaagtaagttgaagaaatgaaaacgtagagacagagaaagaagtttgcctatttaagtggagaaaaaaaaaacaagtgtgttttgtgtaagtaaataatagaaaaagagcagagagtaatgtggtgaggtttcagcagtaacggaatgacaacataatataaatcaaaatttcttttgttttgttttgttttgtttagtttctctctctcttattataaatcgttttcttttcagtgagatttttgaggtgatgtaacgaagaaggacaaataagaaaattcaggggtggggtggtgtggggggtggggtaagtaaaataaggtgcctcccaaaaggaataaccctctcctcaccttctctagtctctagtctctacctcctcgtttatagagcccaaaatataacttgacaaatatttttattacaagccaaaactcagctgaccccagaaacagcaacgagttaggatttaagacaaggagtactcaaataaaataaatatatataataaaacttacaccatttctagtacaggtggcctctaaaagacatgaaattacagctgtggtttttttttatgtgtttgtgtgtgtggagatgctcacttttggagatttcttgtagagtttggtctgagcagtcccacctaatcacgccatatctaaatccctcgctctgagaaagagaaataacatgtagtacactactctctctctctctcacacacacacatctcctccttttcgattattactattatttttaactatataattcatcttcatatcttgatgctttattttatttctggcaacttttgaactttttgtttttgttcttgtttctgaattaaaatttgaatttgaattattagggaaataaaaattgttttatgccattgcactacaatgacttgtatatcattattttggcaaggaattaaagtggcatgggctgaaaatcgtacgattcctagctttaatgggctctgtaaaactagaaagaaagatggagtttggattaaattatcagaaatgttaatattgagcaatttgtgacataaattagaagaaatattagaaggtacactttcactattataatttaatattaagtctca

SEQ ID NO: 229011 - DNA, 1887 bp, Cannabis indica
aattaatatactatcataaaaatttaaatagtttaattaattaaaattaatctcaaaatttaaaagaacattacaaaaaatgaatcttattggatcctaaactaacagtggatctggattgagcatgtcatcctcggagtcatgggaactgttaccctaggttttttccaaaatacatggccacggctatgtatgacatgtggaccaagaggtcacctcactcgggaatcagttaagaatcgtgtagaaaagaataagtgtgattcggggagtaagcccccggagcaatacaaaaggcatgccctcttcttcgagagttaaagatatagtaaggcatctccgggacgagaatggcctattcgaacagtcacctagcatttaatgcagtatggggaaatgcgtctgggaacacccataagaggacatgtcagacatcgtaagccttatttagggcgattacacgataatcgaaggggctagtgatggctctattatgaataatcacatcaatcaaggaaggatgaaggttaatctcacctaatccctacgacacctacagtataggtaatgcatgccctattttgtatcttttgggaacttgtgattatccatagctagcactcaaagacaagtatcactttttaactattccatcaatctctataaataccgctgagaaaaatggaagggggatcgaaaaaaagagagaaaaacacaccaagaacattctctataaaagaaatactctcatcaataacaaatacttgtagactacgactcattaatggccgaaccacgtaaaaatcatctacattaattatcccaaagctcttatcattatctcatttaattggttgccaaaaacgtcgctcaacatttttgtgctttcattgagagttgtgggaagcgttgtttgaaaaatgacagtcaagaatcgaacctgcaatggtggaaactcaaaacaacacgcgcaacctcgtccccctcaggattctcagaacccagaaggtgaagaggctgtttcacaagtgaatgtgggctctgaggaacgagacgagacaaacgatgaggaatacaaagaaaaccttgaagggtatgatacttacgacgaaggtagctacactgagttgctggtcctaaggaaaaaaatagctgatcacgaggccgaatcggccgcccaaaaagagcagaataagaggatgcaagaaatagtggttcccatgcaaaaggccatggaaatagctggaatacatgtgcatcccaaagtcgtgcttgcgggactagaagaaacacaagaggagtcttcgccaagcattcaaaggcccgaaactagggagccaagccctatacgatatccttcagagggaaaccctaaggaaaatcctactacgatccccgtgagaaataagaaggcccaatccatgaaaggtctacttagatttcctaaaagggaaaggtccgcagaggggcaagctccctcgagagagtcttggccctcaggatcgagaggaccgaaagagtgtatctgtgcaccaagaacctggggaaagagggaggaaaggtcgaaggcatcccccagttgatctaaggcaaaaaatcaacaagacacatggggacttgagaaatcacctcgagaagaaaaaccacgcattaccagtatcagggggcgccttgaacgaatgaatcttagccgagttagcaatcctccgcaaagacatcgctagagtctctcggagacaaaaaggagatgactcagactctgattacgaggaccgggaacgatgcgcttgaaatatcttagaagtggaactccccaaaaatttcaaaatgctcaaaatggcaacctacataggagactcggtctgttggttttgtgccctaaataaa

SEQ ID NO: 229012 - DNA, 3734 bp, Cannabis indica
actgaaggcagttcaggtcccaatgacttgataagaattacatctgacgtcaacctggacgctgtataagtataaaaatgtccaaggggtgtcctttgagatgcataagtgataatttgacatcacttagcccattaatatgttttggtgatggtggtcacatgttctcagagatgttgctattttgcggaaacagaatactcgaaacttctgatttcttagtgagtcaatttgccaaaaattaaagttgtgaatttgattgatctgactttacggatcattggacttttaaaaaactagatggatggtttaaatggcatcaaattcagataagtagaacccagtgaactaggccatttgttgacctgagagttaggccctttaaaccgagctcctaagattatattttttatacttccaaggcttttaaacttgaggatggggtctcctcccccttttttgaccatactagatttaatggtcgcatcagatcttgcatttgagcaattaaaggtagcgtcctaagtcgattgtcaacctaggcgttgggcctcatttctagggactcaagtttgtggttttctcctcgagtttacttaaatctttattatttctgatgacggtgaatatgcctagagcacttttcactgaactgaatcgaaaacagcccaggttgacaaaatgtcaacctaggcgctgggcccaatcccatgtgtcaacctggcgattgggacccaattttgcctattcgaaagttccatttggtccctaaaatagttgattctcaatattttttgaagacatagatgatgctcggaagaattcatgataaactccattttttgttgcctaggttggcaaattgtcaatctaggcgtagggccagtcccgtgttacactgggtgctgggcactgttatttatgcctagtttttttttgttttcctctagaaggacctatttcttgactattgatgaatacaaattcaatgcaaaagtccgatattcaattagacacttggaaggtgccaagattgacaaattgtcaacctggacattgggtgcttggggccttggggccctgggtgctcaaaaatcaacttgctcttaatttaattctgatagctcaaatatgtgtttgttatgtctagttgatgtcccaatgcaatttttggctactttacactaagacgggcctagaaactaaaaccctagttaagaaatgtcaacttgggcgataagtggaaaccgtaggtgcccaggttagcttccgagttgctggttcgtataattttagctctcagacctttgattaggttgttccatgtcttcatggtacaaaatactgagagatagtgggttggattcaagttattaacgtccaaacttccatccccgagatcctaaagtcaacctgggcgtagggctaggatcatcccctcccaggttgactgctatgactcgggtctactcaactccgtgaagtcatccttcatgccatatgtcaaacattgatgtccacgtcctcagggaaagtttctaggttaacaaaatataatcacaagtataaacaaataataaacttgaaatctaaagagtttagggatagaaattacaaacactcaatctttacaaggttcggtagaactaagccacctatctccttggtcttcaaacctattgacctagctttgggttcaactatcgagaaaagttaatgagcttgactaaccattacaactagggaattttttttaccaaggtgtttcccatacctctcacaataattttcttccaaggactatcaatctcaccaaattgttgaaatgccaatctcaccaaccaatttgtttttccactgattccaacttcaccacaaccaatagttttccaaaggattatcaaactctttacattgttgaagtgccaatctcactctcgaattgttgtagtgacaatctcactcttttcatgttgttacaaaacaagtgtcaacctcacccatgactaagttttttttctactagttccaatgtaacctctcaatacagtggatatttgcttttgaaatacaaagcaaactctctgtaataagatgaaatacaatgtgaaatcctagagagaattgtaaaactagagaagataaggaaaagtttggctcaagtgtgtgtagttggtgtgtttatgaatgagtgatggagagtaagtttgaaacacttttagagatgtaatatgatcaatactaacttaaccaaccttattttttttgagagaaaatggagttatatagagaatgggagaaaactagtcgtttttaagcacgaaaacctaggcctttttgcccccatctggaagtccaattgggaactggaagtgagaatctgccccaacatgtcattcagttcccatatgagggtcctgttaaaggaccaaagagcattttgaccattttttgacttaaaatatgcataactcctatctcatttatccaatttcaaaaattatagttgtgttctcttatttaaaagatgaataatcttaaaattcaatttagaaaaattatattttattttttaaaaataacttgtcgcataggttagtgagccatataaaccctaatgtgctatgcaaatcccctcctgttttctctctagcctttcagcgtgagttgtagcaatggcgaagactatggcaaaaggggaagcgaaactgaaattttcttagaaagtgaggaagaaggcagtaactgtggctacggaagctctggatgacaatccaatcgaagatccttctggtatcaatccgattgtcttcttcgatgatgaactggaaacctcgtgtgatctggaaatggctcgagatcaaggggggactagcgatcctctgctccacgatgtttttcgacctcctctgtcatcaccgaggtaatctctacattcgattatctaacaggaagatgcgaggaaggattttgagcaatttcttgctaccaagagtcaatgtaacagtaatgttgcacaaggtatttcctcaactcctcctatattgcgatctggttcaataattcgtaacctagaacctgctttttccaataagaaatctaaggttaggattacttttgaagatattgaggatgagattgaattctggaaaccttcaatagtgtgctatgtgcttggttctaatcccccattgcacatccttgaaggctttgctaacagaatctagaatggtaaaattgacagagttaagctcttatcacatggtatctttatcattcgatttcatagtcttactgttatagatgagatattgaatggagggtacatattcttcaacaaaaggccggtgattatgaaaccttgggaccccaataccaatttcaaaaaggaggacataagaacagttcctttttgggtttacttggaggagttggaactcaaatattggggacaaagaagcttattcaagatcattgggcaaataggcaaaccggttatgattgatgccgtgaccaaagaaagagaacgattgaactacccccgaatactcattgaagttagtatgaagcaagaactccctgcaatggtggaatttgaagatgaagatggctgcaatgttttagttggggtccattatgaatggaaaccaatcacttgtggacattgtttaggtctcgggcacaccactgaagtttacaggaaaaaaaaacgagactaggaaggaatggattgt

SEQ ID NO: 229013 - DNA, 2087 bp, Cannabis indica
aggttcgtgcatcgataagaaccacgattagaggttcatgcatttattcaaatctcttgagattcatacataattgcagacccgaacctcacaaggttcatacatcaatgcaaattccgagaggtttatgcgtttataagaaccctaagaggttcatccgttcatatgaacctcaagaggttcacgcaccaataagagctacaagaagttcttggcatcgatacgaaccccgagagatttacgcattcataaaaaccctgcgagtttcatacttctatacgaaccccgagagattcatacatcaataagaaactctataaggttcacataatcactcttatgcgacaagcatataaaaaaccagtgagtttagataaccaatatgaaatataacgttcaatataacaaggcatcacgtcaattgacaagtgagagcttggtcaactttaagttgtctagcatagaataagttctattgaagaattaggggcatgtgttattaggataaatttctcctcccacgcgagaaggattacactaaaaaaaactcgcggtattaaaaggatctcgcacttttgggtaaaagagacattacattattaaggaaggaaccttacatgtttagtaaaattgcgttatcaaccagaaaatgtgcgaatacataccaatcaatagaaataacagccaaagcattcaagtgctattaaattgagtgttacatttttactttataaccgttgtattaattagtgcaattaagtattattattatttgtaggctccattatgactattagtttgtaaccgctacctactatctataagtaggagtttctccctccattattcaagggaggctggactcatataataaaattacaaagcacgcgattttttttcaacaatggactaagcagactgaacttaaactattgttaaaccactataattttgtgtatttttatatacaatacgcacatatatatatatatatatattatattctatgagcgggttctcacatgggtattttaataatttttgaatgcttacttatttttttagtgttgtctaaatttgtctgactgtaattactctaatatgtaattactacctaagtattacataactaactaattaggaagttacttccaaacacgccatatattccccatatattacataatttattttctttgccaaacacggtacacctgctatatgctatatatatttagactcacatatattaggacatgctatattattttctttccccatacataatgactcatgcacggaaacgaatttgcatcatttaatatattatactagaaatgctaaaaactaccagtagtgtctaatagtaatactcttatgtataattattggtctaaataaatatcaggtcttatataatttaatataataatttttaaaaaatatctctaactaattgcaaaacgatatgtctagaactaggcactactaatgccctccctccatattatataaatatgggagagaacatatatagatatattatcaaatcaaagagataaaggaacgaaagtatactctatatatgcatctctttatataacaaattaaattacaaattttatacaatctcgtaaaacacaatatataatatttatggaaggctccaggcatgaagccagtttgctagtgatgatatttttcatgtccttattagtaatatttgttataaaatatttgttcctcaaaatagtggatgagatgaagcctcatagtagtaatgcagcagtactagtaccacttcctccaggtccttccccttggccaattcttggatgcattccggagatgttgcgaaacagacccacatacaaatggatccacactctcatgaaagaattagacacagacatttcttgtattcgactcgggacaagtactcatgttatctctgtcacctctccggagattgccagagagttcttgaagaaacacgacaaggtgttcgcttcaagacctctcacgggtgtcactcgtttaatctcccatggatacatagagaccgtgttagcaccatggggcgacca

SEQ ID NO: 229014 - DNA, 1870 bp, Cannabis indica
tgattcctagaaccgaactacttgtctttctgtgtagtttcagtaggggtacatattcccagcagatacaaaatgggaaatgcatgacctataccatatgtatcttaggggttaagtggatataatcctttatcccttcttgattgatgtgatccctcataaagtaggcgtcactaggcttattaatcatagcgtaatagctccagcagaggggttacgccgtcagacttattgattatggcagttgcaatgcgtcttctctcaagtgacattaaattgcaaggtgactattcaaatggagttcggtacctcctggaggtgccttaccgtagctctgacctccgggagttagtagagctagtatggaggcattgcactgggctgatttttatatgcgaattagtagttaatacaataatttagagaaagaaaattgaaagcattgcataatatataattaaagttactatttcagacaacaatgtaatttaaaaatataaatttgtgactttaaaaaagaagaatgaataatgataatgcatgggtaacgtctctttaaacgctatattgagattgattattccttcagtgacaattttttgaaagcaaaaaataaacattatatagagactgtgttaaagcatatttatagaatttctctagttattgatgtatttgcaattcaatctcttctataaatacaatatgagaatgttatggtgagatttctctcacctagaaactcgagacaagactcctatttaaaggacatgtatattcagatttccaatgaaagccgaattgtccatgagagactcctcgatgtttgaacctcgccgggataaagccagcgagatcttgcgagtacgaccaaagtcggatcgcgtaactgtaattcacgttatgaaggatgagagaatggatccaactcgcatgtgtcgggacagatgcgagtatcctctctatacttccgcgaaagcatagagatcaaccctctatggtgtgatttggttccaatgacccaatagccttgataaaccgatatagactcgcgtgtctaggttctatcagctcgatatgcgatgtctacaggaggcgattgcttaaggactcggacagtccaaacgtaatgataaccctgcgagctcaacaacggaacatgaacagtcaactcgtagatgcggaagacgcatacgttgatggattaacaatgaactctaccaaggactcgaaggcccgagtccttggtagagttcttcgccatggccgaacctcacaaaagaattgagaattctctagcggagttagagaaggggaaggacaagcgccggtcacccataccgcggtcacgatctcgcagtccgcgagggaagaactccaggggccgaagcccgagaagacacagcccgcgaagacagcgaagtccgaagctggccaagtctcctccaaagaaggagtcctcgccaaagaggaagggtggacctcgcttcctcaattatactgaactcgcagtccctcgagaccatatctacgcaattgaaggaagaaacggagtcttcaagaagccgccccccatcaggggaaatcgcgaccggagggatcctaaaaaattctgtaagtaccacaaggacattggtcacactactctagaatgttgggtcttgcaggatgaaatagaggagctgatccggagagggaaattcgacaagtataaaaggagcgaggaaagtcatccccaagcggatgacaaaggagaaaaccagactgcgagctccagaacacctcgcaatatcctgactataattggacgaccacacatcacaggcgactctcgcaaatcataagaacggtatgccagagaagccaagga

SEQ ID NO: 229015 - DNA, 3170 bp, Cannabis indica
aaaatataggtctattacggcaggcccgaccctttgttattgctctatctcgacggtccatgcctgccgttaatttgagcgccgagattgagtatgggcttgtctcggcggtccaagccatccattattgatagcaatctcgacagtccatgcctgccgttattaattatgcaacctcgacggtctttgcctatcgaattaggtattttgaacacaatttagcactttgagacacctatattggcggctcaacccctcaagattggtcaatctcgacagtcttcaagcagccagtcaagatatgctaatactgtaaaaaaatattattttttaattccccttgcaattaaattgattatatacaccaatttacaatacaaatataatataagatataattttagtacctatcatattaacaaataacaatcacagaataaacaaaactgaaattgagaaaagttttctttatttctataatattttctaatttcataagtacatgtcatctcaacaaataacaaacacaacaaacaacatacaataagtttctttcttatatctccacaacacacaaattttgcgcaacttgcttcactaaaacaaacaagttttaaccttctgttatcaccacaatacacatttaatctctataattagtattatatcactgaacaaagaaataaatgattctacatacctctaataatgaatcattaagaaaacttcatttcactttgtaaagttgttccgtgctaatcaaagccacaacctacaatatcaagtagggatattggcggcaaaatcacctgagttttatattttttaacacttaactatataaaccaattttttaacggcaaaatctaccaagcgcacattctgtttcgctctttacacttccgtctaaaagtctcagttaagtgccacgatgaactatctatgtgtacacaagtgtacacgtggcacgtttttagtggtctacataatattcattgtttaaatattataaaaattttgtaaaaaagtatttaaatttaaaaaatagttttaaaaaataaaacaaattacaaaacaaaattattttttttctttttctgttctcttttctttttcaatttctctttctcctattctctggaagcatctagaccaccattcttcttcctcctcctcctcctcctccttcttttttcttctactcctttaatatgtccaaaatcagaaatagaaataaattaaaaatcaccacaaccactaccccaaaatcataagaacctaaaccaccactcaaaatcaaaatcaccatcaccctaaatcgtttatcacaaagaaaaaaatccaaaaccccaaaaaaacctaatatccaatatcacaaccaaatcaaaaccaagaacctgcaaaaagagttacactcaagcgatgatggatctcttcctgggcgagatagagagcaagagagagagagagagcatgggagaatattgaggccaagcggggaaatcgtaagagggagaagggttctcgggggtttgggtttcacatctcggggttcttcaaggtcaacggcggcagataaccacttgaaagagaaagcacaatgagagcgagtggggggatctcggccttagagagagtgcatagtaagtgtgagaggggaagaagaagagagggagagagagggagatctcagcctagggtttcagtgttattaattgcaaaagaaggaatgatgaagaagaagaaggagatgatgaaagaaagaagaaggaggagtgggtgtgggtgtgggtgtgggtgtgggtgtgggtgtgggttctgtgcgaggaagaagaagaagtaaataacaaaaaaaaaaaaaaagagaaaaagagaaaaagaaaaagaaaaatacaaagattattttttttgtaattttgttttgtaatttatttcacattttaaaattattttctaaattttaaatattttttacaaaatttttatgatatttaaataattaatattatgtggaccactaaaaacgtgctatgtatattattgtgtacatgtagatagtccaccatggcacataactgagactttttgacggaagtgtaaaaagcaaaataaaatgtgagtttggtaggttttgccgtcaaaaaatctatttatgtggttaagtgttaaaaaatataaaattcgggtagttttattgtcaatttccctatcaagtatattaaaattttgtagaggcaatatacattttaaacttttaaaactaaattttttattctaacaactaatgtgcatatccaaactcaaacttcccaatttaataaattacacaaaaaagtaaaatttaatcaacaaagtacatttactataactagaaaataaattattaaaaacattagccatagtttcaccctacactacacaaaaaatattaaaaaagatttataaaatcatattatatttacatagctaataaactaagaaaatataaacttttaaaataaaaattacactaaaataaactactacacaattgtagaagaaaaaatttataaaaatacaattgttttttttaataaatcagagaagttttgtattgtatcaaatatctttacaacctatccatctttgatttagaaaaactaatctatttacaacaattcaatccacctcttatcctccttactaactttttttttgtcgaaaataatctatttctatatttaacatcattttcactctttttacaattgtatcaactgtataacactttaaattctaccagctttcatttcggttttgccataattggtagatcaatgctgcaatggcagcaaccatcaccctccttcggctctttgagagctttgatcgggccagccacctgaagagatgtgaaatgctacttgctcttgtactccatgctagctaatttttcatttatgttagacatttcaagctaaaagtacactcaaaaaataaatgttcaattgattcctcatacttttcacatattacacattttgtatccatcacaacattaaactttttcagtctagtcttcgtttggagacgctttagcaccgaaagccatagaataaaactatgcttcagtacattgagtctattctaaacaacatccgcccaatggacctttggttggtttccaacca

SEQ ID NO: 229016 - DNA, 1987 bp, Cannabis indica
cacatggaaaccgtgcaagcactaagcaagcatcaggcatggagacctccaagagggaaatcaccttcgagcaagagcccaaaaaggctaaagctcgtgggcgccaaccgatgggcctaccacctgatgtggaacaactttagtaatcgagagaaccaacatgactcctccactaagtcctccttaatgctctcatgataccaggccccgagaacctccaagggaaaagggacctacccttcaagacaactgaggtggatgaagaacttactttgagactgaaggctatgagatccgttgggtaaggaccattgaaccacttcatacttgaatatacttttgagatgaaagggatgagttgtgtcgttacttttctcgtggcccccatggcaagcagtatgagtactttccttgagtacatcgagagaagttaaacttgagcaactagctcaattatcttcacacttgtgatccagatgaagattactttgagagaagtagccactacaacgctctgagtgaccactcccacagcggattatctcaagatgatctggaagtcatctcgaaggcatcaccagaggttcctccacgaccacatggtcaggagacaacgaaaagacccaagtcgagcggagtccatggctcacttggaagaccaagagacctatgtgacctcttgaccagaagatggttggtggaatcagaaacttctaaaagagaccctactcgagtaacagaagctccaattgggattcagagcaccgtccatggggtcaactaggtagaatttgacactttagcgaccttagtgaaagggatcccgacccctaaattgtcagaatttgaacttgacagagagcagcgctcaccactctctaaacgatttaaagcttaccctatccctctaaagcttaagaacccttcctgacatcaatacaccaagaaggaagatccactgtctcacatcccctactttgaagtccagactgagttttaaggtgtgagagatgatgttaggtgcagaatcttccctgccactctaacaggccttgatagcagtggttccttaagctctccacactgacatgcctagatcagtgggacgagggagagtttctcatcagacaaaaacatgtttctttttagcggatgtacgacctgaagccccaactggaggccatgcacctctctagcttgcgccagttgcaggcatgttagagattgtgattggaggccctcacctagctagaaattctaggaaggccttagaaaggtatgcaagatcacaccaatatgaaataagagccaaagtgctggaggttacagaacgtcctccaaagtctcaaacatacgagtgtgaccctatcacatttagagactccaactcatatcatgtcagctaccctcacaatgatcccttagttgttcatgtgtaaatagccaacatgatggtggcttgggtgatgattgatgatggagcatctacaagcatcctattcaagaaagccctaataagaatgggtttaacactagaagacatggaaccatgtgagcaactaatgtatggtcttagcagtgctagcattaatccatgtggcgagatcaaactaccactcactgtcgacactcccccaaagcagaccaccatcaagaccacatttattgtgatggatgtgaagtctccgtagaatgtgatgctaagaaggccagccctatatgacctttgagctatctcgtcaatatactacttttctgtcaagtgatataacgctttgtatcgctcgccaagaataacgcttctattgctttggccttagagggggtgaacaagaccccctccgctgttatgacaccagagggtgaccaagacctctgctgcaagagctgaagagatggccaagacctttggagtcgaaactacagagaagatgaagacaacacccaaagccactttaaggtgcgcccaagacgaggatgacattga

SEQ ID NO: 229017 - DNA, 1676 bp, Cannabis indica
tattgtactaaatttggcacaaaatttgttatatgtcaaatttacatcacattttggcatatcattggagcacacttttgttaaattaatgagttatattttaacttttcactatttatttacatattcattaaaaatgctcttacataacgaaagagaccaatttcttaaactttaattattattaaaaaaaattcacaacgtataattaaattaattaatctacaacatttctcttgtatgcatatcatgaaactatctataaatcaatcttaaataaaaaaaaaaaaaaaaataatatcaatcaaattgtgaagatacacaaagcacgtggtaaattttaaaattttgtaaatagaaaaaatatgaattataaagtaattatatttaacaaaatttaatgctgaaataattttactttagagatagaagttcaaaaaattagtaaaaaattttaaataatagattgtgtttaaaaataatctgcttacaataattattatttagtaactttttatttatttgagtgaggagtgttgaaagaataaacaaattgaaaaaataatttttttgtctaattaaacaagataattacagagtattatatacaataaattttagctcagttgaactaaaactaacagttctataactaacttctatatggttagtcaattaactgtgctcaatagtccatctcaaactcaaggtagaagagctttcaatcttgagtttttctctaaaaataagaaatctagagttggaaaattgccttggttaaacaatctgcgatttgattataggttgggacatgtatgacctcaagttctttattcaaaacgttctctcttacaaagtaaagatccatctcaatatgctaggtgcgagcatgaaaatctgaatttgttgtcaatagtacagtgctaattaagattgtcgcaccattggtgtggcttgaacagagccggccctgaaaatatatgggtccaagacgaattatgttatgagatttgaacccatgaccttagacattatgtcatccacctcaaccaactaagctatagatatttgttgcttataatacacttaaattttacttaaataaaagcctaataatttttattttttttttattttgggctcctgaaaagtgtgggccctaggcacgggcctagcccgcctatgcctaaggccggacctgggcttgaagagtcacttgatgttcaccaaggagcgatttaatctaaaatattacgtacattaatacaacagcctcatgtatgaataaagatcaagttgaaagaataaacaaattggaaaaattatttctcttatacaatcaaacaaggtaattacatagtattatatacaataagctttagctctcatgaatattgatattaaaaaaaagactataattaaaagaattgtttaaataaaattttgaagtatcttatatttttttaaaattttgactcttatatgttctaaaaaaaattaaaaatagaaataattttactaaatatattttttaatttaaaaataaaaaatggtttaaataattaaaaaagtgaacttgagagacctccccttttcgtataaactacctctaaattatatacattaaattatgtcttaataccacatcagggaatcatttatcaaaaaaaaaaaaa

SEQ ID NO: 229018 - DNA, 1515 bp, Cannabis indica
cctttttcttgaaggattacgatctgcatattgattcaaatgatatctttctcctcgatatggggaaagaaaaccaggcatgtttcagaatcaacaatatattttcctaaacaatgttaattgatattaatttttcatataaatattaatacaaaataatgtcaataaacataataagtttgataacacttaccgttgggtggaactggaaattcataatctgggtttctggcacacatcataaatatagacatatcataaatatagtacacacatcatgttaagacaaagcacataagaaatcttaagccaaatcatttcatatataaattaaagcaaggcccagccataatgataccacaatggaatttcagttcccctcagtgtctacttggaagtgtactaaatctaaataattgcaacaagaaaatatctcatctgcatcagctctgatgttatttattgggggagttttttgctgccttgctagcttaataggagtaaaggagtttgtgctaaaaatagttttgtcagtatcatacaatctgttctagacatatgggttatactaacttctactaatgccatctttattcaaactcaaagagataagcaatactgaaataaagtttaaactatcaatagaaagatataatatgaaatctaactaatgaagaagatataatataattaaaatagataagcaacgatatatgcaaatgcagcgatatatggctaagcaccataaaaagccatagtgggatcttatatgttcgtaaaagtgagttgtaatacactaggagaggtattaggcagtaattaaattagaaatcatcttcttcaattctccatcttcttcctcctttccccccaaattaaattgagagaattatatttacaacaagtagtatttattcgttactaactacaaatattattcagtgtaaatctcaatggctcaaaccatgttactaagctctacctgtgtcgctaactgtcaaccttacttcaaatccgagttcagagactcaaagttaacatattctctcaaactctcacttacaatcaactcacctcttcttccaaatctcccgtaatttctagtgtttttgctctcttcaaatcgaagaccaaagcatattgaagtagtatattaactcaaagtctaatagaatccttactactgtatattgaagtgggaccaaatcaaaaggttacattaagggaatcaaacattaacatttcaagaaaatcaaagtgcccactaacgtcaaaaaaaaaattaaataatattcactattaattctccaaaataataatttgctgatcatttagaaagcaaaccaaattacgcagtagtcctaatgagatcaatggatgtaacaagaaccttgttcaattgtatatgaattgcctcagcgactacaacaacattataaatgaaggtaaaacccataagctatgaaaagatcaaagctataaaaaaaacccaaaaaaataagactgacccaattg

SEQ ID NO: 229019 - DNA, 1013 bp, Cannabis indica
aaacaacctaaatattttcattctaaactgaatttttgtcctaaataatcaaaagataattgaatctcacatttcaaaattttaattcaaaaacatatagataatgatgaaagatgacccatcaaatatcaaataacaagcatatattaatttgatttaaaaaataagaagaagatcgaactttacattagttcataataacgattcaagacatttaattgaaaaccctaaacagagaattagctcataatcctcattttaaacataaataataataatcaaaataaacacaaaactctaaagaaataggaagaaaaactttggaaaagtgaattgagatgctccacggtgtactcctagcctctaaatccgcaccctccaagtccacctcttaaaaatcataactaggcttaaaaacctaaaattatcttgttgatgggaggcgggacgcgaactttagaaacccatgttgtgacccactataaatttttttaggaactatttttctcatgtcacgactcaacaaagccttgtcgtggcccgtgtcctgactccaaaaacaatgtttctgtaaaggggctagtcgcgacattcaaaggccatgcctcaacccttaacaactttatcgatttttatatttttgttcctgaaaattcaccgaagttgtaaaataacttgaatataattaatcttttcatggaatcaacaccaaaagttattttttttcttctctttgacacaatttctttcaaaagttcaattcttcctctttatttactaaaactacaaaagttcgataaaagtacttattcttgtagtgtatacaatcatggaactactattgataccaactgttagttttatgatactaaatcagatacgcagtggaagagtttcatattaactaatcagcattgtaccatatctcaatcgatctctagatgtttgtacattaaatcattatattaaataataagtttaggatatatacctcatgaagactatcagggtat

SEQ ID NO: 229020 - DNA, 2148 bp, Cannabis indica
agcttcttgtcttctcccaaaaactcataccgtagatgattaggaagcaccttcagttctaattctggtggttttttagtagatggcacaggcttctttggcacaacacccaactcttcataatacttcctattcaatggcctataggagtcaagccatttgccatatcccattacctccattccttcttgctcattcaactcatcctcggttaagctcaattctaaaggatcttttatcaactttttcttctccactatagtgtctataagatcaacaaagaaacagttgtcacttgcctttggaaaagtcatcgcttttagaacattgagaaacattgagctcgcttcagatgattttactatgattcaactttattagggtggtaacatcgttgctgctctcatacgaatcagagatgagatctaatgccataggccaaggacgattcaaattactccttctctttgagtaaggttcgaaatttgatttagattcggatgatgttgagagggaatggtggtggtggtggtcattgaagagagaggtaatggtggtggtgctcgtctaggtggtttgtgcgagcatcaccgaagagaatggtagtgatttatattttagaaggtttggaacttaaatggcatttgaagatgaatgaaaaaattggggtttttaatatatgtttggaatttcctacggtttagaaccgtaggctaaagtatagccgatagttctaaactgtcttctatactttagcctacggttcaaaattgtaggccattccaatttcaaaattttcaattttaaagcaaaagtatagctgatggttctaaaccattggctattctcaacgagtgtttaaagacaacgactattcttcattataggtgttggtttcaaataccgaattaattttattagtggcggttcatgtggaaaagcaatttgagaaccgatgggaatagtaatttttgtagtagtgaataaactatttgattggcaaaaatgagtacaataatttaacaaatattgtagcacatttaaactagtaaagtattacaaccatgttactaagggaataatattcaaagattaagttctcaaaacaaaacaagtgttaaaagtatttctacaataaagtgaacaaaagaaattgagtgattacactacaacttctaatcttcattagtaaacaggtcataaaggtaaatataatgtctacgtatagatgagtatagctaatttaacaatcatattgatctgcaaatccaatgaatatccctatatatatatttatatttttttttcaaattaatatttgaccaaaattatgcatctattaaatgatcgtacccaaccataaataatatgtagctggaacatccttgcttaattaatattttttttttaaagtaatgtatgattggaataaattaaccaatccattttagcgcgtatatataatccaacaataaggctgtcttccatttagaagtacttcacatgtactggtcctaccattattaatctgtatattaattagatcactgttatttcatttttttttttgcatcctaattaaagtaaggcatttctcaaatttttatacttttttgagagtgaattataatttttttcatacgttccatatgatcgttctaataggtgattctgttttcaagaatttatgaatattttatagcatcaatatattgacattcaaaattcaaaataatttattttacgtataaaataaaatagacatgcatacgtaaatattgaattctgttagaaaattgttgtgctataataaaaatatcaaaccaacaagattataactctatgacaaataatacaaaagacaaaaatatagagaatatggagagaagagaagaattacaactcaaagtaataagctacacataaaacacaatatataaatagcatatatataagagatgtgagagcaatctcaacaccatatacactacaagtgtataataggggagtcacaaaacttgaacaaggtcttacacctttgtccaaaaacttattttcccctaccacaagcacttagggaaaagaaaagaatcgaaataactttcaggatttatcaagcctatagtgtttctagcaatgtgctctctt

SEQ ID NO: 229021 - DNA, 1217 bp, Cannabis indica
gaacattgtcctaagtactgtatgtgaagtttataaggtggggatgaaagcgagctagagaaaatgacattgttctaataactatagtacaagtatgacaaatatagacaaagcatgttacttgttataacttgtttcgttcaacttatttgaagtttacaaagtgggggaccaaattataaaaggttttatcattggactcattaatattgtccaaattctcatcaagaaaagttaattaataatatatgcatactttaaaaaaaaaaaaaaaaaaaaacccaaaacaatctccttattatgatctagcgtggtaaaggtttagcacgctaggctcaattgaagtgagtgggaaaatattgatcatgctaagtcaacctatgatggacaataatttcttaagctacatgtattgatttgaaattgcatgaattaggtgattatatatgtacatatatgtgagtcttttatatgtatcagagaaagtcatcataaaacttatcaaactcactttgcttaaatccagtctcaatgatgggaatgcaattctaggaacatccttaatgaaaaaagggcaatagaacttttcttcatcttaattgctaatactatatgcataatttgggtaatttattgaagattttgcttaaagagatttcagaaatagctttttctttatccttagcaatgattaaagttccaaaacggtactaactttttccaaatgttgttgaagatgaaaataactgattttttttttttgaacaatgaggcacctccactacttttttgggtacttaagagacatgagattggaaatctacatttgacaatgaattgaaattcaattacaaggtgtgggtccattggtcttttctacttctcaatttttatttttttttcaataatggtcaactgcatttggaaatacaacatactatataaaaaatatataaattaagggttgcaagatgttttttattttaagaaacaatataatgttcacttacctttatggcctccttatgtagagccttctcaaggaccaacgtgtcatatctttaatgaatgaaaatgtgtttatctttagtgccctttatgtaacacattaaaagctgtcaattggaaaataacaaatcagaaaataaataaataaaaagtggtaaaaaagaaaaagaaaactgttggggcttgtctcactttttttttttttttgt

SEQ ID NO: 229022 - DNA, 2497 bp, Cannabis indica
aattgataaataatctcttttataattaaagtactaaatataacctcacagaacttatcaaaattagagtttctaatacacataataggaatatgacctataaaactggacataaatttaaaaatagtaaaataaaagtaaaatttaaaataaaaaataaaaaatagatataaaatgtaatttcctcaaaattaaaaggccaaacccaaaaccatttgagaaaaccaagagcaggcccaagtgttttgggccttgggaaaaaatctaacatgatatatttcttgaaaaaaaaactaagtttatattaagaatagtctaactaaaattaaaatgaaatcaaaataaattaaacaaaaacaataaatatacatatatatactaggtagatgttacatgtcaaagccacattgttaattttatttgaagttttagattattttttatattttttctatttttattgcttaggcgttttttatttgaaagaaaaatatttatactcaaatgtataaataggcaaaattaataaatataaactggcaaaatgtattaaaggaataatattaatgttttgaaaattattaaaataagaaattgtaacttttgaaaattaaaaaaaaagtttaaagtttaaaaaaattagagaacatactccaacaatattaatcaaaaaaacagtgaatatataattgattatatagaaattattctgtacatattaaaccaatttatcaatactgtgtataagtaaaacaaatagaatatataagacaatgctctttggaaacgaatgcacatacagtatctgctatttttatataatgtggcaagtattgagtcatcttttttaatatttatttttctttcttaatttttttaaataatatgtttctaaaaaaagtttccaaaattatcttattatttgttaaaaatcaaagagaataaccataaccatgacccattattacaccatccctttctctgtgaaatgtagtctcattttcatatcatcatccccacaaaaggaaaaaaaaaatagaatgccttattatttcgccataggaagtggtcgaacgaatcccaagcaagactgaaaaaatcataaacctgctccactgtcaattatgtattgtgctccaccaaaatatattcacctacctttaagcctcaaaaaatgtcaaaaagcatattaatgatggcgaaaaattataaaaaatgtaaatgtacaaacaaaagatggtaaaattcttcaaaagcattcccaagaaacaaattagatcaaaatagcacaaaatcaatatttataataactgtaggataattcaatgaggtatggtgtactaatattggtggccggtaatcacacatatgtaacaatctttttttaaatgatagaactgatcacatatatatttgcactaaaaaaaataggcttcaataaagataaatatgattgatacgtgcagtcatatattgattttcaatggaataaaaattaaaaaataaacaatacattaaagagtgcatatcaaattatcgctcacaacaatcaataaacaatatctatttaaaaataaaagctaaaactatatatgaagaaattactattgcgatagcaaaacctaacacatgtttgattaagtgctgagccagaaatcccacatcaccctgcaataaaaaagttttaacaattataaaagttcaaaatgcagctattctcaaccaccaacaaattaatatatgttaaatacatccaaaaagcttatgcagaaattaccattgttataacaaagcctaacacatgtttgattaaataccaaggaagaaatcctacacccacatgcaatacaaaagttttagcaattataaaagtttaaaacacaactactcttaaacaccaacaaatcatattaaatacattgaaaaaacttaattatatgtaatatggctcacacatagaaaaaaaacaaaaaaaaaaattatcaaccaagcctacttagatgatgaaaattgcctcagagaagagataaatttattagtaccacatggagacaaatgagagacagaaaaagacaaagggagaaaccaacgtgcatgctctttaacctgattacgcatctcgagactgcaatattaggagagaaaaagattttagagacatgcaaaaaatgagaatcaatttaccttgatgaaaaattcctcgatgtttgaagcggtccttcttgcgacactaaggccattttctgtgctcctggcaatatcatcttctcgttgttgggcttgacttagaaaatttcttcaaaacttaaaaatagattattcaagactctttgaaaggttgattgagagtggtgacccagcgatttgatcctcattaatttaggggagttggtttacaatttcatcaacagaattacgattttagtggagttaggtttatgattgtgtagagaagttagggttacgataaaaataatttactaatatttagagaata

SEQ ID NO: 229023 - DNA, 2031 bp, Cannabis indica
agacatcctcgaagatgaaagggggcccacgttttgtcaattacaccgagttgtttgctcctcgcgaccatctttatgcaatagaagaacaagatggcattttcatgaagccaccgccaatctggagaaattgcgaaaagagagatcccaagaaattctgtaaatatcacaaagattttggccatacaactctagagtgatggtttcttcaagacgagattgaagaattaattagacgagggaaattcggccagtataagaagaatggagacaattatccccgagcggatgataacaatgatacaaatgatatgagtggttctcgagctcctcacaatattttaactattataggaggattgcatgtcggtggaaagactagaaaggcgcaggagcgctatgcaaaagaagcaaaagaaaaaccccttacaaatgtgaataatttaagggaacgactagagaagttgttcaaaaaagaatgcgatgacattacctccatggaaagtgacgcgaggtgggtacatcatccacacgtcaatgccctagtggtagtcactaacataggaggggataatgtatatcgtgtcttagttgataacggaagtttcgtcaacctcctaagtttatatgcttttaaacaaatgggattgcatgaaaatgacttgcgaccagtgacctcgagtatatatggtttcattggggatacaatcgcattgaaagggatgataaaattaccaataactctagggactgcacctattactgccaaattaatggctgattttacagtaattgatcaacattctgtctataatgcagtgataagttatcccattctaaaaaaaaatgaagatagtcccgtcaatttatcatctcaccatgaaattctccacccctgggggtgtgggatcagtgcgaagagtccaggaggactcaagggaatgctataatactactttgaaaatcgcaaaaaagaagaagtcgataaatatcatctattttctcgaagctcctccccctcgacatgaatttttcaaaattgaggaaatatcgcatgtagagaaacacgatttggatcccaggatcctcgactataccaacattgtgcaagccgaagaagagacaatcgagatacctattgaatcccttgacaatactaaagtgctaaaaatagttctaaactaacttttcagcagcgagaaaagcttatcacttttcttcacttttctcaagcagaatctgaatattttttcatggaaacattcagatatgttcggaatactgcccgaggtcatgtttcaccatttgaacattgaccctgaagtacgaggagtacgacaggagcgccacaaaatggaccctgcgaggtaccaaacacttaaagagaaagtggatcatttgctggcatgcggcttcataagggagttgttttacccaaactgttagctaatcttgttcttgtaccaaagcccaatggcttatagcgcacatgtgtcgactttacaaatttaaacaaagtttgtcccaaggataactttcccttacctagcattaaccagcttattgatgccgccgtaggtcatgaactccttagctttatggacacatactcgggatataatcaaatctcgatgtatgagccacaccatgagcacacctctttcatcactgactgaggtttgtattgttacaaagtaattccttttgggttaataaatgcaggtgcaacgtaccaaagattggttaacatgatgtttgcatattttttagggaagacaatggaagtgtatattgatgatatgctcgtaaaatctcaacatacaaaggattatgtcctcacctagattccatgtttagaatcctgcgtcactataaaatgtgacttaatccgttaaagtgcatttttggagtggggtcgggaaaattccttgattttatggtgaaccaacagggaatcgaggcaaacatagtaaaaataaaagtattggtagagatatgatcttctaccaaacctaaagaggttcaaagcct

SEQ ID NO: 229024 - DNA, 1020 bp, Cannabis indica
caatcttcattatttgcccaagcatgctcataatggaatctagagcccccattttcttctaaacgacctcccctatcaccttgatgagcttccaataaaaccggcctatgatccgaattccaccatttgaggagagtgaccttatttgatttaaatttatccatccataccgagttgaaaaacactcgatcaagcttctcataaatcaaatttaatgttctcccattgcaccaagtgaaagaattcccagctgaagtaatttcccggaaatgacaattcgaaataacttttcgaaaatttttcataagataatctggtttttggctgcctcctttcttttcctttgtacttaaaatctcattgaaatcgccgccacaaatccaagcattgttgaacattgtcttgagcctatgtaacaacttctaactttccaatctccctccaggatcagggctcccatagaagccagtaaaccgccagacaaatcccaattcattctccaccaaagcgtcaatatgtctctcgtaaatgatttgatctgaaccataaaatcatcagaccaaagaagcaccaaacccccgcttttacctctagcatctaccgtaaagcaactagcgaatcctaattgcacccaaaccaactccataccactgctatttaaccgagtttcagacagaaatatcatctcgggatgataatctttgacatgggatttcagggtattcaatgtccaagggttcccaagaccttggacattccaaaacatggcaatcgtggctctcggcgacctagttcaactaggtttgccgctttcattgtagcgtcaagggtcaaatccaattcattagaaaatccccttgatgaattaccccgtacttcctttgacaacttcgattgattggtctctgccactctcgctttccctttgttcttatttcttttaggagtcacccttctcctttttaatggaccttctgccttactgagactttcatgttggaatttattttaccaggatct

SEQ ID NO: 229025 - DNA, 1920 bp, Cannabis indica
gagcttgacttatccgacttgcgaactcagttgccgaaccgccacccttcatcagcaatcggagacaaagaagaagaaacgaaaatgagagaaaccaaatggtgaatgtagtatttttgtaattataatactttttgagatttaaaaaagtaaaagtagtattgtaaaaatgtttaataaattgataagcattaaaaatgtaaaaaagtaattgaatttgatacctagtgtaaaaattcctaatttgatttcatattttttagaaaattgcatggataatttagtttttttaaaaaaaatatatatattctaaacatatacgtacttttcaaatgattaattgaatcgccaacaaataatgatgtcattgatgagtaaagggtatttttggaatacctgaatgaagcaatctcgaagtttattccacctattatttcatttgacaaattatttgttgcaccttaatttttgtgaaatttttattgcaacgtgtcacatcgtaatagaccttgtaccttttttttgtattcaattctctatataaatgaatcaatagcactcatgctcgttgagttgggtttttaatttttgtacttttctcaaaattaaacttagtatcaaagcttttaaaggctaacgccaatggcaaccgaaggcactcatgatgtcacaattaatcacaccaggaaagactaattcagaaaactcttcaacatgctccagtgctcagccaagttcatccatccctgcatcacctccggtgactcctttcaataacacattgagtcaaccattttcactcaagttagataaaaataactattcactatggaaaattatagttttcactataatcaaggaacataaactcgaaggcttcttcactggatagaggatgtgtccacctgaaacactcacagttcccacaactaatgagaaaggaaatgttggcatagtatagttgacaaacccagagtatgagccatggattgtacacgaccaactgctaatgggttggcttatggttcaatgacagaaggaattggatctgaggtgatgggttataaatctgctgcaacagtactccgggagctctatagagctcactcaagagcaaatatggatgaacttcgaacaaaactatagactactcgcaagggagatagatctatggcttaatacctcaacataaagaacgtgggaagatacactggctattgcaaaagaaccgtatccagaaaaattggtcagaggtaatatactttctggtttagatgccgagtacttatccattattattccacttgaagcttgtgcagagctgtcctagaaaaagcttcaaagtacttttcttagttatgacaacagacttgagagactccggtctctatcacccaccaataagatgctcaacattccttcagctactctggcttaaaacctttaggatctgacaataaaagaggttttcaaggaagatgttcttgcacaaacaacaacaataactctggtcgtggctacacacctcaagaatcttctccaataggaggaagtagatataaaggaagaggaagaggtggcagaaacaactccaaacaaagctgccaagtctgtgaaaagtattggcactctacaacaatctactataatcaatattatgaagcttttatgggccaacctccctcatctgattacaatctcaatcaggaaagacaatcttagatgtcaggtcttgtggttgctccctaaactctaattgatgacagttggtatgcagatagtggagctacaaaccacctaactccaaatccagaacagctaaaaaataagaaagaatatggtggtaaggagcatatgacaattggtgatggtactaaactctccattaaaaattttagaaatattgttctaaatattcca

SEQ ID NO: 229026 - DNA, 1897 bp, Cannabis indica
ttaaacaattatttttaatttcctcattgtattttattttggaatataaattaaggattgattcatatttagataataaaattggttctgattctttgttttgtttttggtaatttgtatgcaggagaaaagcaatattgtgagaatttttgggagaaactaaagaagttgtttaatcctatttcattgctttcctctatcgaattgtttttattatcatgaaaaataattattattatttacaataaataatatatggtgtatgttatttttctggttatatatgctagttttagtttttagttcttttttatgttccattgttcttcattttctttttgagctgctgatttagcttttgtttgtttttctggctagatgtattccttaatttttttagtggtgcacacattatgaaaatggcaatattgaattttgctaagtgagtttgaatatactctgttatttggcctataaaaaggggttggtactccttttcattttagtgacacaagtagtttagattctagggagaaagaaaaagtgagttattttagagagagttgggattaattggtttagatcagagttgtgaattttatgtgtgctgtgattacatgatggaaaaacttacctgagattgaattctttgtagctcttgagattggtatctctctaaaatcaataaagaaaagtgtgacagtgcttttaaactagagtagagataaagttcacattcatcttcttgaacaagtataaataaatcctttgtttcgtctctatgttttgctgattcatcattgtattcattgtattagttcatttgcatttgagttacttggtttgtttactctagtctagttatgagtgtttattgaaccacatctaatatttttatttataggaataaattttatatattggatgtatttaatgtatatttattggtttaattcgagtttatctaatattttagacctattatattcgagtttaatgtatttaatgtattggattagattgaatccatccaataaaaaaaaattaatagttaattttctacgtattacatttatattttacgcacaccccatctaacatttcggattacaaaaatttacggcctaaatactctcaacaccttgaattgaatggtttacaaaaatttaatataaaaaccctaataataatataatattgtaggagtaatctatatataagtatgaggcggtgatgtgacatcctaatatcattgcagctttatctcttctctttttaattctcttatttttttttaattttttattaggtttataaatatttatttattttctttttttttatcattttattattaataattatattaattaataattttaagttttttttaaaaaaaatgtgccttttttttataaaaaaaatctacatatatttattttcttatatatttttttatcatttataacataattttgaaatcagatttttttattattagtgttttatatgattcataattgaatgtagtttcaaaatataaattataccatacaatttattgtttttacttcttttctattttgtattcattttttatatatcacatatcttctattctatttttattcatttttttaattttgaattataaataatatctaccatatatctatctatctatagaagtatgaagtattaacgtgacggtctaaaatttctctaattatctttatttgttctccccttaattctctctttttttatttaaataatctatatatttattattttttacttcattttttttaatttgtttttatttattttcttttatatttttattatgttaatttttttttaaaaaaaaatgtctatccaatcacactatatatgt

SEQ ID NO: 229027 - DNA, 2153 bp, Cannabis indica
tccatccattcctggaaagcctcttttgatgtgcgaatgtttcattcatggctgctcgggtatctgcttgatcatgatgaagggtgtaagtataattctgaatttgagacacttcttctcttaaattacacaactcgatatcataatcaatagtcacctgaggtttgccaactagtggccccctaacacctgggctagtctctccagcaccatgggtactagtagttctagtattttgagtgcccggagtaacgccagttctatgaaagatgttgtttgaatcattcgcacgaggatttcttggatttgcaagagtttgaatatttggattagtcaccataagatccgtagaatcagtagtctgattccttcgaattgttacaaccatttatgattttaattgagcgagatcaatccaatagcattcttgagtttagctctcaatgaaagtaccaaaatgttgaccttgtttttggccaatgacactaagtcttgaacgtgatctagaattaattagcttcaatgagaatatgtctaaaataaagcataaactaagaacacgagattctatagaggttcaaccccatttatctggtaatagcctattcccctttttagttgtattttacttgtaagaagagaagcaagaacaacttgatctcactcgaaagctttcacagatatttaagcagcgtaattgctctcttgaaagtatgatttcgactccctgaataatggaatgactctactatttataggggataattacaataaaaaatagtttcttaaaagacgtcaagccgtgaaataggaaactaataactttcctaaactatgataattacatatggaaatcctctaaaatagggatttaattacatgtacaatggaaaactgacattaatgagttttcttcacgtgttttgtcctagtcggacaacataaagcgctaattgcttcttgccatctagattaactatgcttactctgtacagaattctttaccttattcttttattgttgcatctagcaagttgctaatcctgggtgggcacttggaagaacatttgttccgcccaggtcttgataacatgatacgtgtcactcaaataagaacatgccacatcacttgaacaagattcaagataacaagttatgctagggtttgagatgtttagtttttgggagaaaattgtgtttgtttgtgttggttttgagaagcttgttgcagttgtagtgtgtttggagctaagtttcagtttttgaactcaaacttagctcaacaatggtagttttaattttagtaggtttttggtgttgctatttgatgaattatgtttattatgcatttattaggtattctggaaagttaggtttgatttgggatagaattaagggagaaaattagaggtttgtgatttctgcactgaaaacgattttgggtaccctaattttcacattttctcgatatttaaagtatctccacgctatttatcgacatcaaaacttttaactttgagtttaagtccccaaaaatattttagtgagacacttatcagttttacgttaatatgacttaggacctctaattgtcgagcaatttttccactcaggttgaccggcatacctgattacagaattgaggtaagattaatatgacacatgcagatatgcacatgtttagcgtacatgtttacattttccaattagataacatatcagtaagaacagtattaatttacatattgactaattttcaaaataattgatccttgaccactcagaatttgcagtactcagttaaccagcatgggaaaattgaaaaattgggtggttacaacttttgtgttcaatttcttacctaattgttttcattatttttatacaattagaaatttattgaattaagacaatgaaaaaacgaacttgtttttgtaccatacccaaaagcacaagcacaacaatatatgataaaaccccaaatccaaactcatagtaagagcatctgtatgactgacatgatggtaatggagaatggaactttccacttctgattgtaaagacctacgaaccaataacaccagatcaaaataatagcaagaataaattctatttttttttcctatttatgtttaaatggttaatctttgata

SEQ ID NO: 229028 - DNA, 4303 bp, Cannabis indica
tttgttgcgataattaattaagaactgaaaactctctctctctatatatgtatatatatttatataactaagttttggcccaccccacaatatagtgatgaatatagcaattaatgagttggtgggtactctaatcgtaattgacaatttcaatgtgtacactgtacatgcacctatttaatgagcgatatctttctagtaatttcgcaaccactgctttcgccctaatatgttggattttttttccatcacatattatataacatacgatacaaattacatactactgagctcagctcttctacaattttttttttgaacataaagctcttctacaattaaaactcactatgtttgcgacattcaacaatattatttatcttcataatatttaacttattatgtatggataaacactacaaattataattagacaaaagttcttaaatctaaaaatgtcaatagttcaggagaatatttaacagcaaaaaaattcaggaaatatagttcgggaaaaaaattactaattagtctaatattatttatcttcataattaacttattttgaatgaacattttgaataatgataaagaaatacaaaaaaaaaagttattcaatttatgtatagatagacagtacaaattacaattatgataatcatgatactaagttactcgactactattactgttcatatgtgttctataacatttcataattaaaataataatataaaagatttgagtaatttatcacataaattttactcttagttgtaaatatatatatttaagtttaaattttggaggtaataatatctaactcgttttttggaactactctgtaaaatatcaagtgattatcacgtgttattttcttattggtatatttaaattatttttttttttaaaaaaataaaaatgtaatgatatggaccaatcagtggcaatttataacagtcatgtacctacaaaagttcaagaattataacttaagtattataactgttaaaaattaaatttaagttttgcaaactaaatttaaacttaaatatttatgccttaaattactcaaaaaaatttacctcttaaaaacctaaacttatgacactactaaatgatgctcaaaatatatttgctggttaaaaatactctccaaaatacatattactaataggtattcctttatatttatttatttaatttaggaaacgaaaaacttgattaaataatagagaaaaaaaaatactttcccaccaattttctaaggatttagtatacatgattgtattggattggattagaaaagattattggactggatcaaactagataggattatgttgaatccagtaatgtatttggttatgagttggattagattttttatgggattttttacataaaatgccatttttttcactctttaaacatttatacagttctatactttcacttcatttttaccatttttttaaacaaatatacggttattatttaaaatgttacaacaaatacggttttgcttatgtcacttaactgcctacacgtttctctctattctgtcaaatatcaatcacttctcttgccagttatcactctctaacgcactctctctttattctttttttttttattttattttatttttttattttgaattccttctccttcatcattctcatcatcatcgtcttcttttcttttcttttttttgttttttgagtggtctttattcgtttcatctttgtttttgagtaacggctgttactcgatctcgttcaagctcattgtccccttatcaaaaagcctattaaacaatctaaacagaaatctgttgctcgaaaaattttgaaactccctaatcagaaactcaaagttgttgttgatgttggtgatgagccatcatctgagcttcctctgattatatctttggtgatgctaggaaaactacgaggaagagaaatgataataatgatgatttcgttactgtgcgtcctagaaatgtatttttgaattatttttttttattttttgttgatttgttgtttccttttggttttttatttttaattcaaatgtgttattatctgtttatttgattaattttttgagtttaggatttttttctttgttgttttgatgttgtgggtttcaattttaattttacaaattatttttgtatgttctctatttcgttgtttatttatttatatataattttcttcattttaatttgttcaatcctaagttatgttttatatgtatttttttgttgattttttatttatatattgttatggggttattcatgttttaacttataatttttattgtaatatgttttatttttcatgtttttcttcaatttttgttggaaattttctttttagccttttttttttatcaagaatgtgattgttttcatataattttgttattttttgttgaattatatgttatttgtttatttgttgatttttaggatttttttttattatttttttattccttgttcatttgatgttgtgggtttcattttccatttttcaaatataaatgtgtataatctatttttattggtttttttttttgctatttctgttttttttagtttacattttgtttatttatttgttctttcttattggttgtttatgtattatttttttatgtttattttataattgttgttgttttactgttttattaattttactattttgacttttcagttatgggataataaatttagtaatgaagattttcatactacacgggtggcttcaacttgctcttttaaaataattgagactatcaattcaattttttccagtgaacagaaggaaatctttggataaactgtgtttggatgctttttaagaactccttcttatgttttgcaatataccagttgccccatagtttgttgttgagggaggtggtagccgaatgataacgagttgtggtttaatattgctggtcggatgctaaggtttagcattgagaaatttgctttggttttaggccttgattgttcttgtcaatgtgacaagtgtaggtgtaaacaagaaaaaatttgttgaatgagaagatttttgctggttttaaagaaattaacaagaaggacgaggagaaagcttttgttgggaaaattttcggcgatgatgatgagcttgcgttgaaagttattgttttgtactttgttcagtgttttgttttaagtgattcagtcactaaaaaagtatctgacttagagttggatattattgatagtgggaggttcaatgaatatgcttggggtaaagagtcttattatttatttcttgatttggttagaaatgcgattgcaaagaatcttgttaaaattaataaaggtgataatggagaaaaaataggtttttataggttgagaggtttgacctatatttttcaagttttgttcaatgaatgttgtgtttacgtacattgatgacattcattgttctaaattgcatgctcgtattcctagaattctgaactgttctaatgataatgttccttctcttaaggagttcaagaattctatcttcagtatttctctatccaaggtatatttagtttttaaaattttgtttcaatgttatttttttgtttattttatgtgtttattattttttttcctgttttatttttgttacagcttaaagttaagaaattgttcccaattgaggaggaattattaagcttacatttggatggattctttgtggataagaatttagatgacatgaggaaaggaaaatctctgcagattgatgatgttggtactcaaggttctgttgatgaaaatagttcatgttttaaatttgcagagtttcataggagattgacagatatttctgctaagcaggaagcattctctgctgaattttttttattttaaaataagattttaagaatatgatgcattctttgaaatctatgcataaaaaaattgacttgttgttgtcaagacctcctcccaaggtttgttgttattaaactttaaatttttgtttatttttcaagaagtattaatttttgtttatttttttatgtgaaggattctcatgatgttgaggaatatgataataaggaagatgttaagattgaggaagcttctcatgcagatgaagatgatgtggaagatgatgatgaggatgatggtgagaatgaagagggtgataatgagggtgataatgaagagaatgaagggggtgtgaatgaggatgtttctcgaggtgaaaaaaatgatatcaaaggtatcattaatgatgaggat

SEQ ID NO: 229029 - DNA, 987 bp, Cannabis indica
tacccttttttaaagtatcaacattaccctcctcaagggtagttataatactaagggaataacattccaaggctaaagactcaaaacaaacaaagtaatgtttcacattaccattcccttattagcattaacccattccaaacacccccttaatcttaataccataaatttaatatattaaaatttttacataactttttataataatttataagattcatgtgttcaatcaaacaatatcattcaattaacattaacctaattagatatttctatgcataaccaaacacaattataagtctcaagatgatcatattctctgttttagatattaatattattccaattaatcaaattattttgaataccttataccaaacacttactattactactatatttcaccaaatcgactaagagcatccacaacaactattttaaagtagctaaatatgtaaaagaaaaatagctaagagtataaaagtggtcatccatcagtctctctattatacatatacattttacatatgctacagtatatcactaagtgtggcgatagctagagtgcttcaaatctttttaaataatttttattcttttttatttagtttttattcttttactaagtttttattaatttaaataaataaataaataatgaatatataatattttaataatgtaaagttaatatagagaaattgatgtatggtgtaatgtaaaagtttgagctaaaataaaaaaaaaaaattaagattttggtaaggtattttgaattatatagagtagagaaattcttgtgagtgctttaaatagtatcgctcatgcatgcgcttgtcaatttaactctatggcatgtttatgaggtttgatttgaattttttggtcgattgtttgatttgatctgatttatgaggttttttaatgaattattttaatttttaattagtatttagtaatgcaaagagttctattaacactattttt

SEQ ID NO: 229030 - DNA, 905 bp, Cannabis indica
tgggaattcgaccagatttgcttgtgtttttgaaggaacataatagcaaagattatgagtgttgatagtgaagaaactccggctattagaaataggccccagaagttgtcgagacttagactgttggatgagattttggggtcagagtttaaacaagtattttgttcagtagtcatgaaccatttgttctcgatctttttcatttcgtctccttcagtcacgttgagaattgcctttgaaatatcatgtgccaaaggagacccatttcgaaaagcctaaaacaaacagagcgcacatacacaatcagggacgaacttacatagagacgagggtggacaagcgccaccattaaaagaaattgaatacctattatgtattttaatcaaagctaattaattaataacaaaaactaatttttaatataccattttttttattcaaaaatgctttgaatttcaacaattttttaataaaattttgatcaaacacacgcacatcatgctcaatcaaaaacaaaacgtacattcaaccattctattttaaagagactattacaatgcaatttaataatttttttttttttaaatttcttatacattttaaattttattccattccattcatatttttattctcatttttattcttgtttctatatttttattccttccaactaaacacaacctttagctaattgaatattgaaccctttaaataggtctactatcgagaggttaagaggaaattatactctatattcttttcatattgtcctcctttatttttaccttatttttaaagtctatcatttttacctctttttttaaacattgtaccaattttgtccctatcacttcaagatactctctatgtggctctcttatgtcagggtattttgggtacaa

SEQ ID NO: 229031 - DNA, 650 bp, Cannabis indica
aaaaataaagtaaaccaaaaagaaaaaaaatgaaaagaccaatcaaagagaagcttaattacgtaagtcttgcatatcaatctataaatacttgttcacccacagagattgcaataaggaattacacattagaacaaacttaaattacttgactatatattttctaccttcaaaaaatacttataatattaattaagatatgatgaagacttgtactttattcctttcggcaattgttttagctttggcaactcatattgctagagcatacgaccccagccctcttcaggacttttgcgtagcaatcgatgatcccaaagatatgcgtacgtattttccattttaattaatttattatttggttatcactttttattttattttatggtatgaattaatacttgagcagtgttcgtgaacgggagattctgcaagaacccggagctggtgaaggcagaggacttcttcttctcaggaatcaacattccaggcaacactgacaacgcagtcggttccaacgtcacggccgtgctcgtcgacaacctacccggccttaacacactaggcatatctcttgcccgtattgactatgctccgtacgggcagaacccgcctcacactcacccacgcgcctcggaaatacttttcgt

SEQ ID NO: 229032 - DNA, 2760 bp, Cannabis indica
atatatgttttaaaataaaaaatattactcatataattataactttaatcatttatttatgagaaaggtagataatgaaaaataatttttgattggtatagaatgacttttgaagtcattctatttaggaaaagtaattcattagttaacatgaattacaattcctattggggtgagttttccaatgacaataaactaaccaaacacttgaataatctttctttaggaataacaatttcattcctacactcattcatgtaaaccaaacactcctcttatcttctaactagaaatcaacctgcacttggcaagcgagttaatatttttttagagtttttttttatttttatacttcaaagtaattttttttttatatttttataaaattttacatagcaactcacgcaacaactaacagaacaacctaattcgaattcacatagtaactcatagaaaaactactggagcaacccaaactgtaaatttgaaaagaaaaaaaaaaggttaaaaaatagtatatggtgtagtttccttatttttttatcttaattgtttattaattttattatatatttattgagtcattattaataattaaaatattgtaaaaaataaaatgataaaataaaattttattttaattaaaatatttaatttattgagaatatttaaaattatgcacaaatttatcctagtaaattaagtattacaaaaatagaatgggtcaataatttaaattggatcctatattgtgtataaattatcttgacatttttaattgatatttatcataaaatttaaattatatatcatagataattttaatgaatatatattaacgaataattttttattttcttaatttatgatcaaaacacatttaataaataaaaactactatattcaaagcgttgttattaccggatacatttatatatagttgctactacattaaagttattgttatcactatatcttatttatattcgtcactacattcacaactgttagcaacatcgttgtcttcataatgcattaaaatagcatagtcattatttacaataattgtatcttgttgacttagaaatttgaactagacttctaagtcacactcacttgctaaattggcatgaatgaataagtagttaaatatttataagagagagagagacagtaaatttatagtagttcactccctatatcgcgatagtaatggagctacgattattttgagtttttatttctcacgagatggtaattacatcaatagactaaatgacagaagctcaaaattctagagatagaaaatcaagagagagaagctctgcccttgtgggtagttttctggatgtgaaaaatgagctcagggagctctccttttataggtgaaggcggccaaaaaaataggaaaaaaatacaaatattttttacaattgataatgatctaacggtaaaaattaactcttggtggtgatggccattttttggagccctgtgggtcccactgcgggtaacctagaacttatttttactctcttgtgtgtgaattttgactacgacagcttcagaattacgtctagagtgtgagacactacttgatagatcattgtattagcttcaaaagtcaagttgaatcgcgtcaatcagatcataattaagtgagttatgactgttttactgaaggcaattcatgacccagcaccgaggttgacttgtgacgtcaacttggacgctgggtaagtgtagaaatgtccaagggatgtactctaagatgcctaagctatattttgacatcacttaatctatttatgtgttttggcgaaactagtcaccagttctcggagttcttattttgcaaaaataagagactcgaaactcttcctttttgagtgagctggaaatgaggatgcaaagttgtgaatttgatttctctaacttcatagatcatttttattgtgaaaaattagatggacggtcgaaatgatattagattcggataagcagaatccagtgcactaggcctcttgtcaacctgggcgatgggtacttactcccaagctctcgagatcccttttttaatacttccacgacttctgaacttgaggacggggtctcctatcctgtttttaccattatggatttaatggtcgcatcagatttgacatttgagcaattgaaggcaacgtcccaagtttattgtcaacttgggtgctgggctcaaccctaggtcatactgggcgttgggccctgtttctagggactcgagattgtggttttctctttgagtttgcttgaatcttcattatttatgatgatagaaaaaatacttagaacacttttttctaaacttgatcgaaaataaccaaggttgagaatatgtcaatctaggcgttgggcccagccccaagtgtcaacctgggcactcggtcccccttttgccccaccaaaaattttatttggcccccagaaatagttaaatctcaatattttttgttaatggagaagatcctagttatgatgactatgtcatattcttctcgcaatgcaaccaatcttcttaagatgctttatcataaaaatagattatcagcgcctaagtatacttcaagtagtacttcttgcattcttctattaaatgctgagtgaggcatacgcgagacgcttatcacagtatgacaattatgaggtgaactatgctgggaatgttgcctttagtctttcaacatattcaccagtgtgtgggtcaatgagctgcgagct

SEQ ID NO: 229033 - DNA, 1689 bp, Cannabis indica
cattgcaacaaaaattagaaagacataagaagaagtcatataatttttcattgcacgagtacagaagaaaaataattatcaaatttgaaaacgttaagaagaaaagtacttgactatggccaaaacaatgtaaagcaaacacatagaaagtaaaaccatagtctagaaagatgtaaaaagagtaggaaattagtcgtacttcattaaacaaaaccataaaaaagaaataagtaattgtatgataatattactctctgagtagttgagttctaacatgtgaaaagacacatttcccaattgagattgtaatgaaggaaaaaatgtaagggagaaagagaggaatatatgaactaaagatgctgtggattcatggatgtgcgattactaagttgacatggaattagtgacagaatttgaacacctgctctatcaaaataagcaggtttggtgtaaagtgaacaatgatatacaaatacacgaatgtaggtgattcaaaatgaaataatctactattgacaatattacgggactcaaacacagtagtgcccaaattgaagataaccccacataaatttactttcaatgcatgaataattatacattaaaataaaggttgataaggtaaagaaacaagagtcgcacaattaaagcctgaatcaccagaaattaaatataacattgcattcccctcaaaataaaataaaaaaatatttaaggaattccaaatcagctcagcctcatgatcatgatcatgcctgatttatgaaaatattaaagaatccattggtccctaaggaatccccgaaagggctgccattcaatggatacacgaaagtgatgaagttgctttaactacataatcatgcttgtctgtcagagcaaattggataattatccaatcaattaatcccccaaacctgggaagcttaaggagaaatgaaaagagtaggtgagggacactaaattgaagtcgctcgcttgctctaatgctcgtttagtaaacagcaagtgcataagctcctttaagaataggggcatgaagagccatttagggaaagatattgcaaaatattttggcattccagacagtgggtggagatggaggccaacattatggagcgtacttgaatacaatgaaataacaaactagagttagtactgctcagagttcatgatttcagctctttattcaaagacttagcatttgcgtctattcttcataacagaagtacagagtacaagaatcgtaaatcataatcacacctttaaccacagcagcaccactgttaaagacaagtgagagatcaattaggacatgcaggttgcaacatgccaattcatcgaggtacgatttttgaacagcagttgaagagcctaataataataatactagtacagcagatcattgcctttggctatgaagcatttcatttagctttagtattctttacgtgtttatgctatgcatcttatcgaattctcgctaaagtttaaatgagtaaagggagggtgagcttttggaaacattcattttcagatcatacatttcattggactgaagatatttcaacaattttctttggctctcaaaaagaagacatttttagacatgtcaaaacaagcttaaacctgagactagagaataatctcacgcaagcatctttgagtagctcaaatacttaaaatttc

SEQ ID NO: 229034 - DNA, 2289 bp, Cannabis indica
gtttaaggtgctacttgaaattctccacagtagccgaagtggctccatactgctccattcaacaagtgtatatcatctgcttaccagatggtacattttgtgcttctagaagaagaaacaagttcctactcgaaaggagattttgtacttctccaaaatccaagaccagaatatgaggaaccacaaggagaaggtcagcttagataggttgaagaggcattccaaagactttgtgtgccccattattgttatgaattacacatacgacatctggaactactagttttacaccttcgactttccacaaacgagagttccaactctctgtctcaatttaaatatcgtaagtagtgtagcagtttacttgaatttttttatttctctttgttctcttctcactttgagtattgaacttattctgcctttttattctctccaggctctatccctcggtcccctttacctttagagttggggacgaggtgatctttctaccactttttaatagtataagagttacaagttggacaacttgtaaccaccaagaacctctaggaggcttctttgttagcttctcataagagcatagatgctctgactgtgaaagatcttataagagatcttctccatggcaatcctacaaaagtgaaggaaaccattgcagttatcatcgttgaagaggccttgaaggctgttaaagcttataaaaggtagttggcagattggtatatctaatttctagaaagttaagtgaggttgaagagctctccattattctctttaaagatagtgtctgtaatgaaggtactcttggagcaagtagtttcgaaagttgtaagacccaattttgtcttgttagggctctatctttggtgaagttagactatttcaaccaaggtgagtttgacccttaattctttcacttagatcgtcatagatatcctatcaatgattatatagatagagtagacaacatcgtcaagagtccaaaaaaatttattccactagcacatgatgtctgggtagataattttagcaagatgttgtatccaaggttcttccaatatgaaagtctcttacacagagaagatattgcccaatatctagagggaaccccaaatatgctaaaataatttgtttgaatctcactcatgtactacttttattcatattgttctaatgcttcaatgcttatttttttgaattcgttttattttttacagagcaaccacttacactccaaatggcctggtagaaaagatttttactaccatctctcaaagatcagacgaggtcagggaccttcccaaaggtgtttgtaaaaggaaggctttacagtcttttgaccctacagctaagaagccatcaattctggccaaaggccagtcgactgtgcataaggttccagcttcagaagttgtttcctatcctttaaccacttccagtgcagtagattcttcttcttttggaagagaaaatgaaacttctttggctagtgttcttctttagaataggataattgatgtgcacaatgaagaggatgatgacaataattgacttgtatttacacagagaaagagagtttgctttgaacttggcagagatcgcaaaagatcaagtgctgaagctaaggataaacttcaacaacttactgtttcttggaagtatagtttggaatcctccaaaagaagaggaactgacgctcatagaagggatagaccacatagtcagagcactcgttcatgaaaagagattaccaactcttagcctccgccatcacaatctattcaggctccttcttcccaatcacccagagataagatgagtcttctaccacttcctccttctaatattgttttgttagtttgtgcttccttattgtcgaaaaaggtgtctgttcatatggatgcatcaaataagttttacctcgagagattcgacttcgaatatgaagaaatgaggaacaaagcatcctttctttcaactaggtggagtgcctaattttttgatgcttcaaaattgaacgacccacttcctactatttttaactgttaggcggttgctgagaggctctggccactgtaggttcagatctagttctatttatagtagacttattggacctaaatgttgctacatgtaccaggttatgtactcataagtatgctacaatggcaagtgaagattcaatcttcatggtagacactctcaaaagccacagtgctgctataagcatgctaaattttgtttgagctatatctttcaggcctttctatatacgtctaattc

SEQ ID NO: 229035 - DNA, 1726 bp, Cannabis indica
gaaaacttacatagacgaacatctcgaagataatttcgtttggaagaaaatataacgtttcgaaaggagatgaatgtccaatatgcccagaagaatacaaaaaggggtaagaaattttctttaggatcatatgtttaactcagaatgtatgcatgatatattaaccagtagacataataagtgtcctaattttagatttatattttcttaagtcattttatataaatttttaaataaatataatctgttcaaattaaatatagtatgtttttttttctttttaatagtataattatttgttatcatatatattcttcttcaattaataatgtatttaccttaattttatttaaacattaattatgtataactttagattgtttcaagcagcaatgacactcatttattacttcattatatgtatggtactatttcccactgtcttaccccaaagtcagaaaggggatagtacccaacataactggagttagaagactaaagttttgctaataatttttttaatcgagtcctttttcataatttctataattaaatgtatttatataatatatcgcgataattttcacagtgaaggaaaatatctatttgtgcaattaccagtgcaaaatgcacctatagaattatgtgcgtaaaatgcacatgaagaaaatgtatatttatagctcaaaaattttccaaaaacttatatgtgtatatatactattactattttgtaagttttaaagctcgtcatacattacggacctacttaggtctacgaccgtgacttaattaaacctaattaactttatatgtgagtctaaaattgcagaaatcattcgaataaaagagactctgagttagattgagcaggacaatgtagttttgaaaatggatagcttagttcgtgtccaagccaaatcgagtgttgtttcaataccttctcaatttgatttaattgtctctgattacaaaacattgcttaatcgtttgagttatgtttctttaagctttgttagtgatctgcagtctgcacattacttgcacgtgaattttgttttctaattaagttataatacacatcacaataaagttttctttttgctaagccattataatttggagtaattagcagcaaaatctctttataatttaatttttatttaatctcctaatctttctctggtggcaaaactttaagtttactttgtttttttcaaatttaaagtgttaaataaatataactgttaaatattaattaaatgattattatatacacttatgtataggtaactacaaatttgtaaaaaaaataaacataaaataaaagaattttgccaaaaaagaacagaagattaatagagcgtttactaaactgtaattggaatcagaataatcaatggaagaaatgtatcggtttaaaatagaaaataatcagaaacaatattttattatgatgtttactaaactgtccgaaatgaaaaccagaatcatattattttgtttacataactaggaaaagttaatcggaatgctttaatttgacaaaattgtcatattagaacatgtaattattttctttttatagatttttaaggggtatatttgtctttttcatttttaattaataaaattaaaattaaaataaattaaataaggaaagggaaaggcattccctataaaaatgggggaaaacatttccttttgttttctccataatttgtgt

SEQ ID NO: 229036 - DNA, 2464 bp, Cannabis indica
aaaattaaaaactgaaaacacaatcaaacaacttcaaacttcaaaggcattgtgaattcccttatatattgttcaagtgtgaaatttatttatttttattttgaaaaaaaatatttccttacaaagttctgtgaatataatgaataactttaaacgggaacctaattcaattcaaacctagtttgatctatcttggtgatactctaatatttcgagtatggaatagatagaagaaaaatatcaagagaataaataattttatttccaattttttttagatgtatttccatttttaatattattgtgatatcaaagtactacttaaggttaaactttcattttgacattcattttggagagtttttaagtttattatttctgcttcctttgacttgctctactagatatgtattataaaatcatagcaatatttattccatcgtcaaaaccctatttataataggttaactaaattaaaattttcacatacttatatatcttccaatacattaaatttagaataatgattattgtaaagttttacctcttaaatttttctctgttacgaatccccaagttataaaaattattggaaatacctttttgaagttgcattttattcatttatttaaataatttattgatacaacactaacctaacgttaatttaattaacacaattcaagagcctagattaaaaataaatacataaataagagtctaatgataaattatgaaagtatgtcaatatatttttagagtaaattaaattttagatagtttaaaattattaaataagtcattgtactgaaattatttttgtaacttttaatcacataaacaaattatgtttaaaaattgaacagaatgtaattagatgaggatatttgtaatgataatttgcataatttgagaggaatttttgtaacaaaaaaaaaatccaaaacataacaaatatgaggtaaaaatcttaatgattcttagcaaacatatataaatatatggtgaaaatgataaatataaatatttatatttattaatttacattattctctatggaattacagtactttacatacatataatagtttgtaggaatatacacacaacaaacaatgagcacacccacatacaaatattcatacactttaattttcctctctatgtaatattttcaatattgtaattaaattaattaaacttcattgcatgcatatttttctatctaatgattatagagatcgaaagaatttagttggaatctcttgtgttatatttaatatgaggtgatcgacatatatattgaaataagggttgttctaattaataataattatacatacatatgaaatatatatatataaataaatatatattatttaattggaagaaacaaaagctgtgattcttgaagatggacactcatataacacactactacatcatacataatgtatataattttcaatgaaaatcataataattgagagtagtgaacatgacttgatcatcatcataatcaatgaatttaagaaaatatataaatatatatatacacctaatgtgaaatgtttttatagaaaaaataatacatatattgttatatttaattaaattggaccacgtacgtatgcatagaattattaagtgactaaatcatcactttcatctcttaattaattaagagacatctagctcttaaattcaatcttaattaatttgatgatgttcatagaacatatatagaggaaagttttagtgagactcatctaaaccatatctaaacaaaaaagtaggattaattatatttttaaggttaaatttgtctcaagattcttttgtttctctttggtcctaattttgacaagtataccataaatgtatttttatttagtacaatataatcaaaaataaagaaactatataatataaggataattacataaaatattatttttttaaaaaaaataatatttttacattcaaattaagttttttttttatatataaaaataacacgaaaataataaaaaaaatacataaaaataacaaaaaaaaaaatattcaaataacataaaaaaaaaaaataacaaaaatacgcactactacaaaaacctcctttagaggcggctttttagccctttcagcgttagttttgacgaaattcgctaccgatgctgatcaaggcgacgctaaagaaattgtattttttataaataaaaatataaaaatcgtaaaaaaaaaatttaaaattctagataacatgtatttttattattatttttttagatttgtaaaataatccctataatatatatcttttagctttgccaatagacttaggattccatgattaacaccataacctagtaattaattaattaattaattaactatatatatacattatagatgatgggatcttagtaattaaacaaatgaatcgttggcttttttattttat

SEQ ID NO: 229037 - DNA, 1031 bp, Cannabis indica
ttctcttatttgtgatgttttcagctttgtatatgtaccttacttttccaattgagaattttaccatttttctaatatggtatcagatgacatatactcctcattctaacaacttttctctctcaaaaccctaatcgccatagttcaaacgcgaggtgctctctgtctctcgccggccgtcgctgccattgctgtcgattaacactcttcccctattaaagcttcacaccaggttcctcttgtagctcaggcgtcttttccagcacctttgctgatctttgaatgtccgtcttcaacaactccgttcgtctcccctacatcgacgatcgtctctactgaaatcttgaccaccggtgcttcatctccaccgatcgcgccgctaccacctgaaatcttgaccaatggtgtctcgtctacgtcaaccattctgctgccatctccgtgtcctcctggattgtcttctttgccattcttcacatccattcttctgatgagcttcacatcggtgtcttcggttttctctagtttttcagctcatcctcccgtggctccaacgacatctctctctctctctctcttttccacctggctttcgtatttttgatactcctcttatgaatcttgacaacctaaatttcctcattgctcccttccaattgattggccaagactatttccagtcatggaagcgcgctgccacgatcaatctgcctgccaagaataaaactataacaccctaactaatttaggcgtgttagcatgatttttaacatactgtgtagctcgctgctaatcaacgagattaatgaaaaacgtgattaataaaaatttatttatttacttagaaacttaaagtaatacatttataaaatctcgggatcccgtttacaaaatacgtgtacaaaagtttcctattcatatacaaaagttttttcgcctagcaactatacaacaaaaagccttgctgtctcaaagatcgtacgctccaggcctaaccgccctgacatgtacatgttggaaatattttacca

SEQ ID NO: 229038 - DNA, 1274 bp, Cannabis indica
ttttgatatggaaggtgaatccattccattctccactccaattttgttgggaagacaattcatgaaaacgacaagaactaagattgatgttcatgagggaacattgactatggaatttgatggggagacaattagattcaacatttttgaggccatgaggtatccaagcgatgtacatgttgtttattctcttaatgtgttggatgactctctcaacgagtcttagatctgcataatgaagattttttggaggttgcaaacgagaaaatttggtgatgaatggtggtgaagaatttttcgatgagatggtggatgtaataaccacactcaatagtgattttaacaagatttataaaaaggtatcgttcttggagttgccaatttcaactaagaaattacagccttccattttacaaactcctatacttgaactgaagacgctgccaaagcatcttaaatatgtttacttgtgggagaatgagactttgccggtcataattgctagagatctcaaccatgtgcaagaggaaaagttaataagagtgcttcgggcttacaaaacttctattggatggtccattactgacatcaaggaaattagctcttccacgagcatgcacaaaattctccaagaagaaggatctaagccaacatgtgatgcacaaaaaaggataaaccccctatgatggaaatggtgaaaaaggagactttgaagcttcttggtgtaggcatcatttacccaatttcagaaaatcaatgggtgaaccctgtttaggtggtgccaaagaaatctaatatcacaatggtgaagaatgaagataatgagttagtgccaacaagaatgtaaagcgggtggcgagtttgtatagattactgcaagctgaatgctgtaatgcgtataaatcacttcacattacaatttattgattagatgcttgaaaggttagcatgtcatttttatgattgctttcttgatggatatttgggatataatcatattgttattactcctgaagatcaagagaagataacctttacatgcccttttggtacatttgttttcccagcatatgtcatttgggctatgcaatgctcctacaaattttcagcgatgtataatgagcacattttctgactacattgagggcatcattgaggtcttcatggatggttttagtgtttatggcaactcatttgacaaaagtcttcacaatctcactttgatccttcaacggtgttgttatcctgatatttgtcctcctgacatggcagtg

SEQ ID NO: 229039 - DNA, 1675 bp, Cannabis indica
acagactttctaactcgagtttcaaagattgggaggtaagtagtgagggtacaccttcccatgaaaccaaggtacatcaccatttttattccgagcatatcgcaagtgaaggctaggggaagttcatttgggaactcaggaaggggtggagatgttaccttctgtccaactggacatatatcgtctagccaggcatagctgataccatttctgtaggtcgtccaagttttggttcctttcgcattcccattactgctcctgccctgactgttgcacgacatatcaatcaaccaccgtccaggggtaggatgatggcccgcacgaaacaaactatgcagaagatttttccagctgaccctcacgtggcctgacacgccatgatgtcgagcgctgaacaggtctgacctgctgctgaggaagaggattacgagggggacgttgaagttcaggaaacagaggattagggtcaggtccgtcctgatagttcctctaaggctgaggagaaggagctgcttggcctttgcgcttcagagactacaatgaggtcagggaaccagtgtctcagactggtgacgtcctggtagaaggtgatgactatgtcaccgaggagtacactgaggtggttcttcaaaggaggcaaggtgcctttagggctcggtgggtgtgtcccccatctattgtaactcgggccgagttgaggagtttgaagaaggatggatacttgggcggtgtcgaatactttttccattctccaaagaacagggcaacaaatccaagggagggatactgtgcctagtcgggtgctcacaccaagcaaggtgcgatgctgcctctgcatccgtacttcaaaaggattgcagactattaccacctttgcccaactcagttcacacccaagggcatcaagtacttatccgccttattcattctttatgccactcaagtacttatccaactgactcttcaacttgaagtggacccccaagcagagtaggtcggggtattttcacttctctcagtttgatgataagtgactgaagggtatcgtagaccctgaagtcaacaaaaatagggcactttgtggacgagtaatactttgtgacgggcatggagaccttccacactcggttcaaacagattccttcgtactaccgccctcctttcacgttgaaagttagggagagggcataaaaaattctccaactaccgaaggatgctcagaatatcactttgttgaccactgaggccaactttgtgaattacaaactctatccagaggattttgtgccaaagcctgtgaagatgaagaagaagtcaaagctgagccggggtgaggatgctgagcaggagaaagagctcattcaacataagcatgaggctaagttgaagggaggtgttggacccaaacagtatgctcaagaatatttagagcaggagtaggatgctcaagaatatttagagcaggacaggccgagcaagaagaagatagctccccttaccaagcaagcgccaataatacatgctattaggattagggaacctggtatgcctgctcggccacaaacccttggagaaggaaaaggaaaagccgtcctggtggagctagttcctcagatgatgattctccatcagtgattgtttgggagaatgcccctgctagcgtgtagagtacttc

SEQ ID NO: 229040 - DNA, 1785 bp, Cannabis indica
tacactcaaattgcatacactacaaattaatgtggttcccatagatttatggtaaaaacacatcattaaaaaattatgttgaatttttaagtgcgtaatacttttttaattaatttttttgaaaaaatattaccaaacagcacatcattacttttattatatagctattgagttttatacttactcaataaacgtgacaaaatttataatttatattcaattttggtgtcaagtcatcgtaaaataattgagttgtttttattttttactaaaacaaaaatactctttactatgaccagattatgaaagttctaaaaggagatctgaaaaatttggaacttcataatgttggagagatgaaactttccaatgaagtaaacaatgtttgggtggttgagaaagagcagggacgttcagtattcaccttaatggatttactaaaccaaatatttgaagttgaatcagaaaagctcatggcttattttcactttgatgtggtcaataaaggaagtgatcatgacaaaactactcaacaccagtttgaacataacaataatgatgaagttcttcaattttctaactttatcgagagccaccaatttatatcagtactttttgatgagttccattccaactttcacaaaacaaagcttgaaataaagtacactgatttatcattgagagttgttccttttaaaggttattcaatacctctgaatttgggctctgttttgaaaaatctacttgaaaagtatggtgatattggtgagtcttccacattctcccaagccatgaaaagtataggcattttcttcacatgtaaagtactcaaacaaatgcaattgactttggttgctgacatcaataaagatcatcttcgacattggtatttctacataatatttgccaaggagattatggggtttgaagtggaatttttggaagtgtctctaaagaaaatcacacaagttttcttctatcgacaagttagtaagttacttgacatggatattaaatcattgcgacaaagtaagatggatgagcttgaaaatgaaaaggataagtgcaaagtgaaatttgagaagcttagggagtttcaagagtcttcttttagtaatcaatttataaagaaacgcttgaatgaggggttgaaactgatgtggaagactgttggggaagttggctttaaatctcataactaataagtaacatatatgtaatatattgtgttttatattacttgtttatgtttatgtttatgtcatttgattggtgtgtctctgtgtgtgaatatataaagaataacatatggatttatcgatccttgttcctttcaaatgagttaatgacattttacattttttatttacttgatattattataggaacaaactctaaaatggaatgcaataaaatttaaaagccataataaaatttgataaaaaaattattaaatttttttcatgttatactggaatagttattttaaaatggaatagtcatttaatttttatttttttaaaattgtttttttaatttaaaattttttaatttttaaggtaaaacataaattttttaatttttatttttgtaaatattcatttatgtgaatcaataaaattgtgtcacgtgtacactgtgtccacgtaaatattccactaggtcagttaacatctaaaaatgaatggaaatgttaaactgctaacagaacacgagtttaggaggttttaccactaaaattttagaattaggagttattgcaaaaacctgccacttcaaaaaatt

SEQ ID NO: 229041 - DNA, 999 bp, Cannabis indica
caaaagaagtagcacaaccatcagcaaaatcatttcacatttaaaagcctagttatccttttattttatagcagcacataagaaaatagttttctatactggttctttaatgtaatcaatctaaaattttaatatatcccatccctattcttaatttatgtttatacagtgagaaagaaatgcaagttccccttattaatattgaggaagatgtatcttggatcaaataagatgttttatgtaagagcaccaaataataccattcatgtacaacaatcactctaaagttttaaagtaacaccaatcaaaagaagtaacaataccatgatccaaaccatatcacatttaaaagtctagttatcctttcatgttagagcactaaatacaaagattaagagagatctttctcttttcatgttataccaccaccacatagacacacataaagtaagggtgagatctctctcctctataacattcaaaactcatatatttatttttaatgcttattacctattacacaattaagtactttaaaacaatgtgaaagtcatttacttttgaaagaattctaatatttaaaaatgaaacaaaacaaaaagcattcctagaatttagacatgaaacacaacatggacaaccaacaaacacatatgataagtaacttcaagactttttatagattgataaatattttactaagaagaatgtcaatctaatgctttaatatcaagcaatattagtcaatctaccatggtagttactttaccagagctggaaaaaaatagatttttcaacccaaaaaaagcaagaaaaagactccacatatgacaagagtatactaatctattattacttattactactacaaaatagtttttctcgacgtttttaaacagtcgtttaaagtattcatgtcagtttctataaccgtcgcttatacgaccgtcacaaatgggcaaaataggcgacggttaaaaactgtcgctaatgtggctt

SEQ ID NO: 229042 - DNA, 1461 bp, Cannabis indica
taactaagcgggctttacaacaaatcttctatggtgattggatgccaagtacgagaggtaaacaagtgaaaaagtgacgccacgtgggggtgacctcaggaaccaccttagtgacaaaatgaagggacatgatctttctgaaagagacagaaagaggttggaggagcagatagcagctctaaccaagctagtcaaaaagaagagtggggacctctcagatttggacgatgaggacccaaaactgtgtgaggcggatcatggagacccctcttttggaaaactttaagatgccacacattgaattgtatgagggaaggaccaatccatgagcaaacttggcaaaatacaacaaaatgatgcaagtagcacgtgccaacgacgatgccatgtgtttttgtttttccctaacatcgaccaagtccagggaagacttgtggaagtgactggctccaagattgattgatagttggaaagacttatagtcagccttccgcaaacagtttattgtcatgcatgataagaacatggaagtcggctatctcatcaatatttagcagcaacacaaaaaaagcctaaaggctttaatccaaaggattatggaggtcgctgccaaaactaaagtcagtgatgacttgaagttgatggcccttcaatctggattggctattggttctttgctatggggagagatgtaaagaaagagagccaaaacattgactgggtttatgtcaaaggcccaaggtattatcatccttgaggacacttacgtacaaaccttttgatatcctccagctctaaccccttccacaactacacccagctttacaccccaagttcaggcttcggccttaactcttctcggaacttagtttttcccaaatgtttacggacttacaacctctgctctcagacctacacataccaattttcctaggtatgtggcggcaaagactaggtgcaatgtggctgttggacaggtgaaaacggaggctccaaaataaaatgtgagccatactcggaacaaaagagggggaaaaaggcaataatcgtaatgagtcttcaaagaagtcgaggaaggaatatgtcccaaaatacactgcgtataccattttgatagacacgcaagacaatgtctacaaagtgacctctaatatggtccactatagaaagcctctacggatgtcaaatggaggaagaaataggcgtgatcaaaacaaggaatgcaagtatcactaagagaagggccacacaactaacgagtgtgattatttgaaagatgagattgaaactttggtttgagtgggacatttgggaaaatgtgtctagattccaatcatttgtcctggacaggggtcctcaacgggcatatgatcatttcgaaatagcaaaacaccataattcccccgcaggaggtaagacgttcgtaagctccaagaatatcactgcctgcactccctgctc

SEQ ID NO: 229043 - DNA, 1404 bp, Cannabis indica
tttttatttttattgaaaagaaagaagagagggctaccagtgtgactcctttctcttgggcgttaccaaaccatgtacattttatttttttagttttaagataaaaccatgtacattttaccaaccctcatcatactttctccacgccaaacttcaacattctaacataaagcaatatgttgatgagctagctaggacaacttgttactaatctaattcttcatagtctaaacacgtacgaggtcaatctagctatagttgtattgttcttgtcaaattatttataaacaatatattattaaatgatgacatgggcttatgtgtattttatttttcggtagctcactacgaaagaactccacagttaagcgtgcttgacctgaggtaattttaggatgggttacctcctgagaatttttctcaggaagcgtgcgagtgaggacaaaatacgctagaaacacttgtgttggtttgtagggtcagtcgtcattccatgagccagtagagtcagtcgtcattccatgagccagagtgacgtactagtgtataaaaactatcatttcgggggtctaagggtccaatagaaacttgaagtggtgatgttacataaagtaaaattaatatacaaggtaattttctcgtatttatttgtagattttattaaatcatttttcaacaacccattgaataaatatttaatatgaagggtcaaaatcattccactaatcactatataagaaattagatagaataagaaatttggaaacaaattgcagctaaaatctcggcgagagagagctgtcaatatgtgaaaatcttcttataataaataaataaaaaaacttatttattttaattaagttctctatttatagaaagatagtaaggaaaagtctatatatacatacaaacaatatattggtagtttgaaacaatgaaagtttcaaacaaaagtaggaaaaaagaagctttggtataatcatcatcacatttattcgaatatgccatttccttattcctaaataacatttcacctaattaaaaaaatatacatatttacatttcacctaacccaattaaaaatatttcaaaatcatttttcatacaatttaaatatatattgaaaatgaagtttttaatgacttgccaacggttaatagtttacctccaaatagtggctttttattatggaaatcgtatgatgatcacaaggaaaaaaaaaaaatagaagcaaattaattataaaatgtaaagttagtcttgtgaattttgagattataactttttcagagatgggaaaatatttcttaaagtcattggtcaaccaatgtcaatgttaacgtcaagttttgtcatcatgtagaatcttcactagaatataaattatgttttccaaaatataag

SEQ ID NO: 229044 - DNA, 1189 bp, Cannabis indica
tgaggatactagttatctattctaaatagggagtagcgcacagacaactctttattcccaaataacacagggccataaatcctcttcaaggagtaggccttccgctagctcctgtaatactatctctaactatacaggcccctaaggggatacaaactaccctggcggcaagacctattattgttcctagacctgggaacccatattcacctgaagttgctccaccaacgctagatggccatgtagccaccatatctggaggtccacacattgtcgcaactaccaaaaatacacagaagagatacatgaatgaattggaacaagatgaaacatgcaatcttgtacaatcacctgctcaacatcctcgaatgatgaatcttctcataacattcatagaagatgatgccaaacatgtgcatttttcacacaatgatccattggtaatagaagctcaaattgcaaacaagagagttttcagagttctcgtgcaataaaagctcaatcaacatcctttttaaggaagcttttaaagccatagatttggtggagcaaatttgacatcttgtccagttcagctttaaggcttcaatagagatacactcgttctaataggaaaaacacaactaccagttacacttaatggagaaaaatttagggaataatgtcgcctcaactttcaagtactgtaccttcgtggtggtaaattgcccaactgcatacaaacgtcatttttgggtgaccattctttgtggattttagagttgtaacctcagtctgacatttatgtatgaaattcccaagtgatactggaaacattaaaataattaaaggtaatcaaaagagtgcaagaagttttaacatctcgtccaagactgttatgatggtttgagaagtaaacatagacaaacccagaatgtcctctcacccagcactgagcgtggtccgaaaagaagatgaattagatccacgtgtgggcatgaaataataatcgaacccatggaggaggtagaagaaatatgcatcaatgtcaaggatcctaccaaagtcatcaaggtaggatcaatcctcatgtgatttttcacgctttgaacgtagatcccaagacagatccaatccgacataagcaacgaccattagatcttgtaagagtggaagtagggaaagcgaaagtagacaagttgacaaacat

SEQ ID NO: 229045 - DNA, 2333 bp, Cannabis indica
ataataatttaatttacatatatatttgaaaaacatcatttttttcacttttaaatatacaataaacctaccattttactttagttttagtactatttttaataagtgtaatgatatgtatacaaacaaaataagcaccaaaatggtacactcaaactcaatgatatgtggcaacattttttaagttgtgagtcccatttaaccagaaatgattggctgaaaaatgttttagtgtattttttctattgaactttctttattgtgtagttttggtattggtgctctatgaatacacatacttatggagttttctctttgttttgagaaatattataggtttatggtagatggagagcccataagagagttcaagaacttagaaggtgttggtattccatacccaaaaagtcagcccatgaagctctactcaagtctttggaatgctgatgattgggccacaagaggtggtttggtcaaaacagattggtccaaagcaccattcactgcccacttcaagaatttcaaagcccaaaatggttgtagctggtctaatggtggctcatgcaaaaccctattctcttcatttagcaacaatcacaggctttgggataaacttgaccataaagatcaagaaaagatgagacagattcaaaaggacaatatggtctatgattattgtactgattacaagagattccctcaaggccccccaaaggaatgttactataagaatatctactaattattaattagttactatttgatattaagggataatcatgacccttatatttcaaccatttttcacattcttattgttattattattattaaatttagttttatgaattataattctttatttgcgtatctatcatacatttctatgttacttgaacaatgaatgaagaaattatttctttgttaatcatggctataaattaatattttggaatcaaaattatttccactaattattattattttcacacaaagtactttaaattaatttgttaagttatttttaaaatgcacggataggaagaatatagtactaaggttatgtttggtgtttgggatggagatgaggaaggaatggagaggaagagagatatagattaattgagaaggatggagagaagattgaaaatcttttatgctgcttggtcagttaggaaagagagaagatgatgaaaatggttgtttggtaagttaagaaggaaagaacataattctccaatcctttgtttggtatgagaagtatataagaagagttttgcagtgaatatttgtgatggaagagactttgtttataactcaactaacttatgtaattttaggatttgtacaaaatagtgggattatgtctctatttagggcgtgtttagaaaattttagtgtaattggaggtaattctataatttggcatgtttgtttgatcatgtaattacactgtaactttgtaattgtaagtaattgaggggttctaattttactagtcatttctcatggcccttatgagaattgagtgtaattactaaagacttttcattttaaacatacaattttcccgtgtaattactaactattttgtcaaacaacgtattataaattcatatgtaattaccacctcatatctaaatacacaccttgtactttaaaatatagtgttattactggactgtgtaattaccattgtagtaattacactacctaataattacatagttacttccaaacacacccttataggatttcatagatcattctagaaatgtaattaaaataattgttgaaaaattaagactaatagtgcagaattaagatgaacaaaactttaaacactcaaacaattagtagtgacaagattaacaatctagaacaacaatcgaataaaaacaagggcaaacagagtatgtaaaactagagacaataaaaaatacaaaaaataaaaaaattaacaccaagatatatactggttcaagaccgatagatcaatgtgatctatggctctactccagttctggaacaccatcataatccttctttattgattgagcaagaaaatgtacaaaacaattgagacgagattctttgttgagtactcacaaagtgtttcgactctcacactttacaccgaataatcttcttcatctacagaagacttttcttacaaaacccaaacataatcctaagaatctctctacctctcaatcttttctttctcaaactctcaatctcatccctttgagttctcaaactccaaaattctattgtgtccttaaatgataagtgaaggtggtatttataggcttaggattaagatcctaaag

SEQ ID NO: 229046 - DNA, 893 bp, Cannabis indica
taaaacaaatcgttcaaataatttatttagttaccaaaatctaaaaaaacaaaaaattaaaactttaaataaaactaatatttcttaatatccttatatatgtatatataggcaaacaattccaccctcatatgtactacgggcagaatagctcccgtttgtgacagtaaattaaaaaacaaaacatatgcatgtgtactattaattatgttgtagacttggatgttgaaattgaaaaaactgacactctgcttaaatttatctttttgtatgtaaagagagtcaaatatatataaatgtgaagaatttattcattgccataaatatatacaaatgtgtaagcttatttttatttatttactattattattatttttttttgaaaaaaagtgtacattgtgttctttaatcaaattaaaaagaaaaaaaatgtaacatcaccataaatatatgtagttttaaagtctcaaacatagcctttaatcatatactataaacttgtataattaaactcaataactcacatttaggaatgactctcctgatgcaaatctatcaaaaaaaacctaaaattctagggttttcagtagcataccatatataacatggtataatcaaaatagtaataaataataattgaagaaaaatacttaaaacaaatgactaaagtttcaactactattgaaaaaaaaaactaaagagaagatagaaattaagaagaagggaagtccataccaaaataagtagaagtactctagcaagaaatggtttttagagaaaaatatcgttggttctgtgtaattttatttcttgagaagtaatggtgagagataatagtgagagataatggtcttaaaaaagaaggctttttctcaatttcaaaaaaaaaaaaa

SEQ ID NO: 229047 - DNA, 2286 bp, Cannabis indica
aaaaggaaggagaaaacccactatagatgatgagggattttaggcagaatcgaaagggaagaaagtgcaagagcagaaaactcaagtaaatgagacaagaacttccaatggttttcaagtgctagcaggggtaaatgatgataatggaactgatgatccacagggggctgctgatgagaaaacagataacataggagaggggggaggaccctctcttggcaaaggataagttccttgtttggaatgtttggggagccaacaatcaacaaaaacaacaacaaatcaggcagttcatttgaactcaggagggtagttttgttgggcttctcgaaacaagggtaaaggttcacaaacttggaaccttgtaccttaatgtctttaatgggtggtgcttctcgtcgaacatagcatggcaccaagggggaagaatcgttatagcttggaacccaaaccgtttcattgttgatattatcaagtgcataaaccaacttatgcacttgagaattacaacaatagatggtacctataacagtttcttaactgtagtttatggtttcaatgacaggaaagatagattagaattgtggaaggaattacacacactaaagacagatgaaagttggataataatgggggatttcaatgccatcatagctaaagatgagagagtgggtcacagagtaaaataccaagttgaatctgagttcattaagtgcttacaaacctgccagctagaagacattaaagctactagtagtttctttacatggacgaacaagcaacagggtcagggcagaattttttgaagatcgatagagtcatggccaatcaaagatggttaaacaattatccgaatgctgaagctttgtttttgaatgagggaacttatgatcatactccagggatactgtcttgattcctaaacggaagtgtggaaagaaaccattcaaatatttcaggatgtggaaatcacatcctgaatatgatagtaaagtagctgctgtttggaaacaacaagtcaatggcaccagcatgtaccaggtggttcacaagttaaaggctctgaaaactatccttagagagattaactagaaaggcttactctgatttgcaagcagcctcgattcaagaaaagcaactactcgatgaagttcagagcaagctgcataaagaccctctaaatgaagtgttccaggtacaagaacttgatgctagaattcttttattcttagctacagcagcactatcactcgtttttacaacagaaagccaagattaactgggttcgagatggagacagtaacacatctctatttcacgcaagtatcaagcaaagaaacaggcagaatcaagtctattcaatagagaatgaagctgggtgagggtttttgagccagaacaggttactgaggctttcatttcgtattacaaatcactgctggtatcgaaaatgaaaaataggaagaaagtttcaaataagattttgagtagagaccaaagttacttctgaacaggctgaaatgcccagcagacccttcactaaggaggatgtcaagaaagtagtttttgagatctcaggaaacaaagcgcaaggaccagatggtttttccagttatttttttcaagataattgggagctggtaggagaagatgtatacagggtagttacctctttccttacttctggtaaaagtctcaaagaaatcaacacaacagtccgcacaatggtaccaaaattgaagtgcccaaacactgtcaaagattttaggccaatagcttgttgcaatgtcatttacaagatttcaactaagcttttgtgctctagaatcaaatggattctccctgagctgatctcaaactctcaaggagggttcattcagggcagattcattgggcataacattatgatctgtcaggatttagtgaggcattatcgaaggaagtcaaacaaggcaaattgcatgatcaaacttgatctccaaaaagcctatgatagaattgaatgggagttcatagaggagatgcttatagaactccagtttccaactcacttcatacaaactgtaatgaattgtgtaagatcacccagattctctatcatgtttaacagttctatacatgatttctttgaggcaaaaaggggcttaagacagggagatcccatgtctccattgctgtttgtacttggcatggaatgcttatcacgaatacttaaggaggttaaagacaaaagagattttcattatcatgagagtgttgggttttgtgccctaaataaaacccttt

SEQ ID NO: 229048 - DNA, 2728 bp, Cannabis indica
taaactaaatggtatcagagcctaagaaattcttgagctcattctctgtttcttctctgttcttctcttcttctattcccatctctgcatctgttgtgtcccagctgccatggcaagaggaggatgagctcagactcgtaatacttccaatcgtgataacgatcctagaaacaacaatcaattttccgcattagatcaaactactcgatatgatgatccacgaagtccatactacctatcgcacagagaccatcccagtgccatgcttattgcaaaagttcttactggaagtgagaactatggatcttgaaagagatcgatgatggtggccttagctgcgagaaacaaaatgaagtttgtttatggtagattacctgaaccagatgaagaagatgaagatcacgaatcctggtgcagatgtacaacttgatcatttcttggattagttgtatccagaaaaataggagacagcattatgtaccatgataatgcttctaccatttggtctgagttgcaagaaaggttcaaccaaaagaatgcccctcgtgtttttgaggcaaaacgtgccatgaatctccttaatcaaggttcgagtagtgtgacttcgtattttaccaaacatagaccaccacctgtttgtaattatggggctatgaaagtgatacaacagtaccaagaagaagacaaagttcttgaatttcttgttggtttaaatgaatcttgcagtcttgctaggtctcaagtcttaatgtaagaacctcttccaagaatcaataaggcttatgcctcaatcattcaagaagaaagtcaaagaggtattacttcccttcaaatagaatctcaaaaatctagttcgaaggatgttggtgagtttgctggaggagtgcgatgtcagacatctaagttgttttgtaaccattgtggaattagtggacacaccatgtctagatgctatgaaattcatggttatccaccggggcataggttgcacgatcgatttcctagtaagaatggtgagagcagaaccacacaaggaaaactagcagctaatatgtctgagacacataatgacaatactgaagggagtcctagagctaatcaagatcctctagctagtctttctctcaataaatgttagaaaattatggccatgattgctcaaaaattccacatcgagaatacaggaccttctactcagcccattgtgtcaaatttctcttgtaagaatgattttattcataaaaacaaataaattattgatacatgtgcaactcatcatgttagtccttacattgatttatttaccaacatttgtcacaagcctatattatctacagttactcttcctgatggtaccaaaacaagatttcttgtactggtactatcaaagtttcaccagaaattgttcttgttaatgttctatatgtcccaaattttaaatacagcctgttgtctattacagctttgatgtcttcagctgattgttcttttgtgtttcatgataattcttgtatcattcacgacaccaagaagaagaaggtgatcgggaagagtgaaaaacatggagatcttttcttttctaaacctgattctaatcctactgttcttgctttttctgattcaaccataaatgttgacactttgtggcattatagatttggccacccttcttgtatcaaagaatttcctttgaataaagagttgaatttttctcaacctacttctcccaattttcattgctcaacatgtgattatgctaaacaaaagaaactttcctttatttccaatcataatatagctaaaacatgctttgagcttattcatatagatatattggggccatatcatactatgacacaagatggtttcaaatattttctcactatagttgatgattgttctagatacacttggattcatatacttaagcacaaattgaagctaaatctgtcatgcctccctttattaaactggtgcaaactcagtacaatgctacaataaaaggttttaggcctgacaatgttaaggagcttcaatttgtggatttgtttaaatccttggttattgttcattatcatgcttgtgtgcaaagaccacaaaattctgttgtggaaagaaaacattaacaactcctaaatgtctctagagcccttttatttcaatcctatattcccttgatttaatggggtgagtgtgttagtacgaccacttatttcattgatagaattccaacaccaaatttaggcagcaagtccccatttgaaattctaaatcataaaccaccagcatataaccatctcaaaccttttgggtgtcttgcctatgcctctacgtacattaagccaaaactgatcttaattttctcctagagctgtgtcatgtatttttctaggatatcccatgggaatgaaagcttattgattgctcaatcttgaaagaaatactatttttgctctagagatgttcaatttcaagaatacattttcccttttgtcactaatgaagggctgcctgctcattatgaacattttttcatactgttcctagtatttttgatgctcctagttcatctcaggaccttattattgatgttcccgaacctgatccaccttccaatccacctattacacaggtttgtgaccctgttatgcactagaattcaattccttccactgctgcaccagatactaaaaatccttccccatccacttatgcacctgtcacttcc

SEQ ID NO: 229049 - DNA, 2612 bp, Cannabis indica
aagtgacatgtcgcctcttactgggcgacatgttgcctattaactaaggatgatgtcaaaggttcaatgatattactctaggctgcatgttatctagagccttttttaagatgttgggcattcaatgagggatgtttcttggtttctcgccaatgtttttctccattaatctctcatacatgttttgtaacaactatggagagtgtgggaattgaattcaaagtttggttcacctacctataaatagagacctaagggatgcatttgtgaacaattagagagtttttatcaaagtgaacacattgccaaaaactagacatgcttgataaattcagaaagttatttccatgtttcttcttccctaagtatttctggtagggtaaataagtttttcgacaaaggtgtaaaaccttgtttaagttttggtgattcccctacttgtcaattggtgtttgtggtgctgaaatttgtctcacatctatatatacatatatatatgtactatatattgtgttttatttgtagtttaaagttgtaatcttctcttcaactcaactattgacgatgaaaacttgtcaactaactgaaggccaaaagattgaaactcaaacacaagacttagaatggagataaaaatatgaaatacaaaaacttagaagaaattttcagagcaaaaatggaggaagagaaatggctgtgtttcttagagtgaagttacaatgattttccaacccttttcatattttagaatggggcatttatatgcattaatgttctgcagtacgattgtggccccaagggacaagatgacattcatgagctgcaggttgcaggtgtagtcttgtgccttgtacgtttctcttgtgtcaagtggtgccaagttgcaagggtagtggttatgtgcacccttggtcgagatgtcaagacttgcaggtgtggtgcctccactacttgtaccatatgggcaatagaacttccaagaggcatggttgtactcccctcgcaagcacttcttgtcgtttgtatgcacaccttgtctttacgatcatacctttgctacattcatcctcaacactttggaaaaatttaataagcatagttgtatcgtcgagaagagcattgccgagtgacatgcatgcaagtctttgttgtgtgactttcatgctatctctgctgagcgacatgcattaaagtcttggctgagtgacttgtatgcttatcatagctgagtgacttgtattgtgcatgtccgattaacttgaaagcttggtgcctggtcgagtgaatttcaagcttggtgcatggtcgatggccaagtgactttcaagcttggtgcatggccgagtgagtttcatggtggatggctgagtgacttgcaaactttctgcatggccgagtgacttgtatggtgcatggctgagtgacttgcatagtgcatggctaagtgacttggaagcttggtgcatggccaagtgactttcctaatgccatggccgagtgacattcctcaagccatgggcgagtggccttcgtcatgccatggcaaagtgaccttcctcaagccacgaccgagtgaccttcctcatgctatggttaaggggtcttcctcatgccaaggtcgagtgactttgtcatgccatggtcgagcgacattcctcaagccaagggtgaggtcaagccaaggccgagtggccttcctcatgccatggccaagcaaaccttcctcaagccatggctgagtgaccttcctcaatccatggtcgaatgacctttctcatgctatggtcgagtggccttccatggagcatttcgagtgcctttccttcaggcatgttgagtgactccaccttgagcatgcttgctgagactcatatgtgattatgcaagatcacacattcagggtagctcattgagcgtgtcttctctaatctctcgattagtttttggctaatctcaagggttctccttgataattttttggattgacatttccttttcattctataagaattctcttaactctttgactagtcttgacctcttattggtcacttataagatataagagaccttatggccctcagactgcgctggactttttttaagatttaagattttattgggggagcttgtggcccttaggcagcactcgacctcttacattgcatcagtgacacttaaagagtgttttaaatgctagaaaatttgtactcgttttaggaaggcgtccctctcagagttgtatctgattcctcttttcttttttttctttttattacttctttcactttgaaaatttttatttactagtattgtgagaaagtcaaacagatgcgtggagagtgatgaatgccatatataaagtgaaaacacaaaattttattgattaagaaaatatgtgattgctcgaatatatatgctatgttcggaggccaaccttggtgccctctttgatttagtataatgtgctaaaggcaaaattgacattgctaggaacgctttcccacatagtggaacttcactttaattaacatctttgatatttaatttgtatgggttaagagcggagacttcatttgaatgtatcaccttatgagtgttggggatatcgt

SEQ ID NO: 229050 - DNA, 2847 bp, Cannabis indica
aaatgtctcagaagatgattcaggctctgaagaagagagtaggagataactcgggcctgtctcctccggccaaaaagtctagaggtggtgagactccttccaaatagaagatgtcggttgatgaggtaattgatctctctgaggagcgacctgttgtggacccttcaacccagaaggtctcgaagtcaaaaagttcctagggagggagttcagacgggtttgagcaagctaagactggatctgagcgggtcaggggtggatccaaacaaataagggcccctactacaactttagcgctgtgcacagaagccaggagaggcaaagacatccttcaccagtacgtgcctcggtcgcttcctaaaagttggagggaagcttcaccaggagagggaagctctccggactcttcttcgtaggttggaggaggaggccaagactaagaagaccagggaggaggaacttgaggcagaggtcagagggctcaagaaggagattgagagccaatagtccaaggtggagaagcttgaaggggatgtggatgccttagagacaggaggtctcgatattttttacgatttctggaaggccaatcccaaagggaactttgagtacctcgaaacttccaaggacatgtaccttaattactgcatggcctaggcggccaatgagaaccccggggtgacaacttccaacgctcctaccgatcaaaacattgatgctccttccatccagactgatgatcctcgagctcctttagacccagtcgatccttaccaaaagcctgggacttctttttgtatatgtctgtctgattgccttctctttatttttctttttgtatatgtctgtttgtccagtaggccttcttttgagacaaagtgaccggccaagaggtctttaaacttggaatatttttttcgttttttggataactggctgaccgagcagtttttaatcccgtatttacatgctttgttatccttaatgaatttcgttccttgttatgatcattgtgcaactgtattcattttgttttttttttgtgcttgttatttatttttaccaaatgctttatacaggtatagatgcccccaagtgaccgagcaaacttttgatacttggtcacttgcttttcacaagtatgctttttgtctgttcgggtctatgggtacgagtagacctttgtacacacttaatcataaatttataacttgctaatagacttgacacaatttgaatttaaatatgcatctttattaatcatttatttgtcagatcatacttgttaccgtagtaacttacatagaagctattatattgatctaatccgatctttagcttaatataaaccaaaaaaattgcatataatagaaactgtactttcagatgtggtcatccgacctgagtactttttcatttcatccaaacctttaggcgtggtccgcctagaaggccacttacttaggagtaaatgttcttttgtttcgtacttaagacgatcatctgatctggtacttttactggtagtattttcttaaatgttccccgttccaataccttagtaccagaacgagttgcattttttcatcgtacttacctagtttgtatgctcataattccaaaacttcaaccacttgacatggtccctcccagttcggtccgagcacacctgtcgtgctgtctttggtgttcaagaatacccttctaaggaccatatctcccacaaataatttctgtgctttaagttgcttgttaaagtaccgagctaccttttgttgatgggccaccagttttaggttcgctacagttcgcttttcttcaatttcatcaagtgattctgcaaggagtgcatgattaacctcttggtcatatgtcaatcttctgtgggacagaggttctagttctgctggcagcatagcttcataaccatttgccatggcgaatgcagtttttccggtcgttgttttctcagttgtgcgataagaccataatacttcagggagttcttctggccagtttcctttagcatcttcaagttatttctttagagtgtcttgttgactgctttgacttgactgtttgcttggggatgtgccactacggagaaactttttatgatcccatggtttgcacaaaaatcagtgaaggattgactgtcaaattatttgccattgtccgagactatcttgtatggtaatccgaaccggtaaattatattttgtaccataaaatcttgcactttcttggatgtgatggttgccaatggctcggcttctgcccatttggtgaaaataatcaactgcaatcactgcatactgtacttcacgtttgcctttaggtagttgtccgattagatcaattccccaaatggtaaaaggccaaggactttcatctgagttagttcgttgagcggtggcatttatcacatttcttaacgtaggcctttgaatcttcaatcatggtcggccagaaataaccttgccttagaattgtcttggataaacttttcccagctgcgtggtagccacagaatccattgtgtacttcagacaaaagtcgtgcagcctcttcttgtgtaacacacctgagtagtggcatggagaatcctcttttatacatgactccatctatgatgatgtaccgtacaacctttctcctcatttttttgagcttcgttcctattacttgggagttccccagtgttgaggtaggctgctattggcgtcatccacttcggagacgtgctaatcatttcaatctcttccgtgctagtgatactaggtttttcaaggaattagattggcgaattaaatttagccttatcatttatattgctgctcgcaagtc

SEQ ID NO: 229051 - DNA, 1860 bp, Cannabis indica
acgagtgttactgcatggatcggaattataaactatcctgttttcgtccattaaataatattgaagtacttgaaaaggctgtgtgaaattgtcaagttgtaaatatttagttaccgagatctgattatgagtttttaaaagataataaaagttcccgaatcagatacactttaaacaaaataatacaaattaaattgactgaacaacactatttacaattataaatttcatatatatatatatatatatatattatttttttttgtcttaactcttcaaatttctaacaagtagaattatataccaagttagaagtaaacaccaagaaaatcatcatttatatttctcataattctggtaagaaaacaaaactatgtaatgaggtttaacactaagttttagtttaaccattgtgtgacaaaatcattagtctctcttacatctagcaacatcaacaagatatcgattcaaacgccgaccgaatatcgtcctagagaaggattcggtaacatgttggcgtgcttctaagcccattttctcagccaactgcgtgtcctgaataagttttgccatagccaatgaaaactcgtgcggtgttggctcgcaaagataacctgtcgcgccatgtttaactgtctcaacagggccgccactgttgcaagcaatgacgggtttctgtgctgccattgcctctagaggaacaatgccaaagtgctcgtcctgcatcggtcaaattttatttttagcatgattatcatctaataaattgaagtgaaaaatcatatattatgtaaatatcaacctttggtgtgtagaggacacataagcattgggagagaagtgcatttctctcagctgtggagcaagatgtaacgaaactaactcgttcggaaacaccttccctctctgctaaactttttagctcttccaagtactcgacattctcccttaggcgcttatcgaaaccacctgaaataattgtcatttaaataagcaaaagaatcacaaagtttgaacttgaaaatggaaatgtaagtgaaaatatggaaggaagctctaacatcaagatcctctagtaaaaacctgcagcaatttttttaagcgaaagacttaaaagtcgaaaaacagcaaactctaaagagtgaagacattatttcaggagagctttgatttcgaaagtcgttgaaaaatagataactcgggagagaatgattatgagctttcctaatcagtgatgcatgaaaagtggattaagtcaaattactacaagcagcaattgaaaccattccaatcccaattttcggttaaacattgaataaaacatgaaaaagtagactgttcattgcagtggtgtactacacctgataatgatatctaatgatgtgataattaacagttcaatcctcattaagcataaaaataagaaagcatataatggttgataaattcatttcaaagatccaaaggcagagagagagagatactaggtaaggacttgcctgcaatagttagcgaaacttcggccagattgcaaccttgaagatcaccgtctttaagggcgtttagcatagcaaaagcagaaattgccaagtctatgttcttttttctctcaaaacggttgatggacaaaaaaatcggcctacagttaatgagaaatgaatagttaaacatagtgatcaatacaaagtttccagctattagatatggagcctaaaagtatgtctaaaatcaaatttatgaagtcaccgaaagataatacaaacatgttcgttacttgatagatttaggctcgtcgaactgatccacattcactgcagggtaaagaacagctggttgtatcctcgtgcgtcaagatgcttg

SEQ ID NO: 229052 - DNA, 2541 bp, Cannabis indica
attaagttttgtgtggccttaatttattggaaaagtttcataaatatcattaatttaataccttttatttatgttttatttacaattttataatttgaagtttttttcacaaaaatacggttgtaaaattttaaaattacaaaaatatactttttccagcataaagaaagaaaacaatcaaaaaaaattgacgaaaaatcaaccttacgacaactataaataaactatataaaacaactagaaaaacaatattatgacaactataatagaactataaaacaaaaaaaaaaatgtttattatttttactaaagagaatttttgtaaataaaaagttcaatgcgtaaaaataaaattttttcccgtattaacatattttggtaattttttttaaatttttacggtttattatttaattttttttgatatatatataaagtgtataggggaattactttatatatactatttcttaactattcttaaaaaaaaattacggtttgggttgttccgatagttgttcgaataatttctatataggttgttatgtggattttgattgtgatttatattatgtcgttagttgttatgtaaattttagtaagaaggaaaaaaaaacactaatttaaagtgtaaaatgaaaaaacctcttctatatatatttatacatagtaagactcatgcattcgattcacatattaggtaattgcaaggggatacgttacacatgatgttgtcatgaattgagcttatagtgtcaatcaaagagttgcagatcatgacaaaacaatagaatcatcacaatcacatcaaatgtatgtacagagagattatgttattggggttgttggctcaatttccgcaatggtctacactttttatatggacacaacaagtgtaagccttttcaccttaattttttgtagtggcaagaccacactttcgacatgtttttaagaatttcaaatatttttcaatactcaaaatataggtttcgtttggtatcaaattaattaactacaatatttggggcaatgtttgccacataagtttgtattaattattacaacacttaattttaataaagcccgtagtgttttataaatacataaaacaaatggatgtttaaaggttgtttgtatcttaatatttatgaacttagattgtattatagtaaaaattagagttgggattaaggtcagtgtttgagttaaaactagagttgggtctgaggtctacatagggttaggcttgggattagctctgggttccaagtcggcgccaagggctaggatacgggatcaaggccaggggtctagggtcaaaggttaggtcctaggtctaggttctaggttaaggttggggcttgggttaggtgtctaagtgagggttcgaggctagttttggggtccacggtccagggttcaaagccaagaccgacggggtctagggtcaagagccatgtctagggttacgaccatgaccatttgcggagctaggggctggagttaagtttgaggttgagtcccaagtttaagggtttatgattgggtttggggttatagtcgaggtttagggtcaagtagtggatttggggaccaagtcaggatttggcgttggaattggggttcaaggtcggggcagaggtcagcaagctttggggtcatgggcgatgtccttagtccctaccaggaccatggtcgggctaggggttggagtcgggttctgggttgagtcctaggtttagggttcgagtttaggattacagttagagtcaaggttcaggttcaagaacagggttcagggtcagggttgggattggggttgggttcaagtgtccaagccagggccaagatccaaggtgaaggtcgaggttggagtctgggttgtggccaaggtgaggtttgaggtttgaggtacatgggtaggttaaacatagaatacattgtgaaagtctatcacatcagaggtctgcctatcaaaaccttgaacaacaccatctttaagggaacgatcaagcaccgtgaggaatttcctaaaagttaatattttccaattaataacagagatcgtgaattatattgtcatagaaccttctcccactcattatttcagggtgaaaggtttctctactaaaattatctcacattttaactattaaaagtaattacactgtaatgaccgcgtattagacttggaaattagcaaacaattactagcttaatagaatataattactactttatgattatgtgcacgttagtaaaaaataaaatatattgtcaaaaataggcattagagaatgtgtttctcaattacagagattttattaaattttagaagtgtcatgcatgttatttatgaattataatattttttatattttatacccggtaatagtggaattcaatgatttagccattagtgtcacttaaatacaatttagtatttcaaaattagtggggcatgatttatggacttttagaatgtcggggttatctagggaatttgttttgaccatgtaagacccagatgtattggtg

SEQ ID NO: 229053 - DNA, 1063 bp, Cannabis indica
agtactatatatatacttactgatggaaagcatatgggtttctgtatatggaacctcttggtataatgctctcattcttatcagacttaaaacttttggaagtaatggcttgacgaatagctactctagccttcaccaaatcatactcaattctctccaacctactcttcttcttcttgattatggtctgctcaaaacaaaaatacacaatcattaatcaactcagttatgtatattagcttctaacaaatgaaacaaattaaagcaatgattcattgatgttcaccttgtcaggtggaattgtatcattggtgttagaaatatgatgataagtgataagaggaggaataggagtaatagtactggtggtgttattgttattaaaaggagaagacaaagtgtgtatgataaccttgttttgggttatattattttgggataggaatggaagaagaaaaagaaatatcaaagttgaaagtaacaacaaagctttggacaggcttaaggttgaagccatggcctccggtggccggaataattgatcgatctatcgatttttactaactttaactttttccccatatatttgttgcctaatttatatagtactagttactttttcacatgcttagttacacattacagtcgaattccctaaaaaaaaaaatacaagaaaaaaatatatggtcttctaccatttcttgagatataataatttaatctaagagaaataaattcaaaactcacactgcgtgaaattaaaaatatgtaactaacggtcttctactcaaagtgtttgggcaaaacttatgtatatttaaatagaatctgaaaactttgaagctcacctcacgtgttgcattaatagaatgatatacatcaaaaaaaatataagttttgtccaagtaagtagtattatatttcttgtcctttttcggttaatatatatattgtcctctcacattattaacattagctattttttaattttatttttgaaaataatgttagctacttaattttgaaagttgaaagggatcgcatggatcacaaatttcttgaa

SEQ ID NO: 229054 - DNA, 2247 bp, Cannabis indica
tctcttcttcttcttcttttttcttctcatctaatttttattattttataacaaatactaatattttattctattatttaatataccaaataatagtaattaaaaatactgatatacatagtataactatacatgaccatgatccatatatatatatatatgtacttttcaattcattcaaatttgtatatttaatttacagttcgatgaatcagatattgattaggttaggtgggagcaagtatatgtgtaacattaagtgttgcctctttttttggaaaatacccataaattacatatatatacatatatatatatatttctaagttctaaccaataacaaccacccaaaactggtatatacaaaacactaaattttaggtcaattatttggataccaaattctttcactctctatatatttgttaacactaataaattcgtattttaattttcaaataaataaattcttcttagtaaatgagactatttacatcttcctctaaatttattggaggattaaattagggaaaacttacaaaaatattgtcacacggaatttttcacacggaattttttttcaaaaatactgtgtttttataaaacatcaataaaacacaaagcagaacaactcaaaacaacagtagaataactaaaaaacactagtagaacaccagtgaaacttaacacagtatattgcagtatgaaacttataaaaaaaatacagtaaaaaagtaaaaaattccgcctgacagtatatttttgtaaaaaaataacaaaagttagtataccatgtaaatttcccttaaattaggcgaatgaacactacttgaacctaattaaatgggctcacaataaaatataagttggaagggatatacattaattgggttgtgttgtattgtattgggtaaagttgagaataatggagagtattccaattctcgtcaagatcaatatttgcactaaaatacaataaagattctaaaatatattcttttcccatgctaaacatcagctgcaatcacaaagtatatttataatttttagatattttctaatgtaaatagtactttacgaataataattaaaacaataaatacacaccaagaaattatctcatctgtaacgatggtctgggaaccgagagagagaaagacgagagaggactcgaaagagggataaagagaattaggaattttgaaatggaaggaaggattattgaggggagataattttattaggaataattacataagacaccattatttgtaaaataattacatttttacgttcaaagaatatttttttttatatatttttacagttttccaaaaaaaaaaaacacgaaaaaaatataaaatcaacaagaaaactacataaaagtaacatgaaaataacaacaaaaaataacatatatataacaaaaaatcaacaacaaattaacaagattacaacataaaaagaccgtataatctgtaaataaaatcaaaaaaatcgtaaaaatatttaaaattcagtgaaaccgtattttggttgtttttatgtttttactaggatcaaatttaataatggaaagtgaaatttatgtttaggaatagtcctaataataaataaaagaatgaatatatatagagaattactaaaatgtattattgatgtataaagaaatgttaaaatatattattgatgtctagcacttttatcggtgttatatactgttattagtgtaattaagtattggttcttatataacttaaaaaaaattaaaaaatatcactaatcataaaatgttatctataaaaaatgttagatataataagtgctaaataggaaatatgatagaagtgaaattattgattaagatggaaatggagaggcttaataaatataatatttggaaggatgtggcaaaagatgggccgcatgcatgaaggggacaggaatgagtgattggttagattgcttagtatttttatttagtgtgattgtacgttgtcatatccgaatatttatgcactttgtcatgcttttgttattaattaacacaacatacatacaatgcatatactatacgtgacaaaatacaattgttatttccttatctctctctaatcacttcatatataataatgaagaataagagaatcagggccggccctgaaaatatatgggcccaagacaaattaaattttggggccctcaaaaaaatataaaaaaaattaaaagaagaatgttatgggattt

SEQ ID NO: 229055 - DNA, 1888 bp, Cannabis indica
cacccctattagcatgcaaatatagccaacattttagtattcattaatcaactcaatattattttaacatcaacaattaaatgtaatatataaaatgaattttcaatttgtaaacagttttaaatttcaacccatacattttttatactgttatactttgcactgttatacttttacagaggaaatatgacactaccctgcttagacttgaataatacagcaagaaagaaaaacaaaacaaaccagagaaaagtcattacaatcctcccaacaaaagaaaatgaaaagagaaaagaaaaccattctgaatttgggatccaactccacccaaaagtaaattaccctgcaattacttgaccaacccttttcacacccttccactacttgtgtgcagctcaagcagtacacattccctaataaacggccagctcagtacccaaatccctccaccactaatactatctcctcatttacccttcctcttcttcacaaatagcagcagggttttatcagaggaaatcacatctacagtatatttcaggttctgattgtgtgaacttcatgacactgcattacttacccataacactcatataattacactgtattcaactatatagaagaaatactggatatggcatagttatagaaaattttactgtgtacatttctaccacattaaatatcatcattttagttcaagaaacagaaaccgtttcaaatatttaatacaaacacaattatagaaggaaaattgtaagataaagtcaaccaagtatagaaaaggcctaacctgaccatcaaagtaagccaccaaaatcgtagatgatctaggtaactgtgtttctgcaacacttctaacaagaacttctgctggtttattcactagagtgcctttgtatttctattgatgaaatgatatgtgaatggctgttagaaatttatcaaattaaatgaataatttttttattttgtttaaaaaggtaataatatgaaaagcagagtcacactaatctgattcccatcaacgaattaatgactcaaatcaacattaataagacaatacccttaacaatttgaccatgtgacaaattcaaactgaattgaaatctcaaataagcagtgaaatgtttctcaataaatatatgatcaaaatacaaatattaataaagaaattaatatagaatttgggccttcttctgctcatctttccattttgtctctcttttttgtagtttctttctgtggttttccctctaagctaagctatagctatagaataataattagcacgattcccccaaacgctatacatatatatagctgattattcatctctctctctctctctctctcttccccttttttcctttctcttaggttagtctctttctctccttcttctttctttctctctttcttatttctctctcttctctcaaactttaaaaataatttctaatcaccttattactcaaatgaacctaaaaataatacgattgtaatctacttttcaacgtgaacatttcaagatgtatggaacatatatatatttttccagaaaaaaaaaaactatttgattactaatatagtgattaattactattttataaattggggatttttttaatattataactaaaattgattttatttataaaaatacctttaagaaaattatttgcacaaataccgttgtgccacgtcagcatacataccgaaattcaaaacaattaccgaaaataaaaaaaaatggaaaaatctcgtttccagaaatttttcgttttttgggagttttgcaaaaaagcaaccatttagttgcttttgatgtgaataagatatcaattagttacttttcaattaaaaaatgtatttcagaattttacac

SEQ ID NO: 229056 - DNA, 1263 bp, Cannabis indica
tatacgtatacgtacctcggccatgcatctgacaactctcatggtcaaatgagtattattcctgtacaaagttctagacaaatctacagtagtacttggacgaaagtggctgccgatcattctatttttgacagcagcatatgtgaatgagctagctacgactgactgcatggtggctgatccggccatttttaatttactcgtggtttagagaacaaaagataatttacagcaaaaactaacagcaaataactagtgttgatgtataaaaatgtagaacgaattgttgatgtagatcaaagacgtagaaatagcttaatgtttctctttgtgattttgagatgtactaagttattgagggtttggagggtttatatagagaaagagtagaaagaaagtgatggatattttggttccacgtctgtgctaagatttctccggagttgatgggtcacatttcatgtggtttttggagagacgtggctcctaaattaaccagtggtaaggttaaggccataaatggctccagccttttattacactctagtgggagttattaggtctagtggcatgtggaacattctggatgaaaatatatgtggcaatttatctcacatgaaattaatcgttacgtgaaagggtttgaactttgaaactctatatatagaaaacaatggtttagatggattcgagtagaagattaatgatgatcatgatttagttatgttgaacataagtaattagcttctaaaaacttcttatgttactcgttgtccatatatacttttttttgtccatatatactttttatttatttatataatattgtgttttataaaaaatatatttggtacccaatgtttttcaataatacttaattgatacctcatatttttaaattgtacatatttagtactctaaagtaaaatttaatcaatacagttttatcgttctcagttatatgtaatcaaataattaaatttgacttcaaaatttataataaaattttaggtagtttaattgtattgataaaattttatcaaataatttaaatttagggcactaaatatgtatgattttgaaatacatgtaatcaaataagtattattaaaaacacagggtacccaacttgtatttagataaaacagagggtactaaatgtgtagacacctacatttttattaaaagaaatattattcttaattaagcaaaaaatttcacatttagaatattaaaaataaatgcaaaacacaatttcaccta

SEQ ID NO: 229057 - DNA, 1624 bp, Cannabis indica
gtctcaggttgaaaacagtgcttaggtcaacctaggcgctgggtctcagttttggctcacagatgactttgtttgttctccaaaggcacccaaatcttaattatttgtgaaaatagagaatattcttggaagacttcttctgaatggccgaagttaacaagtgccaacttgggcgctaggtccttactttggcctccaagtcgttctatttctttcccaaagcccttgtttccttgttttggatggagatgaataaaattcttgggatacttcttcaatattgtgattggaagagccccaaattgacaatatgtcaattgggcgttgggtgccctaggcacttggtgccttaggtgactacaaaaatgaaaatgttctgattctaattctggcacaacaaatatgtttgtgataagtcttattcatgccaaagcaaaaaatttgaaccaattttcactaagacatgcccaaaaagtgaaaccctagttcagatgtcaacttgggcgctgggtgaaaatcctaggcgcctgggctgagatctggggtgttgtttctccttttttcagtttccaagccttgggacttgattcttcttgtcttcttgattcaaaatattgaaagatggtgagttggaaacaacttttcaggatttaaacacctattctagagttcctagagtcaacttcggggcaaggctagggacccttctcaagtcgactactatgactcagaactactcagctccagtatattttttttcttaccatgtgtcaaacattgatgtccacgtcaccagagtcagcttctgggtaaacagtcaaatagcaaccccaattccacatgctggtctttaagaattaattgatgcatcagtgttgattaaagccactccagtcagtaaaggctgccaatattggaacttgttttactaggatcttaatttactaacatgtatgtttaattatcacataaataatctaacatcctaaaatatgaaatcataaaaataataaataacatatataagattaagaaaccttacattggttgcagcgaaaattaatgactatttctgttcaatcactttaatccttgattagggtattgtcaagtgacgaacctagatttctttcttaaacctaacaagtgacaattctacacaatcttccacaaaaagcccaagtaccatcttgaatagtgtaggctagaactcaactcacctttgaaacacaaaatagagaaaaagaaaatagttatatggtatacaaaaaatttagctatctactaaaagctgacacgtgtaccacaaaagaaatatgaatcagctccacgattatactattaaattgtatttttaaatacggcttaaataacttgttttaattaattatagttaatagaaatattcaacattcggccaaccacccagcaaccacccataaacttatatctgattgaaactttcgtctgatgcaacctttggccaaccacctagcaaccaccctacgaccttagcctggttgaaaccttcatctaatgcaaccaccgcgctgttgggttttatgccctaaataaaacctattacaatctgattagttatcaatttagaattttgaagtgaatt

SEQ ID NO: 229058 - DNA, 957 bp, Cannabis indica
ggggcgggtcagaagcggggcggggcagacccgccccatttgccattcctaactccaaccattgtttatatatataggcaataggctaatatttgtggttgccttcttatgccaagacattgttggccctctatttcactatcactatcccctaaactgacaaacttactcatctttgatacctgtggtcgattggtcatcctcacttcaattcaatcatatagaaaaagaagtaacaacaaaacaaataataaagtactaaattacaatgcaacaaacaaacaaacaaacacataatattcttaaccgacccacaattaatttacaagtgtaactttaatcatgattcatacatccccccatcatcattgtaagtttgaatttaaattttggtcaaataagattgttatcgagagagatgaaaattttcaagaatttcatcagggattttgtgatatactcgatttattattacctctgtttacattaataacaaaacacgaaatttccttttctaaaaagggataaattacaacacgttggattaccaaatattaaaactgaacaaatagctaactaataccattaaaactgaaatttaggaagatttgattttggtgtaactacttgaatcagtacaaactgaactagtaattatcaaacctaaatttaaatcttcccggtaacatattgttaaatagttatctaagattatttattttttctttttatgagtagttgtattcttttacttttgactttataattaaatgaaattctaattttcctgaatctcttttattattttttttctcttaccatactttaacctattttatatttttaaaaagatttcagttttactgtaatactaatttgctattttatctctcacgattacatcacactttttttaacaagacatttttaaaagaaaagaaaaaacataattactat

SEQ ID NO: 229059 - DNA, 918 bp, Cannabis indica
gaatacaagtccacgaacataagcttaagaatcatcaaagttctttgatagtgatgaaaggtgaaacgatcaatgttttgtacattctccaaggaaaaattattctagccagagtagcaagtttggtaaaagtgcaagaatcagatatatcagtgaacaaggcctcaaagaactgcacaaacaaggtataattgataatttaaattcttgtgtcttaccattgaaacttgtattttaggaaaacaacataaattgaaattcacaccaacaaggcatacaataagaagatactcaaatatgtgaatgttgatctttgggggtcatataaagtacttacttactctggtaagcaatattttctttctttagttgatgattaaagtatgtgttttgacctatttgctaacaattgagaatgaatgcctaaagcaatttaggatttggaaaaatctagttgaaaagcaaactgatctaaaacttaagtaccttaggactaacaatggtgttgctgaaaggatgaaccgaaccctgttaaacaaagttacgtgcctattgttcagttctgaattagaaaaaccattttgtgggaagttttagctactgcaacctaccttataaatagaagcttaaacatagttataggcttgaaaacctcttatgaaatgtagtataacagaaccccaaatctaatacatttaagaacctttgggtgcacaacgtgtaacatccccgcttcaagcctccattgggtccttacacccacggaaataatggctcttatacacgagtatgtcactctggctgcatcatgggctgatgactgaccctacagaccaacacgagtgtttccagcgtgctttgtcctcactcgcacgcttcctgagaaaacttcccaggaggtcacccatccttaaaatt

SEQ ID NO: 229060 - DNA, 2334 bp, Cannabis indica
aaagtaaccgattcaatccaatctacacatatttataacaaaattaaaaaattatatatacaaataacattttatgtaaagaaaacagtaatttaaaagtctaatacatataatacaattatattgcaaaacttaatagataaaatgtatattctattcttatatatatatatattttttttctacatacaatttaaaataaaattaaatattttttatatatatacaattttttttcttcatttgaatttgttatttattattttatttatttaatgtgttgttggagacaaaaaataactataatttgttttattttgttgctagttatgtgaaaaaaaaaatttcataaatattaaataatttaatattaaaaagtaacaaatccaaagtaaccgatccaatctgcacttttgcggattggattggattggacttgagttattgtgcggattggattggatccaaaaaatgaaatctgcacagtgcgcatttgatgttgtttgaccaaaaaagtgcggattggatcggatgaacaaccctattctggttggggttcgtgagggtgggggtttgatttctaggaagaactaacaaaaaagaagaatgaagaagaaaaagaaaaaaaataataattattttaattttttttatttttaaatattttaaattgtttttttaatacataaattattaatattagatgaaacaataaaaatttaccacgtgtactcttgtgtacatcgtgtcagtccactttattggcacttaacagaccaaaatggacgtaaggactacagtacaaaacaattgtcgagcccaatgagtaaagctataatttttcgagtaagagaattaaaccgtaacaaatataaaaatatagagagtttgaccacaaattaccctactaattataaaaaagaaaaatattaatcacccatgaaccttccatttgagtgtgggtctagctccatcggcccacatcagataccggatctctaatatggcaatatatatatgttgttagaatgaaaaagtttgcatttagagcatatcagatttaatttgaaggacaaaaaggtaactaactgccagagaagaattgatttttttgttaaaattttattatattttagattatgaagtaaggttgtataatgcaaccataagctgaacaagcataatcaattatgtcccattattagcccatgtggtggtggtggagaatgaggtttgacaaaatacttcaattattttgagctgtaaaacagctttgcttaagtattattaggagacacctatgagtttgtgggcacagcatatctttttaattttttcttttttacttgtatgatttccattccaaccaaattaataatcctcaaaaaaacataagagatcagatctttatacgtcgttcaaatgggccctaagaaatgtctaaaaccaaaactaccacacaaaaatgaagcctttggagtatggttgcttcccttttcaaacattctcctaatacacgcttgcctatatttttatgtgtcttagctttttctgaaaatcaacatctaaacagacaaaattgtgggtttttgtcgaccattattccaccacagtccaattcaaacaaactatatgatttagaaagctttcgtagaattatgaacataagtttgtcaacttctagtgtgtgtgtgtatcccctatatatatcccccacttatatgctaatgccacaaaaaggtacatatttttgttatctcaaggacccatatgcccgtgcctagctagcttttcattatcaaatgttttgagggtattgtcaaatagtaaacattccttcactctttcatctttctatctttaattatctctaacgtttttccttttcttttcaaagaatatggtaacaacacacatttaggataaattataaatatttgtcgttcaggtatatataacacttactccagttttgagtcttgacagtataggaataggatgatgctatcagatcatttatatttatatgttgcagtatgtgtttttcttactacctctcaaacaagttttcgttagccatgtatataggttcctaaccttctaagcacattttcctttacaattattttaacatacctttgtttttataaatgttttattcattttctaaataaagattcttataattataatcattattattagggttttttacaaaaaaatactggattttaggtaaaaatttataattttactgtcacacggaaatttttataaaaatactgttttttataaaacaccgtaaaacactaaacagaataattaaaaacaaca

SEQ ID NO: 229061 - DNA, 1328 bp, Cannabis indica
agtttctggcagattttcaaaaggagaagggaagacagaatcaatttcatgaggcacgtacgttgtgcagcacaatggcaactgccgagtcaacatgcatataaaatcaatgtagatatgctggggttattagggggaggggaagatctcgtataggggttgttgtacgggatgagcatggaaatctaaagtatgcagcggctacaattaaacaggaggagttgcaacaccacttagagctaaattatgtgccattcgagagctggattagagattggaattcagaggaaattccgaagttcactgtggaaactgattaccagcaagctcttaatctaattaagcaaatggaggaagatggaatggtacttcatattcgaaggttgttacattatatatagtcaaatgggaggctaatactgtgactcatttagataattatgctttgtcttctaaagttaaagttagtatcatttagattggggctataccctcacgtgttaatcaagccatgagacttgattatccaaatcctttgtaacttgttctattaatgcacaatttattttcaaaaaaaaaaatatcaagacaagtaaaagtgtattggtccaagcattgggcagagcaccaaaccccatttttctaaggtctaattcttttcaagaaaaggcttatttatttattttcgtatcatacgtacataaataaaaaaattacagtgcttctacaatgtacaacccctaactattttggcatctaaaagaatttcttagtttaattttttcattgtcacatacgttataattatttaagacattctgcaaaattttgagaaattcagaataatttacaaaattcaatgttcaaacggtctatttcacacgcgtataaaataaaaaaatcacgcgtgcaactgactctttgaattctatttttcgtttgttaaatttttttaaatttctcaaaatttgttaggatgacttaaataactacaacgtatacgatcataaaaaaatttatactaagaaatagataagagtgcatcggtacattgtaaaatttttcaaaaatttataactaaaagcttaggattttttttttaaaaaaagaaaaaaaactggtaacggaattgtggtcttaatgtatatggtttgtttttatttaaatggtccaattttaaactatacgaaaaatataagtttgaacacaacatagtacgatttaaattagtacgacacgacacaaataatattaatttaagcatgatacgacacgacacgcaaaatatgagctttaacacaacatgcagtgatgaagttagaacatta

SEQ ID NO: 229062 - DNA, 1692 bp, Cannabis indica
gatgctgtttgctgtgttttaagttttcaaaatatattattgtatttataagagagaatagaaaataatttttttaacattttaaaaatttaatggtgtttggctcaagtatttaaaactatttagatttttttttactaaaaagaagagaaaaaattcaatattcaccataccatgacatgaactcatcctactccggactcagactcggacccggacccgatcgaatttggaccttggacctcggactccggatcccaaactcgagactcaaatttggacccagacccggacccggatccggacctggacttgaattcgaacccaaatctggactcgaagccgaactcgaactggccccgagtttggttctgggtttggagtccgaatccaagtctacctctggggtttgggttgggtctgggtcatagtacgagtgcgggtccggggtatcattttgcatgttagtttatattaccttaaaatttattaattaactaaattttttatgatgaccattattgtataaataaagtgtactaattaaagataaataatatttaaattactccaattaaatgtatgtatttcaaattaatataaaagtaacatataaaattaaagtacttacaaagattattgcataaatattctcgcttgtcaaagaaaatccaaggtcatcattgtcatgaaacttaagaagaacatcaaccaaatcctcatcacttctctctttgggcttttgctccttatgctcatggataatctcttcaaatattcttgctaccctttctctaagcctctcaagtttaggcttagaaggactcatgtgataaaataacttaaaagaaggaaacaaatcagcaagttcaaaccctaatgatacctcaatagcttccttcaacacaggcacaaactcttggttgtgaatccttgtcctaccacaggtcgcacgcgaaataatgttgtacatgaacatgttaagtctctcactaagattaataacaccgccaacattcgaggaaatcgagtcgatgaagttgaacatctcttcttctcttatgtatctgaaagactgaactcttgttgtactcaaaagctcttgcatgaaaatcttccttacttgtctccaatgttcaccatatggagcaaaagcaagatcagcaccatcatataacatgattttcgaaaaaagaattgagggtcttgatgcaaaattaatatcatggactctcataacttgtttggcatattctggtgatgagattactatggttggaacttcaccaattttttaagaacatcaatggtccatatttttttggctaaatctcttagtgtatgatggattaaggaagagccaatgaaattgtgaatgtttccaacaatgggaagtttccatggtcctggtgggagttttgaattagttgatgagctttttatgagtatttttatcaccataaacaagaatatgtatgagaagaaaaaggattgacaaagatggtatttcaatctccatggtgaaatttagtgataataactcaatttcaacaatgaagaagctacaagaagaatcaatcagatatctattctattaaaaagttacactgaactgatcaaattttatcaggaccacatgttggatgattgcatccccataattcagattgcatgaggatatatatatatata

SEQ ID NO: 229063 - DNA, 1501 bp, Cannabis indica
cctcaccaccaccgtgataaccccgcgcgcgaccgccgctagctccggtggagctatttctgccattgacggacgaggcggaccacggaccgggctcccctgcattccgaaacgtctagctcgaggttctccttctaacccgatctcttgatccgttttgttctctctcacacctccatctccgttcgccgtctcatagtccgagaccaccgcgcgcctcgagggctcttaaatccctgaaccacgaggttctcaccctacacacccatccggagccaatattgtcatcctgagcgtgtgggtatattttcgtaacaccgttttaaattgtttgattagtgaaagtcaattgcgagttaggcaattgatatatgcgattgtaaattttattgggttttatctactgttgtgaaatcgggtttgtctctgtgatattgtataatatgtgtgtgtgttataaactggttttataagtttgggattctattaatcttcataagttgacttgtttgattctatcaattttcattctttaaaagtcttgaaaatgatactgaattggagtggttttactgaaacattgtgaatttctatctattgaatattttgattgaaaattcaattgcctttcggcaaaataaaaattaatgtagttatgttgaattgcataaaactaatgtgtttgttttctgaaaaaattaaagaaaacttttcaaacgtactctatttgttcattttgtattttatttcatacttaactgaattcaatcacaactatgctcccagtgtcaattatctaatcaaagaatctatatcctaagatctaattggctagttgtttacttcacaaattattatgattcacttaattacttgttaaaatgcttgattgtctaattcaatttggatatttatttataatctttgataatttgtattagttttgattttgattttgatgtgtgtcattatatcaatgtataggtgttccatgataagaggtgctcgaattcggctcaatgggtggcagcaggcagctgtggcagttggttctgcagttggagcattgctagacccacgaagagcagaccttattgcggctctcggcgagacaacagggaaacctgcttttgaaagagttctcgaaagaatgaagcgaatcccagaaggcagggtaaccctttacccacatctattttcatttgtctatgtcaatcatgatgaattcattataactttttaaaatatatttacctgatatttctgcaatcgttcactttagtttcttgtataatccataatttgtgttgtcgttggggtttactctggctactatttcatttggtttgtgttaatgcaatacaaaaaagtcggaggtctgaactttcaaaggattttgatatgtaattatgtattaacaaacatgttatatttgtcatgctctaaagactgacagtcttaatattttaattcttgttacacaaaatacctagactcacac

SEQ ID NO: 229064 - DNA, 3067 bp, Cannabis indica
tgatggtgaattacatattatagctgtatttagaaaaagggttgaaaaatatacgatcgtgaatcgtaatgctgaatttagagaaagaaaaaataattagagcttgaatatgttgatatatatcttaccagggcagcaggtatatgtatgtatgatatatacttattttttctacttaggatgaggaaaattatatgtagtgattttgttgtagtgttttgggattatgttcgatgagagaaaattggagtagtggatttatataataagatgaagatttaagatttaaagaataaggtggctaaaagaatagctagtcttaataaaatgattaaaatagtgttagtgtttagaaagagaaagtcaaaggaaaggaaacccatgggcgcatttgggatgaaaagttggagttttgtgagtggttgaattttcgggagttgttgaaagaggaagctttacaacgccaaccaactaattcatcataatccaaccccttaatgactggattagactgattttactagttcaggccatacgaaagacgggatatataacactattttttattttgtaaacatattttatatttaaaatgaatttaaatggaagaataaaaatttatttatagatttatcatcaaaatttatttatcaaaattagtaaaatatataatatgaaatgatcatatacataatcaattaaaattaaatcatgaactcaaagcctgaaattaataaataaaaatactttcattctaatagatataatatagtattagtattattatatatatcatatttccttaaagtactactattatatcaaaacttgaataaagtaatatatgtattcaattaataaaacatgatacattatttattgggtttttttttttttcataaatatacagcaaaaataacataattataaaaaatatgtaaaaaataattattttgaatacatattacatgaaactatacattttaattattaaataatataaatcattaatgattaaactaattaccataaataaattaatataattaatgtttgtgttattttgtaatatcttatggttattatattaatattttaaaaattattaataataaaatatgtttatttaaactcaaaataaataatttcataaaaataattaaataaataataaacagttttataaaaataaacagagtaaatgttttttattaaaaaaattaatatttattatctattttagtatgaattattataacttgagaatttttttttaataaaatacaatatcaaaattataaatattaatgtatatagatttaaaatgtgtgtttatttaatattaaaaaatacaaaagtaaataaaattcaaatgtatgtttatttattatgttattataatcaatatttatagtaatactagtctttttttaaaaaaatattatttataatattatgtgtttataaaaaataaaataaataattttataaaattgatcaaaagttacaataagtttttacaaaataaatatactaaatattttgttattatgaaatgaatgtttattatctattttagtatgacttattatatattaaacaaaataataaaatataatagtaaatattataaacagtaatatgtataaaattcatatgtaactttattaattaatcttttaatttttttttttgatgaatcagatctttcattgcacaaacaaatatttacaatctaaaagcaccttactcaaagtctttgtataatctatacaattatgtgtattatgacaaatgatttttaaagattgctaaaccaaagtctatctttctcagctactttcttcggcattacacttgcaattctatgtttcaagatccatttatctgctgcagcagatgacctgttgtgtgcatgtttgagttcaagatttgatcatttctgttttgctaaacagagtagaccgaggctgcaaatgcagcataaaaaacatgcttcctgaacttggagtatttccccctatcaactcttcggacaatggcctgcaaactgctcgaagtgaccctccaatcaatccatgtcttcacctattgcagcacctcttgtgagaacctgcaaccaaaaaatagaagatttgttgtctcaggagtcgagttgcagaaggaacaatttccatcatctattattcaaaatttagcaagcctatctttggttttcagtcggttttgcattattaaccagagaatgaaactgtgcttgggcacattaagtctactccagctacccttgcaccagaaatggtgttcaaattccccttgcagcagcttataacctgctgctattgaatattgttatgaggtgaaagtgttcgtgttcatcagctgcttcactttatctcttgcctcaattattttgcgccaataccaacttctattcaaaagagctttatgctctcaccactcctaattcttgatgtaaacactatggacccactttatccaaatattatcttttttattagcaatggaccatacatgtttgaaaagggctgcctcattccaatatgaagtgttcatgaagcctaaaccacctgcagccttaggcttacacaaactcctccaagctacacttcccgacccttcacttcttccttgcctccacaagaagttcctgcacacactttcaatttctgagatgatcttctttcgcaaaattaagagctgacaccagtaggtgtggacagtcaacaacacagagttaattagcacaactctccccgcaaaagagatgttcctcgagctccaaactttaattcttgaaatcattttctgtactagacctgtgcattcagcatctgatattctcttagcacatatgggagtgccaagatacttgaagggaacgggatgtcttgtgaaaacggacatgatgagtactctttgtatttctgtttcttgcatcccgctgcaatatatagcagttttttgaacatttggattcagacccgaggattgagagaatgttttcaaaccttacagcatgtagtatatgttggaattattttac

SEQ ID NO: 229065 - DNA, 2477 bp, Cannabis indica
ctactacctctctctctctctctctctctctctctctctctctcttcacttgttgattagacatccttacatgcatgtgtgatatgtgtgtgtaaatataatgtatatatacactttggaagatccacctatagctctctttccttcctctccaccccatataaatacataaatatgtatatatataaatatataaatataatgttgaattttatttaacgaaataataatttcattagtttggatttacgtacgtgacatgcatgaagtgatagtataatttacagtaattatttataactacatacatcccctgtggccaaaccatgtaaataaatatttatagaaaaaggtatatgtaagtttatatatatatatagggtaggtatagtagctaggttgatcagatatatgtatacaattaaagcaaaagcaataacattattggcatcaagccaagccatactcacggagtcaagtcatgatcagggttagctagggtttcatattttctttctttgtttctagagcccccaaaccaaaaaaggagctttggcgtgatgaataagtgtagtcttcaactcacctcacctcaccctatatatcacctacctacattatatataatatatataactctgtatatatataggcctgcactgcatatatctgcaccctctcatcaacttttgacaatttcactgcatgtattttcattcatctcaagagtgaaaaccctagctaaatatatatattttttgtgttttgacatatgcagtgatatataccttaaactcgtcattagttagtacttaattattactttcatcaaccaatatatatagttgtgctactatttctttataattataagtacttccaatagctaattaattaggtgatcttcaaaaaattgatgagccaatgagtaatctcctagaatctctcttaacatatttttcataatatatacttttcttcttatttttcttattgataacatggtattgtgctggtaaaatagaatttacttctaatgtgttggcaattcaatgttagtattagaacttttgccagcataaaaataaaaagcgctggcaaaaatgactttttccaacgcgtaaatacgctggtaaaagttagattttagccactgcaaatgtgcgctggtaaaattttgaattttttgccagcgcagtttacgaaatttttaccagcgtagtagcaaactgtgctgataaaagtgatatttcttgtagtgccaattggttttgagatggaaccccatgattatcatcatggtatcagagtcatatctctagcaggctttcgatctgcacctgtccagatggttagccagccggacgaaatccataaggtgcaaagacacttgagatccgaacaaaagaagtgagcaaatgacatggcctgcgataaggtgattcaagattggtgagcaaaaatagccaccatcttgagggagtatattggagaacattgtttcacatggattaaatgtaaaagtattgagccatttataagaacatggactactccactcatcaccaattagttttgagatggaatcttataattatcatcacagtcttacagagataattatttaagtaagaaagtaaactacatgtatttatgatgacaaaaattaataaataacacaaaattattagagacaactgagaaaaataatattaagaaaatatcataaataaaaataattttttttagttttaaccaaaaaaagtaataatattaacagctggccaaagaaacaaatatacagtccaaataaaaaaattacacaaataccacttacacacactttcaacccaagattcatgtttccttagcaactatcgcgtaaccatcgcgcaacccgacgacaccgaaatgaaaactcaaccagaaagataatcaccattaattccagcgacttcacctgagaaaacgactagaatcaattaaaatagggagtgttttgaattcataaaaaaagtgtagaaaaactactacgaaactaaaattcaaccagaaatctagttcaatttgcataaaactaatttcctgacttcaatttttagatccatgaaagatagatctaaaaagttgaactagagttcccaaacaatccaactcaagtataatccaaaaaaaaaattacatcaatactatagtaaatatgagtgtaaatgagtcgggtcggatctgatcttgctatgatctgacctgatccagatcatgtaaggatttgccccgcccctagatcaaatactcaaatcagatccgacccgacctgacttattcggatcggatcagatccgacttgactaattcagatcagatcagatctaacccgacttattcggatcggatttgatccgacctgactctttttctaagaattttaagattaacttataattttatatccattttaattttgtattagtattatt

SEQ ID NO: 229066 - DNA, 1545 bp, Cannabis indica
aatcttgataatctgacatgagtttaagatccatgtgtatatctatatttaatttttaacaattataactcaattatttaaaagacattctacttatatttaaaaattagtaaataatttacaatactgaaaatagaattcaaaataatatcaattacacatgtattaaaaaaatcaaacacaattgaatgtttgaatataaataccctaccttcaacactgtaaattatttaaaaaaattaaaaaacttgtaaaatgctcctataactacaatgtaaatcatcacatataataaatttagttatagttttttaaatgtcacaaataaaaatgctttttcttttgttcctttttttttaatgacaaacataagtaatttccattataaataatcttatttttttgaggatgatatagtgaataaagtgtagatacaagttttattaagggggaagtttgtctaaaatttgaaagttttgtttctatatgagtgagtgatgttgtgttttagtagctagaagaagtgaagtgagaatatatatgtcacttcaaagctattgtggtgggagtgaaaaagagaagggatagatgataatagtgcttcccgttcaagagcccacttgtttaatgcacgtcgttttccctcaccacacaaacaattaaagttatcaaataaaatagaaaattaacaacaataatattaataaagtagagcccccaagtgcctcccacgctttaactatatttaataaaaacctaccctaccaatgtccaaactttcaaaccagtaagatcattcactctatacgagttaaaatagttcaatccttaaattataaagaaaaaattacaaaattaaacttccaacaaatgaaataaatcttagttattttatataatttttagttaaatatagagataattatttattaagctaaacatattttaatattattttcttaatttttctaatatgtgtaatattatataaattatttatataaaatgaataaaatatattaaaaatataatatttaaattataaaaagaaaaatagagaaggtgatatgctgtaaaaatttgaggtaaaatagataaagtagagttttagtaatgaattttaaagaataaaatagaaaagttgttgggagtgctaagattctactctatcatttaacatacattacaaaaattctacatttcttatttttacaacttttatatttacatcatacatatatcagtttctttatatttttctctacatcattaaattaatattatttttattttttacactattaaaattataatttttgaacatatatgcgataaacattatttatatattattaaaataagtttaaagaatacactattcattctctatatgtagaacaaattgtattggtttgagtgcatctctattatacatatatgatttaatagcacttacaacaacttctctaaaatagaaaaacttcaaaaaatttaaagaatcatactaaaaatatgctggctgaaatgctctaaactccttcattt

SEQ ID NO: 229067 - DNA, 1703 bp, Cannabis indica
attaagattaaaagaatagtcaaccgaggagatacattcctgaactaaattaatccaattctcatggaaactaagcttgcacataaagtaactgagaaaagactactccaccctatcataagccttagacatatcaagtttgagagcaaaagccaaaataaaattatataacaaaaataggaaacgtgggtaaatgtgcgagattgtgcaatgttgaacaaaaaaacacacaagtttctcaacacctatctcacacgtgtatccataatataaatatatgtatgttttatagtcctacttaatgtgtaaacatacatatatttagagaaaatctcacataacaaaattaaacgtttttctcaacacctgtatagtgccgcaatgaataccattgatacataacaaggtgcatatgttgacatgccctgatttttctatcatatcagacatgacttcacttgaactagcatattcatagcaaaacaaaacactaatcatgctttatcaacttcatcactaaccatctgcctccatgcttgtactagaatcagtcccttgttcaattcgactcattagactgctgacattgttgaatttccagtcaactaagtaactaggccttaaaaattcagtatccacattagtatctactgaaagcattgttaccactttcgacattgatggacgagctgtaggtgatgtttgagtgcataaaaaagctacttgtatgattcttctcacttcttgctcaatgaattctgatagttttgaatccaccagttcgatttcacggccttcttcatgtaaattccaagcctagtgagcataaacaaggtgaaattgtgtttgttaggggatagcaaaaaattatgctattcaattattgaaagctatgattttaatctagttttagtacccattcaagaagatatgccttttcttcacctaagctcgagtcgaaattcgatctgccagagaggatttctaatgccacaactccaaaagcaaagacatctgttttctcagtaaggtgaccaagcatggcgtattcaggtgcaagataaccactacaatatcaatgaaaggttagtgaatattttgttactaaaaatcataatgaaaagtataaaacaaaattaagtatgatcaatcatagaaaatcttacatagttcctgcaactcttgtacttatatgagtcttttgatcttcatacaatttggccaaaccaaagtccgatattttgggagtgaaattagagtcaagaagaatgttactggatttgacatccctgtgcacgattcgaactcgcgattcttcgtgtaggtaagcaagacctcttgctatgcccaaacaaatgttaaaacgtgttgaccaattcagattcaaacttcggttacctagtcatggcagttacattatttgttatggttagtgtaacatttggttcttaaaatacagtcattgttatttgtataagcaaaaaatacattattgtcataccatatagtgcttgatcaaggctcttattttccaaatactcataaacaagaagtcgtttgtctccctcaatacaacatccatataatttgacaaggttacgatgttgcacagcagatattgtggcaatttcagccacaaattggctctttccatggtgagaattcacagacaattgctttactgcaataactcttccatcttc

SEQ ID NO: 229068 - DNA, 1633 bp, Cannabis indica
tatagatacacacatcaatttttttttaaaatatattttgtttttgggattaggtggtaccactccttcacttaataataattttggagaccactgaggaatcaatttgagcttatacattgtccctaagacggttgtgctgagaccctcacaaacacattttactcctaaacgagtgctacttttaaggcctaagataagtgttactatggggactcaaactctgaaggggaactaaatgagaactcagtggtatttttattaaatattgggaatgagaaatttgaacttgggatattctttgtgaggaaaaatataaaacttgtatttggctatgtctatgactatttttttaagagatctttacattgtgaatttacatgatttctatttggatacttttattagtgtgtatggctagatataagtttatagggagtagattttgttttgtcactgattgtttatattgtgtcgttgctttaatttaaagttaattattctaaactttaatatatattaaattatgcacttaaaaaaatttaggtcgttagaagttctttcgaacgcattgagcttgtttgatcaaatcgtgctactaaatttttatcaacgttagatttttattagtaaaattagacaaaagttattaaatttaacaatctcaatagttcagaatttttttttaattttttataaaatttaggtagtatgatttagtataagagtctttaaagcttttatttttgtgactctccctacttttcatcactaattagttctcccctcggagagaaatgctaatagaataatagatatctagtctcatttaaatctctgaattaaaatatacaagatttgctactaaattgcacacaaatgatatcacattctaaaatgttggacaccgtagagtataaggctaaaacacatttcacaagctaggggattacaaacaaactatatgttttctcttatataataagtgcctttttcttttcttttttattggaaagattacttgataagattattcataacaaacacgataacaatctcttaaaactctaatctagacattattattacacttaaaacactaattaaaaatatttttactaaaatataagtaaaatcaaagaatcaatcctcaatcttggtcaagttttctagatttgtaaaaagaaaaaattgaatcaaaatgagaaataaattcaagtttatagggtccccatctactcctcattatcacattgcaaaatcccattattactaagtatagatgtgaaaggaaaacattaaaaagctttttctgtccctcccactatagataatgtcttcaaagaaggagaaatccatcttatagtatctctcaaatctaattctcgatccagtttagtgataataataactttaagatgctcccaattaactaaaggagaacgacagatcctcttcaagtcttccggaatgatgagagcctttcatgtataaaattaagaaaatgtataagaatatcaatatataaatgctaaatactattttggatcctgtgttttgcaaaaattatcaattaaattctgttttgttaaatgacaaaatagatcctaaatttttcaaaatggtaaaaata

SEQ ID NO: 229069 - DNA, 911 bp, Cannabis indica
taagtaaaaaaaattaaatacctgttatagaaaaatccctacagtgtattattaacttttccttatttacaatatttaaaggttaaaattatttctctgaatttgatttgatatgatgaaacacgtacttttttctgcatggtagttgacctacacacgtgaaagaggctaaatgcattattaattggaagcaacaataaaaagtaaaaaagaaaaagaaaaacagaagcatgacataatacgtgtggacacatacaaattaacatcaatgccaattttatgatattttcttcaataatgttgtaggtccacatgctataatgttaaaagatatttgaaaatttaattaggaaaaaaaaaaaaagatttgtgtggaatagatttttttatctgaaaaaaaaacctttattaaagtatcaaaaacgaagtaacttacatgaattattataaaattttacaaacttttcttaatataatataaatttcaatcaattagcttcattttaataaattagatactgctgaaagttgtttaaaaaagtttggagcttaattgtaatagtgtaatttaaatagtgtacactctcatctttactcacggattcttttaactatggacttgtagcttttactttttcaacccattttataaaaagaaaagttaaagagtgtgaaaatacccgtattgacatttagaggcaattttttgataaaaactgtagatatagaatttatatatgtatctatgccatcagttgggaattagggtaaaatgagtggttttagagtaatcctatggcatcggttatttggtattaaccgacgccataggtgcaacaaataaccgacgccatagggtcatgtatcagaactctaatttcgtcttcctcatttcacaacttattgaacac

SEQ ID NO: 229070 - DNA, 1308 bp, Cannabis indica
tcagttttagttaaacatgattataaatatattcatgtctcgatgaccacaaatataaccttagttgcataaatagaagaagcatctttattatggcatacctgctgtaaaattataacaggaagatcggccaagttacattcatatcttttcattgaagaactttcctgagagtttcctttaaagagaccgacaacgcttggagcaccttccccttctacaatgatggaatcatcagttacaaccacctttgtccgaaactgagacttggtggtggtcttcacataacgcaagtctgatataggttgggtgcctgcaaataaaatagattgaggaatcttcatgaagagagtccatgacgatgtgcgagaatgccaagtgggatgagatagcaactgtaggtatggcaccccagaaacctacagatattattggtagttaagaaaaaaaaaatcaactacaagaaaaagaaaagcaaaaatctgttaagttgaatagaattagaatataccatattttctagcaccctgagaactttttttgaaaagatcctatgagccaaagatgtgcagaaatgaccaagaagactggacccttccttcgcccgttgactagatacacgagggatagcagaaacaggtttgtcctttgtttttgaaaatacgttctcatgaaatatctgttggagatatatttcacagctagtacgatcaggaatgcttgactcccttgtaaatccatcagaattttcctgatctggtaactctacaccatctaatgtgtctaaaggtaagattgtattctctaaatcctggtttcctgaaccatcaactgtctgatcattttgaccagacgacacaagtgatataaacacagagtttccttgacctacactaagttgcaaatagttttctctaattccagtcacattgactccaaatgattggttgaaagcttcacggttcaccaaatcaaatacctaaaaacatacaaaccaaagagagaaaacattaagaagaaacatgaagaaaaaaaatgtctcacataatagacagtaggtcagctatctatacaatattatataatatataaaaataaatatatacaggaaaattcttaggtacttttgctcctaccataggaacgttttctatttttggcacctatagaaattaaattccaattctctatatatgactgtgcacaatatacttatattaagcaccctaaaatagtattcaaacaatcagttgcacttatgtccgcatgatttttattttcaatgccataaattattcagaatttttc

SEQ ID NO: 229071 - DNA, 2164 bp, Cannabis indica
aaattttggaagcgacgaggaggcggccggaagcatgcccccaccgtcctcatgtggtgcctagcatggaactgccgtggattaagacgatccacggcagagaggaccctccggggtcttatccgcgattctaatgcggattttctttttctttctgagactaaagttactgtggagactatgggtactgtgttgaatcgtttggggttcgtgaaccattggtgcatcccggccaatggcttagcggggggattttgtattgcttggagaataggtgtgttgtgtaatgtcgttgatacgtatgaaactgggttcttagtgtctttccaagctgctattggattcccggagtggaaaatgtattgtatctatggtactccctacggtgcttctaaaagagaattctggagttggctcactgagaaagtgagtgagtgcaatgatccctgggctcttgtgggtgatcttaatgttactcttgaccatacggaaaagataggaggcagagactatgatgctagggaaggggaatttctgagaaattttctgtttaagtgtggtgggattgacttgggtattgttggtggaattttcacttggcagaatttgagattggcccctaaccgtattcagaaacggcttgacagagttattgctgatggagattggtgcactgtgttttctaatgctcggttacagaattatcctattattggctccgaccatgctcctattcttcgggacacttggggggacactttgaaacggaattatccttttcggtttcttgaggtctggacttcaagagaagactgtagaatggttattgataatgcctggaaggatgagtttgctgaatagagggaaatgggtcttcctagaaaattttgcagaaccaagagagagttgaaactatggaactagaacgtttttggcttctgtgatagaaaattgagatgccttcggaatcaattggagagtgtgcaaaagatggctatcactcaatcgacggtggctaaggaagaggaaatccaaatggaaatctttgacatggaggagaaaatgggtaggatctggcgacaaaagtctcgtgagaactggcttcggtttggtgatgggaattcgaagttcttccacatgtccactctgatcaggagaaggcgtaatttcatatcagggatgacgcgaggcaatggttaagaggaaggggcgatattgggaagttctttcaggactgttttcaggccatgttctgctcctcgaacccgcacatagacgatgatttggagtcccttttcactgagaaagtcacagagagtgagaatgaagcaatttgtcgtgtacctgatgaaggtgagatcaaggatgtggtgtttaagttgcatccccttaaagctccggggcctgacaaatttccaggtattttctttcgaaagtattgggacattattggagtttcgatttgctggatggttcagcagttttaactaactgggagaatgcaggagagagtgaatgagacctttataagtctaattcctaagattacgaatgctgctacttttgatgaatttagacccataagcctatgtaattttgggtataaaatcatctctcgtattttaacggaccgtcttaaagggtgtatggatcggttagtgtctccttttcaatcggcttttattcctggccgatggattgcggagagttctatagttgcttaggaagtactccattcgatgaaaagcaagagagataaaaagggagtaatggcggttaaaacggacatgaataaagcttatgattgccttgaatgggttttcttttccgagttctcaaggcgaacgaattcagtaggaagtctgtactttcctaatggaatgcgttataacggtcaaatattctatatttattaatggtgcacctttagctcccttcaatcctaaacggggcctttcttcaaggagaccccctttcaccatttttgttcatcctatgcagtgaagttctatctaaactcatccttcatgctgaaaggaatgatgatttaaatggtattcgtgctgaaagatggtcgggtcaacgtgttagcaatgccaagagtggagtggtgttttctcctaacactaggagtcactgtagtgaggaaatcaaagggattttg

SEQ ID NO: 229072 - DNA, 1296 bp, Cannabis indica
atataataacttttaaagagtatagttaaccaattgtaaaataatatacttaaaggtgctaagaattatgtccaataatataaatatattgagtttcttataatgtgagagttagaatttctcctaaaaggagagtcaaactaattaagatctcgtcctttattgccatggccatgactcatctataaatagataagataaggactcatttaaatgataaatcttgtaattaatattataaatgagttgcccaaaagaaatacattaaaaaataagttgccactcatttattggtaggacatagtggaaacatgagaaatggagataagtgatttatattgagtcaaataatagtaatattataaaattggcctctatgaaaatttactactagttattattattattattatttaatatgtaaaaaacttataataaagatattaaataatcgacagtgctaagaaaatacatatgcatagtttaaagtaaggatttgtttaaattggactaatttaataataactgacaatctaattataattaattgttaaatattaaatatttaattgtgattggatcagatcgaattgaatgttaattttagaccataattagataaaaaaaaatgacatgggtaacacatctacaaccctaagtagagattgaacctacaactagtcaattaagtattgataaggtttggaacccttccaactttgatagaaagccaccaaaggcgaattgggctcccaagccaagatgtctggcaaaatgcttggcctcctcactggaagctggaaggcctaatctaatatgaaaatatgataatcgttttttattggctaactagctcttcttgtttttaattgagttgaaggtcgattttaaggagccaaaaatgtgagcacctctacgcgagccttattgaaaggccccttactatagaataaagaaagggattgaggaggaagcactggcaaaggatgggtgaaaattagggtatagttaggatattacacttgaaagggtgtaatatccaatttatatacatatattggtatttggtatattaagtgtgatacaattgtattgttattattattattattatttggatatatatattctatatacaagtaatagtagtttagttaaatatctattctatataaagtgtgtccatataaccgaattcttggtttatgagaaattcatgggtgactttttatttatattaaaaataaaataatttattattaaaaataaaatagtttatgagaaattcatgcgtca

SEQ ID NO: 229073 - DNA, 3675 bp, Cannabis indica
ctgaagagggagattgagtacaataaggcgtaacaatccccacttgcgttgttatgtgcaagacgatcagacctaggcgcaaggaggtcaaaaaggagattcaatgccaccacccatggcagaacatttagcggtcatcataagcggcccccacattgttggcgaaaccagaaaagctcagaagcgctatgctcaaacactctgtcacgagcccaaaggcaaagtcctagttgttgaagaccagagctcttaggagcagaaacccataaagcccacaatctcctttggcaaagaagatgcagccctggtcagtttcccgcataatgatcccttggtcattactttgcaaatcaggaatatgattgtggctagatgtatggtggacgacgacgcctcctccaacattcttttcaaatcaacatatgaaaatatggagctccaactcaccgacctggcgccttgcaaccaagtgatgtaaagatttttcatctggcatcacacctgtcaggtatattagatactcctcacaattggagagaatccaacatcaaaaacattgatggcatagtttgttctgatcgacgttccctcggcttttaatgccatgattgggcaactggccctcaacaacttgaaggcagtgacgtttatctaccacttgttcctcaaattcccaacaaggcacagagtggcttgcatgagggggagaccaacagtctacccatcactattacaacttggccttatctaaggccaaaaaggagaagatgccaaccagaagtcaagaagatgagcctttcaaggggcaatgaagtctagcaaagtcggggacacatgcatagatcctcacattgaggattctatagcaagcttctgaactgtagaagagttggaagaagtggaggttgatcccactcatccaacaagaagactaaagatcggtcaacgtttggctccagaaattaagtcagtcttgacaaaatttctaagggcaaacctacacctattcgcatggtcacatgaaaacattgatcccaacatttggcctgttcaaccaaaaaggaggttgctagacaaggagggtttgcatgcgctaaaagatgaagttgaacgactgagggtcaatgacttcataatagaagcattgtaccctcagtgggtgtccaatcatgtgttggtacctaagcccaacaagaagtggagagtctgcattgaatttaccaacctgaacaaagcatgtccaaaatagtgcttcccgctgcccataattgaccagctagtggatgccacggctggccaggaagtcctagttttatggacgcatattcaggttacaatcaaataaagatgtatccacctaatcagaagaaaaccagcttcatgatagacctaggcctatattgttacaaagtcatgcccttcgggctaaagaatgcaagggccacttatcaaaggctggtgaacatgatgttcatagatcatcggtcgcaacatggaggtgtatgtggacaacatgctcgtcaagtccaaaaaggcttgtgacaagtggatgacctaggtgagtgcttcaaaatctttcgccgctacaacatgaagctcaaccgcctcaaatgctcttttggcataagctctggaaaattcctttagtcaatgctaggggaatagaagcaaatcaaaaaaggatccaatcccttttgaacatgaagtcaccaacaattgtcaaagaagtaaaaatcctaactggacgcattactgcactaagcaaatttgtgtccaagtctacagacaaatgtgtacccttcttcaacattcttagaggcaacaaaaaaattgagtggacagaggaatgtgaaaacgtattctcggagctgaagaagcaattggcctaaccaccggtgttgtctaaacccccagaaaattaagagctaggcatgtccctagtagcacaaagctcgctatgagtgctatcctcacgagagaagaaggcggtgtgcaacaccctatatactgcattagcaaaaggctagttgatgcagaaagttgatacccactcatgaagaaagttgatacccactcatgaagaagctgacctacaacttgctcttggcttccagaaatctaaggccctatttccaggcacaccccataaaggtgtacaccgatcaaccactgcgacaggttctacagaaaactgaagcataaggcttactactcaaatgggccatagaacttggacagttcgagatcacataccagtcaagaatagccttaaaggattaagcccttgtagactttgtggctgagtacaccaacttaactcttgaggtctctcaagactcatgagaacagcaagagccagagaaaaagcatgagcacgagcaacaacagcaccatgttgactgaagttgaactgaccaattgtccgatgcaggcattgcccttacaacacttgggggtaagaactacacgaagcaatcaaattcaacttcaaagcctcaaacaatgaggctgaatatgaagccctgatagttggcctcaagctggcgcaagaagaacaggctgaacacctggacatattcagtgattctcaactagttgtgaatcaaatcatgagtgaatacacagctcgagctgatagaatggtggcctacttgagaaaaatcaaagacttgttaagtttgctcaaaggctacacaatcaagaagatccccaaaaaacagaatgcaacagcaatgcacctgctcccctagcgagcagtaccatagctaacaaagcaaacttggtgcccatccagttcctagaagaacccagcattgttgtcccaaaggaggtcgacatgctggatgacactccaacatggatgacacctagcacagcttacctccaaaccgaagccttgctagatgataaaaacgaggcaagtaaactaaaaagaaaagttgctcggtacctgatcctagacaggataatgtacagacagagtttctctatgcctctcttcaggtgcatcaccaaagccaaagctgaacgacttatgatagaagtgcatgaaggcttccgtgagaatcatgccgggggcaaagcttgtcgaaaaagataatctgatagggtcagttttcgccaacgatgatcaaagactcaatggactatgttagaaaatgtgataagttctagagattttcaaagataccaagagctccaccaaacaagcttacaatgatgcagtctccttggcccttcacagtgtgggggatagacctaattggtcaattcccaaagggaaaaggagtggtacagtttgctgttctcactacagactacttaaccaaatggatagaagttgaacacctggtgacaatcacctccaagaaggttcttgactttgttgtcaagaacatcatatgccagttcggccttccccaaatgattgtgtcaaacaacgacaaacagttcaatagtgacatgttcactgatttttgcaaccagcatggcatcatgaagagcttctctgtcctggcccatcctcaagcaaatgggtaggtagaagttgtcaacaaaaccctcaaggacacccttaagaagtgccttgatgaagcaaaaagcatctggcttgaactgctcccagaggtcctaaggtcacatagaacacgatcactaggcaaactccatttgctc

SEQ ID NO: 229074 - DNA, 1549 bp, Cannabis indica
ttcggctctagtagatttcagttttagcgggatcatatatgtttattcgcagtacgtccacgtttcctatttatttaggggtgtttacatgccaacctcctccacaagatgcaaaagtagctaactccaataaagcagcaaactattcgaaaaactcaacaaaattcaaattttgagagacagcaccagtgagattccaacaggatattgcaaaaggacagttcacgagcacatgggagattgtctcagctgtctcattacagaacaagcagctggtttcaacagggatatgccattgcaataactgaacacgagtggggaggcatcccgataatgccttccaaagaaagtgctaaatttttgggggaatcttcatcttccacagctgcttccaacacttagaattctccccaaagctggtgcttcttttttgttgctgcagtaactgatacgcacttttgactgagtagaaccctgagctttgttttgactagaaccaatggtccaaacttgctaaatcactaaagggtataccctaaatcaagtcagcgtctctatcctcaaataggtcacggacaacatccacattccaggccctcctcccaacatgaaacaagctttgaacaatgaaattcactagcccaggatgatcagtagtaacatacggattattatcatgagggagccacggatcaccaataatattaacagaggtaccaacaccaatgctaatcctagcaccatctttaatcaaatcaatagtctcatgaatactacaccatatgaaacttaggttatttccaagaggagacgataagaaatagccatttgggtaataccttactttataaacccaactaaccagagaagtgtcgtttaacaacaaccgctagccttgctttcctaagagagcaatgttacaattgtggagactacgaaagctaatgccatcagcatatgctttgtattttattagtgacataacaaaaataaaatatattaaggagcaccttatggtgctaagtgtaacatgcgtgccaagatggcatgttacaagctaggtgatgtccacaagttggccaagtggtggtgcatattagtgtgcatgctggtggcatgttgatgcttagtttgtacggtagtggcattttcgtaaatatctccaatattgtttagattggggcagaatttggtattcgccatttatttgggtctacgaatacaattgtgtaataggatttgagaaactcaatgatttggtatatggtttgaccatatgtctgcagagccaaaattatatatgttcttagtcgaaggctaaaagcatagaatgctctttaagggaggagtacctagtgtaagctctccaccaccccctggcaccttggtgccaagtgagctactactagttagtgggactagtagggcgggcatatgaggactacgagaggactcatatgtctccatgagttggaatacttaggacattatcgggccgacccggtagtgcgtctaagaatattgcaagaggttaacgggtacgtttcca

SEQ ID NO: 229075 - DNA, 1664 bp, Cannabis indica
ggtgcaggtaaggggaaagcaaaggttgagcagccatgagttcggggtcatagcagcaatgtacatatcagctgcagtgtttcggcccagtaatcaggatgctctattttgaaagtattttgggagtacaaagtttatgttgtagaaacactattaaaccagtttgtgaatattttgaaaatagggggaccccatggttaataccacttatcttttatcatatagtctatgtgttaaaatttttaattatcaaaatttaattaaccacacttttggtataattatatagtatctatataagaattttattaaattgcacacacgtggcgtccctgttggacagggcgttacgatttaaataggaattgtaaaataccaaacaatgccaaagaatggatctttgaccaagctggttatggccatagacagcagtaaaacgataactatgggtcaacctcatcacattttattaaaaaacatcttatattttatttgaatatgcacttgaattaattgagtattaataattgttgtattattatggtagggattttagtggtgacaagagaaaattttaaagagtatataatggtgacaagtggaatcattggtccaattttttttaatactaattagatttcaactatgagttgttgtaaatattgatatatcattctagtttattttgggatgtaatatattgatgtctaatttattttaaattagatatttttttaagtattgtattgtaatgcgttgatttctaattgagcattttttgttaatgaaatgagttgatgtataagtaatttatagttgttgttaagtttatttgttttttaagattgtttttgtgttgttttgaactttcatttaagtaaacatctcatactttggttatttttgtgtaatggtgttattgtttattttaaattgatacaacttgatgtgtatggcttgtttagtgctattttttttttcttttttgtaatttatttcttatttataaaatttggattagatgtcttgtttagttgttgttttttgaattgatctaacttgagttttatgtattgttgttattgtgttgcgcgcttttttattattattttgctgttttataatttatttcttaatgataattgggtagatatcttgttgttattttgggattttgttgttttttctagtgatatacattgtttggttgatagtttgttatttttatgttcgttttgtgttgttaattttatattgttttttttttaaataaaatatattttgtaatttaaaaatttaaaaattgtattttaaaaataatttttttaaaaaaattaaaacaaaattaggaccataaaaatgtaaaaaaaaaaaattaacttttgaaaaacttcataaaatttattaacattaaaatcaaacacatgcatatatttagaatttatgacacgtataaatttccaatagatttttttttagataaaatatcaatttcattgaataatttagcattctgaatacaaaagatgtaagagttcaccagaaatagaaatatcagaaatgctacgatcagattaataccgagaatgtctagcaacataatgtgctactcggttttgctgatcgtctaatgaaaaataaattaacatttgggaggatagata

SEQ ID NO: 229076 - DNA, 863 bp, Cannabis indica
gaaataaaatacagaatatatttttaatttatgagattttttttaacatatttatagttttaatttttttttttatgaagttacacgatatttaagttttatttttatttttttttaaaaagatttctcatcttttcgtttggatccaaacaagagaaaatgaaaacctttgccctctgtggacccagattttagtgatgataaagatgagttccaaagggttatgttttattttgttttgattcacaaaaaaaagaaaaagaagtgagaatatgcgaagagatagttctaattaattgctattcaccaactgtttaattcattttcaatccttcaccaatttttgtatttgtcattgggcagaacaactgtatgctgggaatgggaagcgggcagccaaatcgtcgggagagtttaaggatagctttgaagaaagcaggagatgaggtcaagggagcagctttggctagtgatgctttcttcccatttggtaatgacacatccttttcatcaatggggttagattgattgggaaaattcaagcaatgattgatcttaaacttaaaaccagatgtagttatagtaagtaaatcacaggacaaaaatgtaagtggccatccttactgatgaaaatgatatttgttgttgttgttttttggatcagcttggaaagatgctgtggaagaagcttgtgagaatggaattggtgttattgctgagcctggggggagcatcagagatggggatgccatagactgttgcaacaagtatggtgtatcgcttgtcttcacaaatgtaaggcactttaggcattgatgacaaaagttgataccaacatttgcaatagtagcgttacaactgcc

SEQ ID NO: 229077 - DNA, 1623 bp, Cannabis indica
gtcaacaagcgtcggggcacttacttattatacgaaccagaaaagagaggttgttgtggtaatcggcctaagaatgctggacccagtcgattacacgatcgtagtaggcctgagcgttgaagctttcgtcagtctagggtggaacgatttgaggtccaacggccctgcttttagaaaatgggctgaacggagatttagaaagatttgaatcaagcaatcaaagacttcttgcattcactatttgagacaaaagtgaaaagtgagttttttggaaaataaggggttctggtttgaaagttcaaaaatggaaagtttttaaagtctgaggtgatgaaaaaggagaaatgagttgggcaaatcaatttataccttgattaagatccacgcaatttgaaatggatggcctgaatttcttcttccaaaagcacacttcgatccgatggatgggaagttcaaaatatgacatttaaggcttgtcctggcatttattattcatcattgcatgcctcgagtaccatacgcattaaaggagacatcgtctcaattgttcttctatcattgtaactgttcctaagagacgcaccctcaacacatgcgtactgacaatagttacattaaagccccccatgcgtgccacgcacatggtaccttcaatttatgttcccttacttgatgatagctcacgggatgcatccacaactccaacaattaccatgtgtcaagaactaatccccaagaaatggaaaagtactgtaagctctcagatctcagagagtcccgaaagcttgagagtaaatgttatccatgtttctaagcatgttacatgtggcattcaaaggatgggattagtctcataaattccctaatgaaggtcccccactatgatcttgccacgaagaagcctcgtggaaccggaataagtcaagactaaagaatatatggaagttcacttggccctgtcatagcttcctggatgcggaaggcgtgttacctctcccagacccaaagggatctaaacttggaagcctacccaaatgatactcggatgggtactcaaggggcctaatgtagatgttaatcaccttagagtgtcgcggacgtctacctttgatacaagccaggtcaccaagtaacggttatattttttctgacaaaggatcagatcttgtctcctacgaccaagcatgatagtacgcacacctccaccaccttttaagtagacggatattacaagcctcttcttttaaaggtgaaagctttatgctacacatggattctccttttaaaggttaaacctttggaggacacgtgtcaacttcgtacaaatggtctcccattgtccagttgtagtacgcacaggcacaatagcttctaagggactcaatggttaactcttattttacatgtattttaccccattagtggactttgagcaaaaaccccaggtgggtcatgggcatgtccatacccgccacttagcctataaataccctcatattcccatatggaaggggatcgcaaataacatagttgaaacactgctaagttcactcttcctcttcttcacaagaaacatagagtgcagaattagagtttcctccaaaaatattataaacacatcaa

SEQ ID NO: 229078 - DNA, 1161 bp, Cannabis indica
tgtgttatgtaatgttttgtacaatgggtaggtgtatacagaggatttctatcctatatttttgagccatttatgtcaataagttcataaattaatttttttaaatggatcattaatttactttcaaatgtcaaagaaataactttattgtgaattttactttatattatttatttaggaaaaaatataaatttttattaataggcaaattagataattttcaatatacgatggtacatcgcttaaagagttaaatcaataatatagacaaatcacgtcgtttacaaaaataggaaagaaaatcccaataataccttcaattaaaaaaccaatatgttgtcagcaatgaagtatcaaagaagcacaaagaatgctagatctccgatccgaatgaatatatgacaaatcacatctataaatgactataaattaaaaataaaaaagatgaaaaataatattaataattagtaagcttgttaaaaaaaaataataagcttattcactttttttatattttatttttttattatattcttttttattttagagaaggcttatagacagtttctcaagctagcaatggtgacgttggatcggtgtctcgagatagtattttttttcttcattttttttaaaacgtattgtttgggtttataatagtactagtttactttcagctttttggatcgtctctaatttatgttcaaaatatggcatgtaacacttctcatgaattagtagtacatgcactcagagttgatactgaactaatttgaaggatattttaccatcattcttttatgatgtacttaattactattttcaatgaagtgatcattgttaaatacatatatattctctattttattattcaaatttattttttatgaataaaattatttttcttccaaaagtttgaatggaattttcggtcacactagtaattatttgaacttaaaaattataccattgcaatctatttttcaagataattattttcatatgtgagaagcatatattttttttcgttaacacaggcgtctattaatattgaattcacccgatagtacccattttggaaacgtctagtgccaaagtcagtgaatgggtaagtcgctaatccttaaaatagactatataatgtactttatttgttggctt

SEQ ID NO: 229079 - DNA, 2077 bp, Cannabis indica
tgatattttttggttttttaattttttttttctagtgtaactctatttagttataacctcccaattagaatataatttacttggtcccaagtgtattcttggatagaggttctactgtatatttaagtttatgcatgtttattatgctattttatgtaactatctcaatttctgtatttttgttcggaagctgtggaaggcattgttgggcctttagagagtcgcgtttatatgttaagaatattattatcggggtgttattgttgggtattagaggtattgtgaattggtcgggatttgcagaatgtctaaattacctttgggtgattttggatatttgagttatttaggggtgaaatggtcataatgttaggaatcccttcttttgtcttttgtgatcaacctaggctggttgttaatttaataaaatgactttttatagttaatgttagaaaggttaagagtaatctagaagaactcatcatttttccatacctctttctttctttctctcgattctccaagaagcggcaagaaaaggagattagtttgctgcaattatagtgatttcagcaagaagaaggtatcttgactaaggtgtaattctttagccttctcccctttgattttccttagcttaggttatgttgtagttttgatttttgtaaatttaggggttgtagatgtatagcttactagcttatgaattctgaagttaggatataattatttaagttgttagaactgttttggtggattgttgtggtgtttggttgagattggagttttggagctcaagctttgggctccaatggtgatttgtttttttgagtttgttattgagttttattgcttggttttggttcattatggtatgtacaggtgttcttaaagttttggaaagatttgagattgatttgagttaaggagatcggttttagggttcccaacacagaatcggtcgaccagttctaggggaccattagaaccggtcgaccggttggtacccaggagctggggttccgattgggaaccggtctgccggttggggctttttcccgaactttagtttttctcgtttttgcgtaatttagggtgtttgcatcctatttatcgatagggttatccttagtttcaattttaaatccccgatagatgtttttgaatgtctctcatcgagtttgaatattatggtttagggtcctgtaaagtatcgagctgcacttccactcacgctgaccggcacacctgagcacggagtgagataagatagcatgaatattatatataggtgaatgaatgcttatttggatgtttggcacaactaacactaatatgtatatgttttaaagagtgttagtatagtgtagattattagtaggattacagtgttaccaacacgagtaccagggggtacgtcgtgcatgtggtacaacacttagtaattcctgggagtacaataatggctctaccaacacgagtacagggttgatactgtagtgcatttggtacagaggtcgtacttcccttaagaacgttcttatctattcggtgagctcaatttctgagctcagggcggcttaaacataaagccgagattgcatttcttatatgtatgtcttgcttatcttactgagtttgttgactcatcagtttgctaccttgtgtaggtaaaggaaaagtgaagttggaggaatagtgagatggagctcgacagagattgtacatatcgcggcagtgcaacatggagggtttcagtcttttgctattttgagtctgtgttttgagttgcatgttcacgtatgtgtaaaaaatatatatatgtgtatactagtaagatacttttaaatcatattttgatactcgggatcccgacccatatgtctataaagttataatatattaaaattatcttttgagcttagtaaattataaatacgggcgttacaatatagttagaaaaataatatagtgtaacaacaatatatattttttgaaaacactatatacatacttatcacttttattatatttttaaaaatatttttggagacgcatataaaaaagtttatagtac

SEQ ID NO: 229080 - DNA, 1455 bp, Cannabis indica
aaaagtagtatagtatttccaggggtcatatttgttcaattagtttttctatttaaatttgtatatttttaattaaaaaatagggtaaataataattatttaatatgtggttaaataatatatcgcaatgtatttttgagttagcacttaacagttaaactagtacgaattaataaaattataagaaaaagtactttttattatttgtatttgtttgagctataaatttgttaatctgattttttttaattgaactataacatttttcaacaaataaaagtaactaaattattatgtttgtaacaattaattatctaagttatttgtttcaaaaaaaaaaaaattaatctaagttattttttcgtacttaaacgtgttatgtgtatcaaactcaaatcacctcataacataaaaaaaaagagttttcaaaaaattaattgatgggaaagtataagtatcaaaatttataatccaatatgtaaaaaagtaaaaataataagttagtaaacatttaaactctgttgattccactttggattgcttgtttcagattgagaatgttaaactctgttagattcctcgcaacctcaatggtgcagctcactctcttgcagcgtgggctgcatccaatgaatgttttaagatttttctgttagggaagtggcatgtcactaaaaactttgagttttattaatgtcctattttgctttgaataaataatctgtttggataaaaaaaaaagttattgaaattttatttttatagattatatatatataatattttgaaatccgtatttaatatatggataagatagaatatgttccaaaaatgagatggtagtttcccaaattttcttactatataattttttattttttttataataggtaatttttcttatatttatgttaaaatgggaaaaacaatccaaatttttaagttgattttctgtacattaaaaaattgtataaaaagtaattcaaaatatgcattattttaacatttatgttttttttacaaataacatttattatttttttttacaaataattaatatttatgtttttttcagagctagattataggccagtttggcacagctctgttatgggaaaaaacaactgtagttgtactgtgagaaaaaacaactgcagcagagctgtagaaaaaagctgaactaagtgtttggtaaattataaatttcaaagtattgtgagttgttaagatctattataatgataatgataatgttataatctagtttattataatcacaaatacgtgtaaacttattttatttactattttatttttatatatttttaatttgtttaaatataaatttatatgcatttgataaaaataatttatagtatttttatattatgtaaaaacttattttatataatattttatttcttatatatttttaattttttttcaaatataaat

SEQ ID NO: 229081 - DNA, 570 bp, Cannabis indica
caatagaagaggaaaggaaaccagaccttagggcaggatgactaaatcaattctagaggcagagtcatacacaaaaataagacggatgctggagtattgaagccagagccttgaaagaaaacacctcctcccagtgactccagtaatcttgacaaggagatagaagaagtgcatccggtattggatgatagtggcaaaagcctttccactaaagcgaaaagagataaagctgaaaaaataagaccccgcagaaatgatctgaggaaccatatcaacgatcacgtttgcagaagagaatcctcaagtgataagactcaatgccttgtacgtaatgttgaagagtagatgaggatcattcaaaagatttctaggaaacaaagtggtaccgtatccgactctgaggaagaggatacagagccttgagtgaagagaattattgatgcaccattgccagagtgtttcaggatgccccatatggaactgtatgaaggatggaagtaccctagggaccatttgtccaaatacaatcgcatcatgctgttgggttttatgccctaaataaaactcttt

SEQ ID NO: 229082 - DNA, 2580 bp, Cannabis indica
caaataggatcgtctagttcctataaaacctatcactaaaataactcttgagagggatacgatcaagtgaagcgctaaattgagtcctaactcctaagttaggatcatgttgagaataattagtagcaagttcagatgtaatgtatcaacacgagactccttcctcatgtgtctcttcttagttatgttacatttgctttggcttggcttcacaatgcttaatgtacttctgcttggaagagcttaacttaaaatgatttccaggttgatgttgaaggctacgaaataaagcctgttgctgttggtacttctggcaatttacatgttggtcagagctgctttgccattggaaatccgtatggattcgagaacacgctaacaactggggtatatttatttagcatgatttctttagtcttatctttcagtttcaaatagtatctctagtacttcattctttcaaataatgcaggtggttagtggtttggggagggagataccttcacccaatggaggtgccattagaggagcaattcaaacagatgcagctattaatgctggtaatcattctatttaattacatcatcaatagattgaaccccttgttttaaaaaattgatttttgggcatatgttttgtaaaaatgttaaaattaggactctcaatatgattgctcttataagattgttgtccaattcaatttcaccattaacaattgaatataattacttatcattcttcaagtgaatttgtagatttcatatcaaagatatttaacaagttcataaacagggaattctggagggccattgattgattcatatgggcatgtgattggagtaaacactgcaactttcactcgtaaaggtacaaactttttgttaacataataaatgttggatctttaactacatttacattacattattacatgtttagaagtgttatttttgaaaagtgtttttattttttactttttgtagggacaggagtttcatctggtgttaactttgcaatacctgttgacacagttgttagaactgtaccttatcttattgtttatggaaccccttacagtaataggttttgaacattttatatatacttttatataaatatttcttctttgctcttacatgatgttaaaatttaatgggaacccaacaaatttaattcccaagtaaatacatgaatgtcatacctctttatgtaattgctaccaagctttagaactaggctatgtttggaagttggtatttgctggggaaagaagaaagtaagggaaaaaatgtggagaataaaagaaaaattaatctttgggaaattttcaaaaataccattttttttatttatatttataattttacggtttaaaatttttatttacaaaagtacgcatgtatatttttaaaattacaaaaatacattttgctcaggaaaaagcaagaaaacaacttaaaaacaacaagaaattaatttcacaataaatataaatcaaatataaaataattaaaaaataaatagattaacgacacctataatacaaatataaaaaagggatgattcataaaacactaatttttgtaaattttttatatttttacattcaaagttttttcaaagtttttttttatatatatatatttttatgttattctataaaaatacaagaaaacaataaaaaaaattacatgaaagcaacaataaaacaacatcaaaacaacataaaaataaagtgtttgagtttagttttcttgtacattcatattttttaaggtatatcatttttatgtcatatggaatacttgaataaaagaaagaacataaaaattaccactaagatattagttttaagtttttggtacatttgattttgcactgtggtatatatttattatgtgttatgatatattaagaaataaaaaaaaatagagagtggtatatattattttcaatttgtggtatgatgttttaaagtgtttggtgtagttatttaattattttacacaatggtatattatttttatgtgtaatagtatattaaaaaaactaaaaggtagtatattagtttaacattatggtatattattttaatgtgctatggtatataatgatcgaaagggggaaattaaaaaacgtgaaatattaatttaagtttgaggtatagttatatttcactagggaatattgtctttatgttcaattgtatatcatgaaggaaagaaaaagaaaaaaaaaagttgtggaatattaaattattttactgtattatatcaattttcattatagtatttttgcttatgattgtagtacatagtttttgtatgctactgtatatcttggagaaaaaatctcatttaatagtatattagtttaaagtagtatattcatattggtcataggtatatcgtttgtatatgatatggtatatcactacaagaaaactctttttcaatgactaaatttttagtcattaaaactcattaattagtcacccaaaattttttacgactaattatttttagtcgccatttagtcactgaaagtcggtcgtaaaaaaaaatttagtgactaaaatat

SEQ ID NO: 229083 - DNA, 981 bp, Cannabis indica
tccccttatctcttcttgatttgctcagaagaattttcaagatactataaaatgaagaagcattaggtaatcttcaaagtttacgtcttactagaagaaaaccttcagtctcacacttactttttgttgatgatagcttgttattttgtgagatcacaaatacatttgctttggcaattagacgagctttagacatatatcactaagcttcaggacaaatgcttaacaatcaaaaatcgattatgtctttctctcaaaaaaactccaattacaacgcaaaactttttccatctgattttaaatatgataactagtgagtgtcatgatcgttatcttgaattgtcttcttattcaggccaagacaaaaaggagttattcagaaacatcaaagagcgtgttcagaagttgatgcatacttggaatgaaaaattgttctctattagtggaaaagaagttttacttaaagtagtagttcagtcaatcttaactttgttatgagttgtttctatttaacaaagaccttctgtcaacaattggaaagtatgatggaaaatttctcgtggggatcaaataaagatggcacaaaaatatattggaaaagataaaaattgctatgtaaattcaaatttgagggtggtatgggattttaatctttcgtacattacaagcaaacattcttagttaaacaagcttggaaaatctttgaagtgccaaattctttgttgagccagttattaaagtgcaagtacttttttaacaattcttttttggaagcaaggctaagccatacaccatcacttacatggcaaagtatttattaggtggtgagcttcttgtacaaggtcttatatagatacaaagttgggtatagttatgaatacctggctatacagagtttaagcctattcttacattgggccagtgtaacgccctgtccaacagggacgccacgtgtgtgtactttatttaaaataccaataa

SEQ ID NO: 229084 - DNA, 970 bp, Cannabis indica
gttttttttttttttttggtactttttcactttatctcttaagtgtaagggtacttcattagtttctccattttatttttcagaatattttattaaaagtttactttatttattttatctcacatttttttatattacaatgtacatcatcttctttatttatctatctattttatttagattttatattttatttatatgaataaaaaagttaaaaatattaaatgagaaaatagaaataatgagagagaaactattaaaatattatttaatgaataaatagtgcttctttacatttaaataagcactattcataatgtaataatttgagctattttaactcacttgatggagccttattttaacacattttctttatattaatttttagaataattacataaggcactattttttgtaaaatatttatatttttacgttcaaagaatgttttctttacatttttacggttttccaaaaaataacacgaaaacaacataaaatcaacaagaaaacaacataaaagtaacatcaaaataacaacaaaaaataacatacatataacaaaaaattaacaacaaatgaacaaaatttcaacataaaaagaccatattttatgtaaataaaattaaaaaaatcgtaaaatgtttaaaattccgtgaaaccgtatttttgttgtttttttattgtttgtgtgcatttgtgaaattaacccttaatttttttagctgttttgaagagattgttataaatactctaacacaaccaattcaaaatagacaaaatagtctccatttatttttaagattatttagtaatgaaatcattacattacttgtagggaactaaaattatagtagaataatattactaagattaaaattgcaaaacaaacaaataaatgcttttagttgtgggattattttatatttactaaaaaatggaaaaaaaaaaaaaatatacttatgta

SEQ ID NO: 229085 - DNA, 704 bp, Cannabis indica
tccatgtatacttcttccacaaggtcgccgttaagaaatgcattctttacgtcaagctggagtaaaggccattcattgttgataacaatagataagagaactcgaatgttgttcaacttagcaataggagcaaatgtctctcggtaattaatgccatacgattgggtgaattctttagccactaatcgggctttgaatctttcaatgctcccatcagccttatacttgaccaagaatatccatttacaaccaactgtgtgtttgccatttggcagatctgtgatgatccatgttttattattttcaagtgattttatattctccattgtggcaacattccaattgggatcctgtagagcttcctgaaccgaatttggaatctcaacttgatctagagtggtgatagaagctctataggtaagagataagcttgagtagctcaaatagttgtgaatgggatgttgagtgcaagagtgaacacctttcttgagagcaatgggaatgcttagatcatcagacacatcttcttccacaacaggttcaactcgagcatcttcctgtgtttgttcaagaatgaatggaatcggattatattcatgacattgctgagtttttgtggtagcttgttcaatgttggctagatttttcttttccttgggtaaacccaaatttctttgttttggatgtggacatgagtttttggc

SEQ ID NO: 229086 - DNA, 1305 bp, Cannabis indica
ttttttttttttttggttcttggtgagttccctccctactccctagtgatagtgagttttggtactttgtgaaaaatcattttttttattttaattttatatctctctggctgcctcaacaacggacctcacctcacctccattatcatacttctcttgactgttgtctgttgtttgtttgttgggcgcctcttcttcccttctatcctaaaattaattaattaattaatacgtaacattcaaccaaaaaaataattaattaatagtaatcatacccaaatcattctcctaactgaactggtttgttttgacgtcatatttcacgtttttttaatagtcacaccaatgttaatttttagtggaccaattttataactctatttattttcttcaaagaattataactcacccaatttaaagttcgggttgctaaagtttaagtgcaacccgccaaatttaaaaaaaaaaaaattgtaaaccgaccaacgatttgggcaatttggtcgggttaacccgcccaaaccagtcaaactttttttttgggtttaaattcaataaaattaaaaaataaattaaaaatatcaaactctaccaaagcacaacacaatatatatgattttgaaactaacaattaagtatataattttatattattatatatttaatcatttatgttatatataataaaaactaaaaagtaataaaaaaaaataaaaaaaaaaaaaaagaagccaaagtcgggttggtcgggttattcggtttaattaggcgagttggacctattttcaacccgccacattaacagattgggcggtttgtaattttttcgggttatttcggtttgtaatttttatcagttttttcggttcggtttgggcggtttacaaatttttttgtacagccctaccaattagggggtgttgaataaaatttacaaaccaccccatccgaataaattgttcaaatcaaactgaataaattgacaaaaaaatacaacccgaaataatacaatgaaaattcaaattgcctaatgaatatattcagtggcttacaaattattctaaaccccccaattaacccgaataaaccgattaatatattttttttaatcaaagtgtatataatatattacataaatcatatttattagttaaactattttgtatttaaagtttggacattttagtgtttaccttaaaatttagactttataattaataatttttattgtatttagatattgaagttgaagtttaaaatctatacaatattattacttttttttattattttatttaattattt

SEQ ID NO: 229087 - DNA, 1959 bp, Cannabis indica
aactgaatgttacgtggtggccccagcccacgacagttccagcttagaattttcataatgtctggcaagcccctgaaccaaggcccaccactaaagagttttttggaagtccactaccaccttgggcctgtcccacgtgacccactgtctcctctccaccaacctttcttttttattatcataaataaccacctcagaattactttcattcaatatatccttatccttattcttgccatatagatatattgacttctccctctttacttctcgaaattgcctcctcctgatcaccctccatcctacaattaagcatatcataatcctcatcattattcagcaaatttccatgaccataattagtggccacaccaactggaagatttgtttccatattcggctggcatgaagtttgtccaggtacattgtgatcggagcttccctccagcttccaacctttgttcctcagccaccttgctccgagattcttgtacgatctttgtggctgagcaatcataaactcaccataaggtttcgcaatttgatctaaaggctgctgaaacaatctactgcaaaacttgtcggaatgcccgattacacgacaaatgaaacaaaatgtaggcactctttcgtacttgaaatgaacccagaaccagctaccattttcgtgtgttaactttagccttcttctcaacggcttcctaatgtccaaggtaacccgcacccgaacgtaatccctccaaacacctacgaaattcttaggatcattctcaataaattttccaagtgtatttccaacccccttacagtcacttctttcatacaacctggtttcacatcatgaatttgaacccatatatcaagatgatttaactgaattaaacttggatcccctcccaccggcaaacgttgaatgattaactgcatccgatcgaacgtccatggactaccattaatgactctttgaatatccacttcatggtagaattgaaataagaaccggttttcctcaagtttttttacaaacattcccattcccggttgccacaacgaggctaaaatgttctgcattttatcgaaatctatcatacaattagacaaaaatctaccaactaggcaccatctgtcatcaatcccctcttcctccccctcatgcccgactgttaactctgatagctcttcctcttcaatctgaaaactgaatacatcctccctgcctccaccacctaccccacttgaactagccataatcgatcaaacacgaagcaaagcacactcttccacagaaaaaaaccagaacagaacaaaactcccacaccatgtcaatagacaggacctcttaagtcaaagcatatggaactaaagtatagctgttagttagtagtttattaattttttaagataaatactattttgaatcatgtgttcaataaaagttattgactgaactatctgttttgttaaatgacaattctcctgtaaatagatccttgcttaattttgattagatttaaacttgataataatgtgacctggaggtatttcgacaagactgattatatttttccgtatattcgtgctaaaaattagcttcaagttagttttttttgtttaaaaaaaaaagcttcaagttagttattttaaaagaagtattgaaatttgagttagtctattttatactatttgaaaaacataaagtctacattattatttaacaaaaattatatttaataacttttacaaaatacctagttcaaagtagtatttatactaatacaataatttaattagaatatattgttataatgttaaaatttcaataagattgtttaaactttattagaaaaaaaaaattattatttatttgataatagtaatagtgtaaactactagtaccgcactatttttgcagagtaatttttcataattctttcagatgcataaacctggtatagcctt

SEQ ID NO: 229088 - DNA, 764 bp, Cannabis indica
ttttagtttcgcggtgcggatgttgtttgggaattttgaaaaactgtaagtgcaggttgtttaaaaaaaaatggtcaatacaacactacccgcaccacgaacatccctaaataacacaatgtttcgatgaagcaatgtattgtattaattattaagaccaaaatttttaatacaatgtaagttctattatttaatacataaaaaaatagtctgtattagcttgtgttattatatttaccaaggattcggggtcaaccctaatctctgacccgaactcgaacccgggacctgaccttgacctgggacccagactcaaacccggactcggaccccgtacctcagacctaaacctggacccgggaccaggacccagacctggactcggacccggacccagacccagacccaaactcagactcggacccagacccagacccagactcggacccggacccaggactcaggaccaagacttggacccgacccaacccgtagtaaattttggggtcgagtgtaattaaaatatattataactttacacaatctattaatacaagccaataccaaatatagtattgtattaaataatactaatatcatacaatacaattcaacataatacaatgcaatccaatacaatgcagcgtaccaaatgagccctaaaaggattattcaacttctccctcttacaggacttcactattcttcttcttcttcactatttccctcaaaattttccttgaggttttgaattttttagagaa

SEQ ID NO: 229089 - DNA, 3707 bp, Cannabis indica
aggctgttgctgcatttgtggtgtctgctgcatctgtggtgtctgttgcatcgttggcatctggtgcataaaaggttgttgatacatttgcagtggttgttgttgcatatgttgagtttgatgcatttgcggtgtatgttgcatataatttatctgcaactgcgacatcggcgatgacaaccaaggaaaaggagacatttgctgaggtgatgacaaaggatacataaatggaataggacactgttgcgcttggtgatattggaaattcccaggctgtgaagatgaagcgaacccatctccagacatttgaggttgaaacgtctgtgttggaggcattggcattccgaacagctcctcttcagtaggtagacgaacatcaggtcccaacctttgagacatccacaacattgttcttgtcaacttttcaaattgacgttccactctaggatccataggcatatcttgagtaggagtaagttgtgtgcgtcgcgatgaagatttcccctttaattttctccccactcctcgattatgattatgcctttcaccaaatacttcattgtgtgcactcatttcaatctcctcaacaggtccagcgtcgggagtattggcttgtttttcataagttgaaaccaactcgccctatttttagaacataagttagaaagcattgtaaacatgcataaaatagcattttatttagaacatatgaataattacttacatatctttgtgcagccaattaattaacatatgtatttattctttttgaggtatgaacatcatttcaagtctcaatataacccttattcttcttagagaaattaagaaaaaagtaaaaacaaaaaaaatgtgcaattaataacttaattaaataaatagtctaacttactttttcaaaacgcctcttagccatagattttgatccttgtgttgtagggtattattgcatcatttttttattttctgcgtttattttataacgagcaataaactccggactagtgaaaatatgacaaataggaagccattcctctggagtaagatcactaggcgggtgggcaacaacattatcaaaatctacaggacttttatagtgttttttgaaatgtacatgccttaacaactttcgtttcttatatatatctgctatttcagcacatgcaatatttgtaattatctcagagtgttcattgttgtcgatatcataataatactagattaacaggaaaaaagaaacaagttagcaacttaaaaattgtaagtaagaaaaaaatttaatataattttttttacccgaagtctgttgaagactgagtcacgatgcatccttggcacattttcccaactacaataatgtcttgggacgtgaattccaatctctctcccaatcaaacgagaaaaagcgtcactctctagtccaactattttaccagcacgaatgtcgcacacaagaggtagcggcactgaagattttttcctcctatcctctaagtcattaaggacattacaaccacgtttcctctttctcgaagaattagaaatctcattttcagcttctaaagcttcatcttcagaagcaaattcacacttagtggggatcctagcaggatctggtgggtcctcacccccaccatcacctccatagtatctagcaacatctgcagacattatactaaaaatataccattttattaaattgtaactataaatatattacatattatactaaaaaacaataataaggtacttcaaaatgaaatatccattcatataacacatctttaaaatgaataatataactaaatataatggtcactatatccatcatgactaatcaaatttgagtttattttcttattacaatttgaacagcataataactatacttgaacatttttgaaaattctaaacaaagaaatagcaattaaaacaatctacaagaataacaaaataccatttcacaatacatataacttccatccacccgatcgcacaatttgagtagcataacaactataattattggacatttccgaaaattttaaacaaagaaataatctacaagaataacagaataacatttcacaatacatataattactacttatctgactacagtacatgtattcacagaacctacttcattacagatgaatatctaagatattcaaactcatctaacatgcatattcaccatagtatcactagtcacaaaacttattttactccaaatgaatatctaagatattcaaactcttctaatatgcatgtatatatatatattaataattaaaaataactaatactaacctttaaaatgcaagttttttccaaagatagagaacaccgaaaagagagactaacttctacaaagaaaatcatttcaaaaatagttagtaacatatttacatattaagcaaacatatatatatatacaaattcaaatacacaaaatataaacaaattaacaaaaaaaattatatagctttaaataaacatcaaactcatatacattcaaaaactcatcatcatatatatatatatatatatataaatatattcacatttcttttctcttgactttactaaaaaagccaagacccaatccaaccaaaaacaaaaacaaaaacaaacagattcatacctaaacaaattattaaagcaaagttcaaataaaattgcaaatatcatattttcattacatgttttagaaataaaactgaatatatatagacacacatacacaagtcaatctaaaatataatctcaacatcagaagaaacttatgcaaaattataaaaaattccagaaaaattctcataaatttacatgtaattggagaaattttaattaacaaaaatgaaatcaaaactaaataaaacatcagatatagattttctatctatacatatgcatattaaaaatttaagtactcttattatgtttttgaacaaattaaatataaactaaatccattgaacatagaaataaaacttaactttcacccaatcagagaaaaccctaaatataaactaaatccccaattcagattaagtttaagaacaatttaacgaatccccaaattagatgaagaaaaactaatttagttcttgacccaaatcataataaacacataaataatcatcacacctgcgatttgggaaggactgagccgacgacggtgtcgttagagagtagggatttcagaagaagaagaagaattgaaatggaatgctcctcgaatctggttttattcttacaagggggaaattttcggcccgacctcgtcgtgccctttgtcgtgcccatctactcagttggcacgccacgtcagagcatcgggcccgatgctgtcgtgcccattctctcaattggcacgccatgtcagagcatcggggccgatgctgtcgtgcctaactgcataagcgggaaaattcccgcctaagaaacgttcggatttcgaaactattggggaacgacattgtcgtgcccaatgaccggaaagtcgcgcccatgcatccaaaattaaaaagggaaaaaaaacccaaaggacacttcgactttcgagtccaggttggttgtgtatcagttcagaacgaaattgatagatatatgcactttgataatgctcgagtgaatattgattattattttattatgtttaatatcatgggcatcaatgggaaattctttacgtgaaagaa

SEQ ID NO: 229090 - DNA, 2148 bp, Cannabis indica
ttttgaaaaaaaaaataattaaacttatgagggtaacctactattatatactagtatatataaacttatgagttatcagaccttatccaaaaaaaataaattattaagccttgttgtaaggatctatagtatttttcagaattattaaaaatatttttatatatttttaaaaagaatatttttctttcggctctaaactcagtaagttctaattaagtttaaccggcctaaataactttctctgaaatgctcaagaaaatataaatattgagtattatatatatttaattaatgtaatttagaatatatgaaagttttttaaatggtaaatatatgaaaattattattaattatcttttagattgtatcaataacaatatatattatatatgattcgtatatatattatgtaccaaattaaagtacatccttttttcatatttacatcaaaaatcaatttattaaattttcgtatatatcaagtcaaaataaaaatatattattaaatattagttattataataagttgtttaatttattaagtattctgttgattcaataagacaataatagcattgttactgtctggaaaataatcacatgacaaacaacatatatttatacatatatataaaaatatataagcatataatttcctgcatgttgtcgattaaatggccaagtaaatatggttttttgtcaactataataacaaaagagatgaacatttataaaaaaaggctgcaaataattaatatcagtgtttcctggtgtttctattaaaacataaaagggtctgaatctacaaataataatgtacaatttatattatattgataatcaattctcaaattatcaatatatatatatatatatatattcaggggttatgtttttgctgttgtctaagcctcaggttttccctgtttcgagcaatatttgtttgtagcaataaccccatgtgattattgttgaccttattttgtaccaaataaatatataaatatatatatttcttttatgttaaggcacatgatcacatgaagctcaaaaaatccaaagaaatattcatatatagaaaaacagagaaagaaaaaaaaaataaagggaatgtcaacaaaatattctataatatatataaatgatataaattatcaaaaatgtctaggtgcggcagacacatacatatataaatatatatatatagagagagagagacgtatacaagtatataatttataatatatatatatatatatatatatataacatggacattttgatcctaattaaagtacatatacagatacatatagtccaatacttgactaaagataaggtggatcacctaattatataattatatatatatgggaatgagaatgggatcatgtattgatttattatatatatatttacattattttggatgatattattaaattcaattactgtatgattggaacataaatttagaaaacaaattacttataagcctaaaaaaagtcatggccatcgttcgtcacctcccataaccatgcatatatagtactcataatttgtacgtcaaccgccccactcctatacatcttctttctcctctttctttacctttatacatacacatatatatatatatatttatataatgtgtgtgattgttacatgaaagatagtatgatacaattgaacagtgagaaccgaaagaataaaataatctaaaattccttttttttcttctttctttgtaataaaattctaaattcttggtcattttggggacgtaattttcacccactttttcacatataaattaatagtagtgcttggatcgatatatatatatatatatatatattcatataaaattgtcaatatataattgtaacgaatcaaagcaaaagatatgaaatgaaagtatacgtatatcataattaagttcgtgaacagttacaaaaatatatgtatacatcatgacttgaggaaatacggaggaatacaaataaaaataaaatctaagagaactagcacacattagactttagcttcgaaattttttcagcaataaaaaaataagtcaaaggcataggcgtctcttaatataaaaaaaaaaatactctaataacttggaaaaaaatcgatatctat

SEQ ID NO: 229091 - DNA, 560 bp, Cannabis indica
ggtcttgtaagtgtaagatattgaagagctcctaaggtacttctataaagtgtagggtctgaaaaaggatcaccaatggacaaagatagtttgattgctgaaatggtggggctaggacttggcttggctccatccattttgactttgctaagaatatcaactatgtatttcgattgagttaagtgcattccaactgaagttctgtttactttgactcccagaaaataatgaaggggtccgagatctttgacatcgaattcattgttgagatctttaataaggcttgaaataaacgatttgtttggacctgtgattagtatatcgtcgacatacacaagcagtaatatttggttgccaccagaatcagaaaatatagggaattatcaaacctggaacaagagaaacctttgctgcagagagtagatttaagcttttcattccaagctctaggagcttgtttaagcccgtaaatagccttatgcaatttgcatacatgattaggatagtttgaatcgaaaaaaccaggggttgagtcataaaaactgattctttgagtgtcc

SEQ ID NO: 229092 - DNA, 1079 bp, Cannabis indica
aaatattataaagatttttatatgttatataaaacaaatttagttaaaaacttaatgacatcccattcttctttttccagttaatgcatatacatgtaatttaataggttttaaagaaaaggtaaaaaaaaattgtattttagttaataaaatataaaaaaaaaaaataagagaaccaagaagagaatcaataatattatttttagttaataaaaaattaaacaaatgagagaattaagaagagaaccaatagaattatttttagttaataaaaattaaaaaaaaggagagaattaaggagagaacaaataatattatttagagagattttataacgagagaattaaagagagaattatttagagaaattttaaaatgtcatatcaccgtttcatatctctctattaatcactactaaatcaatactctatgctaattgataacatcatatatataaatatatatataaaataaattaatcattttatacactaagtggatgatatgcaacatattattcacaaaataatcgagagaactacacataaacaaaaaagaaatctacaaaattatggactctgtactaaaaataataatcaatggcacttctatattgaagttatgtgtatcatatttgaaaatttcatcttattgtcaagagagtagatgtttcttttgaagcaataggcaataaataataaaataatataaacacaaatcaatacatatataaaaaatttaattgttggtactaaaaaaaatatgtgtaatcaaaatattgaattattatatactaatcaaaatgagttgagtaaatatgaatagcaagaacttacagaacaattaggaattatatatacatttaggtataatcaagtataaatatatgtagatttgttataaaagaaaaaagctacgttttttttagtaaaaaaacttagaaagaattattaattaatataattattaataataaaatgataaaaatataagtaaataaataaatatttataaacctaataaaaaattaaaaaagaaaaaaaaattagaggagaaaagagataaagctatttgaagtg

SEQ ID NO: 229093 - DNA, 1832 bp, Cannabis indica
ataaatatataaatgatcacatgaaccaaataacatactaaataagtaataaaaataaatactgtttctttattaataattgaatagaaaaaattacattgaaatagagttttatttagggcacaaagcccaacatattctactatgatcgcaaaataaaaaattgtacaataattatgccctatgtataagtatattgattatggctgttaaatatgttttcccatagttcaggttatttatccatatataacaagatgttagatattgatctagcatcatatcctaaacgggaaggcattcatgattctcgtcaacttttaaagacagtagtgaaattagatagagaagatgttgagggcaaagagatgaatacactagaccaatgggaattattctaccaaacatattcaaagtggaaaggatttagtgtttggattgaaaagacaagatacaggaaagaccttgttaacattagacgctttgtttgttcaaaataaattttttttagacatgctagatcgaaaaaaacgcccaaagaaaatcacatgcgtaggctgcaaagctagaatacgtgtcaataacctggtgggaattaataagtggatatgcaccatttttattgctactcataatcacgaacgagctacccttgattcaatttcattcctacactcacaccgtgaggtccctatgatgtggctgaacacgtaatgatcatgaacaaatgcggggtgaagactacatctattataacacatcttgccctccaagtagaaggctacaaaaatctcaattttcaaaagagagatgtatacaacaacttaaaaattaagaaatgaacaagttttgtcaagtgatgttgagggcgcattggggtacttggactgcctttggacaaaagatctccaattttatggaaactacaagattggtgaccaaaatcgattagcattgctttttagggctgatgggaacaatagaagagactacatgcttttggtgatgttatggcttttgattcaacatacatgacaaacaaatataacaagccattgacaattcttgtcggtgtcaaccaccattatgagacttgtgtttttggcactacaattctcttggatgagacaggagatgcattttgtgttaagaaaatagattagttaattactgttaattaattagttaatcctgtatttctagtttttgagtttgttacattgtttttagtgtttgcctttttctgttttgagttggtctcccttttaccaacactagggccacatgtatttctcctattagtgcttgtaatccctctttagagtatatatagaaaatgatatctcagcctccatttgagctgagaaaacctttaccatttctgtgtaaaattcaacttcgtatcagagccaagtaaaagcctgcccatgtcgtcgcactctcagactcctcaggcaaccactacggctgcagcaggtgctgcaagctcaccgtacttatttctcaacagaactacacccaaccgttcagtagtctgaattaaccattccccttaaagcttgataggaaaaactatgtccttaaaacaatggtgtccacagtgatacgtggtcatcgtctcgatggatttgtaaatggaactcgtccatgtccaccagagtttacacagctccaatcaccactgaaggagaaacagggtttggtgtaaccattaacccagatttcgaacactagattgttagtgatcagctactaatgggatggttatatagttcaatgacagagggaattgctaccgaggatatgggttgtgaaacagctgcagcactgtg

SEQ ID NO: 229094 - DNA, 1704 bp, Cannabis indica
aatccactgaataattcttcatcctatcacataaaaaaataaaaaaatatacacacatacaacaaactagaaatgcccttttagtacaaaagtcggagagtaccaaattctatatgaaaatctgaaatgtgaaatcaaagaatttgttttaaaaaggttctccaagtgctaatctggtttgaaataataataaaaaaaatcagtgaacaccagcatcattaaatttgtttgaaaaaggttcatcaagtgctaaagggtcattaaatttgtcataaaaaagttcctctagtgctaaagtgaatataatctccacacattgattttgaagcagtatttaagaaaatttaacctttcaactttgatatataccttatttgcacaacacttgttcatttatatcttttcacctcaaaaatatgtttagctatagctatatataatatcatctggctatatatatttagaataattaagccatcttgtttcaattggttaatacatgaactcatgaattctaattaagaagagtggcacatgagatatagtgaaaatgatgatgtcatcaaatccaaatccttgactctcaattaattctatatgatcaacagaaacttattaaaaacaatgtatttattacattatatgacccaattaaaaacactaataatgatcaacagttctctgattatttacatatatattaatcagatattaatacatatagatatcaatttctaaattctcaaaattaagaaatatgtatatatatgacaaaacaatcccactaagaaattagaccaaaaattagaggagtcgtagtgatggatgatcagccgaattggtgtttgtttttcattgaagtgtagatagaaggaataacagggtgtccagcaaagcaaactatgtacaacctcacagcagtaggcaatccactcactttagccaaactccctctttcatgaaacccaactccccgaaaaacaccaatacacaagattgaacaaagaattataagacaagaaaacacaccagttgcagacacatatgacagtatacttaactcagttaacatcatagaaggtaagatcaccaaagcagtgatcaacacaaatgattgtcttccctcaataactaataaatctctaatcttaatcataaatatatatatatatatatattttctcccttccctttctttcattcaagttatatattttctcttttgttacttgggaagctctcacgagcgagtgaaagaggccatagtggtcaccccatccgaggcgaccccaacttgctttcttccactttcagccaatgactcccaacccttcctccaattccccattgagtatctcttaatctacaaacctaacaccagactgggcctcgaacatgatgggtccactttggcttgtcttcttaagtccgccctgtctaaggccttggtcccttactaccctcttgccggaagagtacaaaccaggcccgacggttcgggccagctcgaggtcgtttgtcgggaagaaggtgcaatcttcatcgaggccatacggacaattacttactactactactcaaaaatacgaagattcgaatttattagactagtcaaaactagattacaacataaaacaatggcggtaccaccaaaccagagaatggagagagagagagagagacttacctctggcaacgctacca

SEQ ID NO: 229095 - DNA, 2124 bp, Cannabis indica
agataagtaatgtcctctactaaatcatgaaaagcagttacaaaaggagtagaagacatagaattaattgcatttgccagcaaaagggaatcggtttcaatcaagtgaattgggagctggtgttgaatggcccaaattaaactgtgaaaaagggcagcagcttccatttcctttggagagaagaaaccaggaaacggcttagaaaaaccagccacaacaccccccatatgatctctaattaaagcaccatagcctaatgttccggcagcctgatcgcacgcagcatccacatttaatttatacagcccagcaggaggagaacgccatgtttgaggagctctagaagcagtaggaacagaggggggagtcgaaagatgttcctgggatgaagcaccagcagccacctgttttgaagaagtagctttgtgaaactgatccaaataagaagcagaataagaacacaaaacatcgaccggttttggcttagaaccatgagtctctttgttcctttcagaccatatattccacatcaaacaaactatctgctctaattccaaatcattgtgagcagctgcaatgtaagagaagatatcataacccttagcattacccatgttcggcatataaattttgtattggaattgttgccaaacagccttagcccttttacacctaaagatagcatggccagatgttacccaactgcattgacagagagaacaagcattggaagaactgatcttcctatgcgcaagattaacagccgtgggaagtgcttcattaatgaatcgccacaaaaaaatcttcagttttttaggcagcctcaaagaccacattcgattccaccattgtcgattagtggaagaagaggaatgttcatgttgagtttccaaactagcagccaattggtatcctgattttacagaataaattcttgtatctgaatgttgccatatcaacttatcctctctaggaaaaggactcaaaggaatggaaagaatgcgctggatatcaatgtcaccaaaatgggtctgaagaatccttaaatcccaagtccaatgtatagagatatagtgctcaaccgtaaaagaaggatctcccgtataagtgaatggtgtcatagttgtattcccaggtaaccaaggatccgaggcacaatggacatttctcccagatccaatcttccatctcaaacctttaacaacaagtctctaccatcacatatactttgccatgttaaagatggtaagacaccttttttagccgatagaaaatcaccatttttgaagtaatgagcttgaagaaccgtagctagtaaagagtttggattatccagaattttccatgcttgcttagctaaaagagcttggttgaaatgcataaaagagcggaaacccataccaccatcagctttagagaacacataaatttccatttcttccaatggatcttagaattatcagtgtttgaaccccaccaaaagttcgccatcatagattccaactgggcacaaaactttttaggaagactgaagcaactcattgcatatgtagggatagattgcaccactgccttaagaagaacttctctacctccaatgaaaataatttagaatgccactggttcatcaatttccaaatacgatctttgatgttactgaaaagctcttttttgtctttgcccgcataagaaggaagaccaagatatttttcatgaagagaacaaataggcataccaaggacatgatgaaaccggtctttaactgcagaagttgtgctgggcgagaatgacatcaccgttttttcagtattaagaagttgtcctgaagcgcgatggtaataatcaagagctctattaacagcttgacaagaatcctcagttgcttgacaaaacagcaaactatcatctgcaaacagaaggtgagaaacagctggagcacccctagctatagacaaaaccttcaagtttcctaacctttcttcatgctttaaaagagctgagagtccttctgagcaaataagaaataaatatggtcataacggatcaccttggcgaagaccacgctttggaacaaccaatcctctgatagagccatttagattaaaagaaagtttcgcagaggac

SEQ ID NO: 229096 - DNA, 1532 bp, Cannabis indica
tctctatcttcatcaaaaccttctggcatcttcatgtaaatgatctcatctagtttttcatggagaaaggcaatctttacatccatttgctcaatttctagatactcagaggctgccttggccattattgttgtaatatcccaaaaaatataatgatatttaattgggcatatttattaattacggaaattttattggaatatgctggtatcgtggatactatttttggaatagtatgttttcgggtctggcgactgtgaaaacttaacggtgtagtcagaaatgtcacgacattagagggtggactgtattggaagtaatccagattagtttaaaattttaagttgtcagttttgtggaatagttaggtattacctaagttaccctaggatatgattggatttatgtgtaattttgaggacaaaatagtagtgtgttaggttgactttagggaatttgagttatgttttggattattattattattatattattattattattatgaggcataggctaagataagtattagaaataagaaggaaaaattagaaaaatctatcacacctctctctcgtttatttcggctcaaggaactagaagaagtataggggaaattcaatcacttcaagctatttttcttggaagaaattatagcaatatgtgttacatagcctgaggtaagtttttagtagctttttctttagttttccatgagttttgatatgatttatggttagggttttatggttttgaactgtggtattaagctaagtttagagaatgtttttagggttagattaagttcttttagataaattgtgtggctgttagaagtagagtttgcaaattttggctgtaaaaacttaaatcttagtttttgcagtatgatttgtataatttgatgggttgtggtgaattgatagaatggatatgttatttatgtgatattgagttattttggaattatttatcagatttgggaaggttttggttcgaatttgggggagaaagcccttaatttttctagcctgccagaactggtcgaccggttagttctggtgcaccaaaaacggtcgaccggttgccctgcaggggatactatcgggtttttcttcaaatttttttttggctcgaggtgatacctagtacctgttttaggttatttttgtgttgtataacctattttaggattgttggagaataggttatgtttggtttcggaattagggttttgtttctcgaattatggtttaaggaatttattgaattttggttgtcgtgacataggactgggatcgctcagcttgtattccactcaggtcgtcccgcacacttgaattctagactgaggtaagaaaagtgctatgcatcacttagggttaagtgattaacaattgtgtgattatagtctcgattatgatcgaaaacttgaatatatgtttgttaagcctcggttatgaccgagggttggaaacgatcattaccgttacgagtaattactcctaaaaccgcagataggtttcttactt

SEQ ID NO: 229097 - DNA, 3040 bp, Cannabis indica
attttttttttacatttatatgagattttttatgtcatattttttgtgaaaaaatgtaaattttatatttttaaggttaattaggatttttgcctcttgaattttgacatgtatcaaatcatctcctgaactttcaaggtcattaaaaatatctcctgaactattaagattgttggatttaaggacttctgttaactgttagttgtaagagtagtttttagcttgtataaatatttatataaatcatcatctcactatagaatctaccctttcagtttcaattcttttctcaatgtttaagaactcataattaacaacctagaaactcaattaatttgatttcgctctaaaaaaagattttgctctattattgattgttttgttaggggtagtggttatagttacattcattctgtgtgtgctgataggaggagggcacatcctacactgattgactatattgccaatgacaatcaacaagtgtaatttgagcaataaaagtaaatataactttaatttcttatacctataatttaatatttttaatatacaaaaatattattaacttgtaatgggtctgtttgtttgttatttggattgtatagcttttctcatataatttgactggttattgttaatttttatctttcttttaatatataaatttttatatttaatatttttttattactgactaagaagtaagcatataatcagggttgtctcaatctttaagagagctttaggggcaaactttttaaatgggggtcataaaaactactttaaacaattaaactatatatatactatatataatgggcacctataaatatgtattaaaataaataagacaaaaagtattaaattgaactattttttttaagatacaccttttggacctaatcagacctctttgggctgggaaatagtgactcttgttgccccactcttcagctggcagcataatggaaagagacttacaaaaaaaaaaaaagaagcataatggagagagagagagattgagaaaaaaaatggcgaaatgaagagaagcatataagatttcttaaatgctccatcattgatgagtaaaatttaattttttaatagttagtagtattagtccaagaaaagagaccactattctaaattatgctttattaattaattttatgtaccaaataagtaaattgatctattccctttagtacaacttaatggttttcctatattgttatgacaattaatttttctattaactattagttgttagagtagttttcggcttgtataaatattttatataaatcatcatctcactatggaatctactcctttagtttgaattcttctctcaatgtctaaaaatttttaattaacaacttagaaactcagtttaatttgaattttatgtatttttaaatataaatttaattataattatttttgtgacatattttgaaatggacttaaacggtaatacctcgtggatttgtgagggtccttttaaaaagagttttcttaatttattattgactattttgttagcggtaatagttatagttacaggcatcttgtgtgttgatagttatttgccacacgtacaaatctaaccctatgaatagcaggagggtacatcctgcaccggttgacgatattgccaatgacaatcaccaagtgtaatctttaatcaatatattaaagttatgaaatctttaatcaatagttgttagtataggtcactaatgcccgttcttcggtgcaaataatgttggtttggattacggatgtaataagacatcgaagtgaatgtactatatataatagagattatatatgatgaggaccaatatgaataaagttgtctttatcaacatgctgtttatcataaagacatgattcatatcataacgatgatcaatagtagatcgacctaaatcatgagttatcatgaactcttgttcatgttattagtttctttgattcactcattaaggtttctcagagaatatgattattacaacttctctttagggaatctaataacatggatgactgggggcatgatgtacaattatagaatcctaacttttctaacggatcgaatgttggttctctttaagtgttaattctggaactgaaatattgtgcacaaattcagatgggatcttgaattatacttctactagtgaattaatggacctaaaggtaaagaaataattagaaaaggtaaattggtattttggccaaaataattacgaactaaaatatagaggactaatcgctgcaattgattatagcaattgacactacagttaaactctaaaatataattctataattactgagagtgcaattctatatttatagtggagtaatcatggaattattaaacaagagattatttggttgatgagacttaataaataatctagtttattggagcttaaaattataggtccatggtccccgaatcaccaccttgaaacactgtcaagggtagggataaagagttcgaagaaaatctattttgaattggaaaaatagtaattatttatttttgtaagaaataaataattttttcaaattaaataaatatgggaaaagatagaattgttaaggcaaaatttgtcaaaacaagatttgttaagacaaaagttgtcaggacaagacaccaaccttgtcctaaacaacaaggtaggcgcctagcattatcctgtccccattagatttgtctttttgggtaaattaaatatttaattaattcagttagatagatatctaatttaaaaagtggttaaagatatttcaagattgttgagatattctctcaagtagttgagagattccctcataaatatcagtaaccgaatttagttatagatatttatttatttaaataattaaataatgatttaattaaagagatttaactactataaataggagcctgatttgggaaatcaaaaaatgcttttatacaacatatttcaaattctatagagagaaaatgcaaactatttttcctctctattgttcttgc

SEQ ID NO: 229098 - DNA, 1857 bp, Cannabis indica
taaaaataccaataattagtgctaattgcctttactaatccatattctaaagtgtggtcattacatgcatgtttcttcttaaaccctccttaagatttgttctttactttggcttgggctttggctgtttctttcaagaccctgggtgcgttttggcattcgttgtttgtttttgtttttacctttaatttatatatattttttgtaattgcttagcatcttaagttggaatgcccgtattctagggaatctacaagcatcatgtaatttatctcttcttgttaagaaatataaacttgtcattttgtttattatggaatataagctttgctctggttctaataatagtgttaatcgtaagcttaattttaatgctagtatagttcttaaaaaatgtttaggtgtaggtcttttattattataaaaaaaatatggctaatatataaattttgaattacttgagcaatcatgtgaattgttatgttaagtttcatgataataatgttgtttggcatttaatttgttattatggttctccttatagtaggcttaaatctgatacttgaaagtttttatatgatctttttatactgctcctatagtagtttttatatggtcttttgatattgctcctatagtagcttttatatgttattttgatgatgttcctttaatgtttggttaattagaagtgactttaatgattatctttcttattctcgtaagttaaaagtagtgcccatcattctgcctttaggacattatattattattttaatgggacattatattattattatttttatacttcaaattttgtgtgtccaaaatgacgcttgtttttttattttcttgggacacgttattattacttttcattcctaatttcgcactagttttaccacacatcatttttcttgtgttttcaaaatgatgcctaatttaaggggcaaacatccaatttaataacgttcaccatatcaaaatgacacctaacgttcaccatatcaattaagtaaacatcaatttggtagcacataaaaagtgcattgttcaccatatcaattaagtaatgttctttggacactaaatacatacccgaattttttattaaaaaaagttatattatttttcacgtgtattgaatagttaaaaattcaattttcgttcaaaaaaaatctcgttaaggaaaaaatgcgcaaaaaaaaaactacataaaatagatttttttttcagctgaatcacgcataaaagtggttattggatactttagtatgatcctcccatagaattttttttttacaaagttctatacaaagagcactttttccggccatataatatgtcttttttttaacaacctttgtctgtttatattattattatagcgtatttatatattttgttaggaaatttacaagaattgactaaaaagcttccttatttactttttaattagatatgtatatttgtgggaggaggacacgccatttggcgtgttgggtaagattttccgtttagaaaattgaaaaaataaatataaaatgacctgatgaaaaaatttcattaaacaataaaaacaactaaagtaaatatttgatcattattattgtttttttttagaaaaattatgattgaataaattaaataaccacaaatattattctcactttaatactgtactaacattttaatttatttaaaaaaaaatataatttactttcaagaaaaatatttttttcgttctttgtttcgctccttttatttttttcttttttcatattgtgtgacaaatgttattttttctacaaaatatttaagataaaaatatattacattaatctgaaaaaaaaaata

SEQ ID NO: 229099 - DNA, 955 bp, Cannabis indica
ttctattcgtgggtgtagaagatagagatcttgttttctttttggtgtatacagtataaaatgaagaaaaaaaaaaaaaagaacgacaatataaatgtaatttcaatcatgtggaagtaaattgtaaacttttactttaaattcgatattttataaaaactcctaaatgattatggtaactttataatcaatagaatctgcaatcccgctaactaaaaccatattctcttcttgtaataatttgctcaccttttgacaataaaaaaaaaattaaataatttgctcaccttttttctagttaattttcatgtactgaatactagtttgaatattttgatgatttcaatcactattttttatataacatatattaatttccttggggtcctgtgtcttgattacgatatctcaacttatatgcactatctatctagcttgaattaattagataatcataaatgttattactgtataacctctactctagaccaaaaactacaagatattagagaaatatcataagtagaaaaagaaaaaaaaagtaaaatatttgagtacagatgaagtactaaagagctcatcaattaattgaaattaaatgcattccatattagtcaccgactattataggggcatgatatgaggtgtaagttgtaaggtaactttaagcttattcagcaataatgaaagcatagtttaccactaagttaaagattcttttttattatgttttttttttttaaataataccactaacactactacaaaatacactttagtgtcagtttaatagacgcttttttaaaaaaaccgacactaaaaaccaccccaactctttggtctcggtttataactgacacctataataactttaagtgtcagttagtagaccgatactaaaagtataaccgacaccaaaagaagttaaaaagaatatatacatacaaattgagta

SEQ ID NO: 229100 - DNA, 2044 bp, Cannabis indica
cgggttgggcggtttgtaaattttattgaacacccctagtcatgaccaagaaaaaccgagtcaaaaaaaatccacaatgatctaagggggaacctcaatcgaagggccgctactgaaaaataagcgctgccaccggttgatccatgccttagggaggcatcgaggaatacaatgctagacctccaagaaaagttgaacaagaagagacaagaacttgatagattgatggaagacctttgacgaaggatagtgtttgctgcattcgaagaatgcaattgggaaaaagatgactttgatgatgaatcacctttctcgagggaaatctaacctgagctactacctccaaattttaaggaactaaacataccaccctatgagagaattaccgatccaaaatatcacttagataccttcattaagatcatgaaaatgaagagggtggcgagcaaggtaaggtgtcaattttttatcatgatgctcagaagtgcagcatataagcaatataagatgttggctactggatcagttgccttgtggaaacaattcactaatgaattcttggcctaacaccatgcctcgtgagactacattatcctaaggacaagtttggccaacatcacatagggagatacataaagcctgaaaagctacatccagcgcttcaccgctaaagcgaccaaggttgggagactgtctaaagatgaatacaagatggccatagccgctagagtcaagccaagaatcaagttatggaacaacatgctcaagagagaattaggcaatctggaggacttctacgaaagagtcaataggtacatccaagtgaaggatggacatgagaatctagatgtgggaagaaatagctagcccaagatatcccccactgatgagacactaaagaaaagagagttcgatcattggggagacgaacactgcaaaaaagttaagaaagagatggaacaataaccatgcgaatacacatgctttacagagttgaatagctcaagagaacacattttcttgactaatgtgaaccacataccttttaagaagccatccccacgaagaaagataagtccaaaagggatccgaacaaatattgcaagtttcacaaggacattggacattttatagaggaatgcaaagatctcaagatttaaattgaggagttaatacaacgaaggtaattgggcaggtaccgcaaagagaaccaaaggtaccaggacgagcgacaagaagaatactggaggaaaattggaaggaatgaggtattgtcgtaaaaaagaagccaccatatcttctttgtctcacatttcaatttgttgtgaatcaaggtggaaacccctcgggtgaccccaattgtcatgttaatcttttagttcattgtaaacaagggaaaggcccccacgaggatctttacaccccctttattgtaaaagcaggatgaaagaaaaatgatatcttggatttatgttattgtattcagaagaacactttaaagtggatgttcagtcttccccatttctaagagaaagaataatattcgagactgaaacttaagtgttcaatatcgtaagaatcgctacatttttgttaggctgagaaaagaggagaaaaagaaaaggaaaatggtataactatgagagggatgcatctctaaaaggaatacatattttctcacattcaaaacgcactttaagtgccacaaatgcaatataagaggttgagagtcgcttaagggctacaatctctctccatagcatcacaaaacttgaaaaagagcagagcgcaatccaagaggctaaaaaactcccttagccttcaattagaaacttgataaaggttgagcgtaggcccaagaggctatacaacttccttaacatccaatagtaaccagcaagaggttgagactacacaaagggtctacattctcttaataatgaggttacaccttataagaggttgagaaagcccaagtggcaaaaaattcccttatcaaaagatctcaaggtgcaagcacccaaagagacaaccatagaccaag

SEQ ID NO: 229101 - DNA, 2270 bp, Cannabis indica
aaaattatattataactaaaaaagtgtctctaaaagtaactattttttgtaatatagctattacgtatagtatatgtttgttgagacttaaaagtatatacacattattaattaagtacctcgacttacggattgaattaatggttcattagatttgatcaacaaagaggttaaagatgtttaactaatataataggaaaatcatattctaatttagtaggatatgttacaaattggtgatgatatatatttattcttttcataatgtaatccataatattttatttatagtgtattcgatttgttttaaaggtagattttatattttagattcaatttaatttacacaataattttagtgtatattttatatttcattatctaatccatcattaaataattttagatataaaaaattatattatatacatctgtattaaataaaattattacatatatgtagagatcacaactctaatattatactcatagcgtaatcatagcaataacataaaataattatttcaatcatatcatgtctttaccgtaatacgtggcatatcatagccactacatacgtaacatgagtctaacctggctctgataccaactgtaacactctgatattgtttgcttcactctgagttatatataagtgaccaattatattatgagtatcgaaatagtattaaattgtaataaaaatattgtgtagatactataaattatttataatttattgatgactaaattataaatatcccaaaactcatttatgacaagtaacatatatcagttggagaaacagatcttctatctagttctattcaatttgactattaaatcgatgatgtggcattatacatatatagatggtagttgaaaatttatatacccttaagaaaaaaaaaagaataaaaacatgtttataatggtaaataaaaatcttcaaaataatgaataaaaagaaaataataagaatctaaaacaagattgaataaatttaacttttcttgactttcaaaaaaataaatttcggtcaacacaattgttaacaacaccataattttgaactgaccaaataagaaaaaaatgtattgtataattattttctttagaacatagaccttctattttgaactggcaagaaaaaatggtcgagatcattttaataaaattatttttattaaatcgttttttttttcaaagagtttatgaaatattttttgttaaaatcatttcttaattatgttttttattttgtaatataataaatgagaactctattttccttttatcatcacttatgtcatctcataatcaatttttcctcttaaaagaagtaaaattactactttatcctttgactaccacatcatcaatatcaattcttttaaaccaaatgtatagatagattaaatataagcataaaaaattatacaaagactatttttaacaagctaaataaggggcacaatagtatggttattcttaaaattaaattttaaatattaaaaatttaataaatatacttattaataatctaaatatgattagaaactgtacttaaaaaaaaaacaactagttattatctctctttcatattcatcaagaaaaaaaatacaaaaactaatccaacaacaaaaattgaacctaacaacagcgcctattgactaaaattaacaaaaatacaaaattacacaatcaaaaatgatatgagaatccaagacaaacccaaaatcccgacttgaagatcatatgagtttacctatatatgttcttcgcgatcatatccaatattagcaaaccctctcgagtgtcgagtaagatatagcatcctatatagaaaaaataataaaataataatcggtgatattttaaagtagcattgtgagtcctaagttggttagagtagccgagagaccactctaacaacctaagaacagagttgctaagtaattagaactctaaatcaaaatttatttggagacaagttgtaaatgtgacatgacaaatgaaaccatttttataatttctacagacatttgtaaacccttaaaacgcccacatgtaacttggagttggaccctctatatctcatgtgtggctacaccaacaacattgagaaaaatatgtccaataacgaataacaaacatttgctaattatagtcaaaaactcatcaaaactgagatgagattattaattataaatttactttaagtggaggtaatttaagagctatatatatatgtgtcttaatttacattt

SEQ ID NO: 229102 - DNA, 1615 bp, Cannabis indica
cattaaacaaacttttaatgacaaattatttgtcttgataaaaaaaataagtacaagatagaaaaagcacgcacttgtgcatatcctaaacactaaaaaataaaaacaactatttagaatgtgacataatttgaaattttagattagttgtattatatttaacctataaaatagataattttaaattttgtattttacaaaaattattagtcatcttttttactttgttaacataattatacaatgagtctaattgtgtcaaacatttttattttgcatttttttaagtatttaataaatatattgcattctattaaaaagaagattgtaactaattaggtaagactaaatacaataatcacccacataatacaaattttaaaataaactaaaatagagaaaatagtaatttatatataatttatagagaccctttcatttttacacttcaaaacaattttttttttctgtatttttacagaattccacataaaaactcctattgtaacctaaatcgcaaccaaaatttgtataacaactcacatagaaaccatcaaaggaactcctaatttataacataacatacactttctaactatgtgggatttttttcttaaataacttacaaaagagatatattagcaaaatttgaagaaaaaaatataatataatatattaatgtattcttagtagtagtgtaaatacaggttgtttttgatacgacacaaaactagcatacgttttagaagcacgaggacgaccaagcacaaaaaatacaagcttaagcacgacaagctcgaaagatatagcatgtaagtatgaataatttatttgaaaacacaatatattaaatactttatattggattgtagtaattgttatctgtgtttctaattagaggacacatgtaattccaagatgattcagtttagttacaacaaacctatatgaaggcctaattaaaataatggaccagttccattagcaaagtcaagtcatccgaatgatgaacaggtgtctcgtctaaacgagataagcatccaacatagcagctctccggatagcatcaagtagtgcttcagagaaagtggttaagggacatttggatatccggcttcgtatcacattcattaattatcgaatcccataatatcaaaattttatttctaagatcatgtctgagaatcagatattctaaataagaaaatgaagtaattattactcaaatatttatgtgtctttattacctacaaaggtaggatacgtttcgacaactatcaacattacgtggcatccacatcagtagaagattaaggcctcagactccaccagatagaccttaagtcaatatgttatttgtatttaccccatcagtgggcaaggtttatatactagaaccctaactctataaatataagaaaactcattcatgtaaagggttagaatctcattccttgagtgctcaagcaaattctagggttcataatcttggcaaaacacttaagtaaatcaaatagttttttccagccgcataataatattgattcataaattagaggtcattaatccttgaaccatgtaaaaactcttgcctcattcttctttttgatctatt

SEQ ID NO: 229103 - DNA, 1684 bp, Cannabis indica
caataagaaaaaccaatagtataaaattagtgactatgtacagaacaatgaacaatttgattacaacaatgttaagaaatatactacttaaattgtatttagaagcccaccaatggtcccttcaaaaaaaaaaaagaaaagcctaccaatggttttaggaactgcttctccaaaaatacccataattatgcaacctaatcaaacattaaaacaagtgttaattttactaattcataaaaagggaagcaatatccaaaaatttgttcttctcaatgaacaagaaaccagatgtaatttactcattttcaaacttaataatctcattctatccaatatcaatttgctcagaaccataagcaataacaaatcaaatatgattatgtgtaaattgtcaaccaatattcaaatcactcataccaatgggcttttcctcgatctctatgttgaaataaactttgtgggtcactttttccaaatacaaaactattccctgtgaaatatttaaataaaaaataatgaaccattctttgaataccaaaacaaggggtctaattacaaagacaaaggcatagaaattacctcatagggctccttttcgacaatagcttgtacaaggcttcgcttaatgtgctttgatatcagttacccaaatattaaacttagaacaattacaatggatcataataaaaaaaggaatcttttgtaaacccattatcctctcaaatttatatagctaataaattatctttttacattttcttcttgaaggcggtcttcagttatattatgagcagctgattttgaattattttttttctatacccaattataatagcgagtcacaatcgaatcgtatcaacaataaatgtacggagatacgaaaaggctagtttaccgcattataggtgctaaaaatgcttaacattcgaattgataaggcgatagagctcctccgactctgtagaagagaaaatggccatatcaaattgtacgatgtcctttggaacagtgcatcgcactcttagaatctccattaatactctctcgcctgcttctccatccttcagagaaataaaactcaatgaatcctatcaccaccaccattggagaagtctacaattccaaaattagatatattaaatgaaagaaaaaaattgcagaaaaagaatatgatgaatcgaaaaagaaaatgaattttaactttgagccttgtggtagcgttatcacagatggagaatgtaagtgagatccctgcttttcaatttctctttctttcgaattgaaacgaaacttgaattggaattttttgtttaataaaatcaattctttttaatgtgtgcaaacttacgattaaatcagcttcaattgttccttcttcaatgcaattgaaatcaaaggggtgaagaatgtctacggatcaatcgatgtaggtttgggtttgagagagaagatcgaataaaggtcaatcgcaataacgaggaagaagaataacaattatttattagtataaaattaagtaacggatgttaaactctccgttaaatgtaacagaaaaataaaaatactatcgttaaaccaagaattgccgttagatagccacttttaatatactagttagaagttacgtgccgaggcacgtaaatattagttttatttaaagtttaattctttatttttatttaga

SEQ ID NO: 229104 - DNA, 1262 bp, Cannabis indica
aatgggatttcggaggtggaagaaacagtggtggattacgagcatggtgagaatgagaccgtacggagagttaaggagaagggatcaggtgctttgaatacaactaagcatctctgggctggagctgttgctgccatggtttcaaggtttgtcttaaatttagtttgatcaatgtgaaaaaagtgttcatgttttgtttgatgttctgtttggaatcagtgttgaaaaaaaaacaaagaacatttgttttgttattgggtaaagaagaatcaatgtcattttccatgaaactcaaagaaaactgaacccttttgatctttattgtttttgtactaatctaagctatatatttgactcatatgcacggatcaatctacttagggacaatttcatttgttgtcgttatttgaggcatgttggtcattcatttcattttcaagggagacatggacaacgattgatcatgattagtagctttgaagttctgactatttggagtttctgttgagttggtatatgattatgttttgcttgttctgtcaggacatttgttgcacctcttgagagactaaagctggaatatatagttcgtggtgagcagaagaacctttttgagctcattcagactattgcatcttctcaaggggttagaggtttttggaaaggtaattttgtgaatattctccgtacggcaccattcaaggctatcaatttctatgcctatgatacatatagaagccatttgatgaaaatatctggtaatgaggagtccacgaatttcgataggtttcttgctggagctgcagctgggataacagctaccattctttgtttgcctatggacactgtaagtagctagaccaactggttgtctttagtttcacatgactttctatttccctcaacggtatagatatctttctttaaattttgcatgtgttaccaagttgtctttaagctcttgaaagtaaactactggcttgctcaatgtatttttcaacttgtagtagtgaaacaaattgtgaatattttcttaattttatggtgttaaagcaatcaaatgttgtgaatacgttgatggttgggctaatcactagtgtcttctactcgagttttaaaacaatgttttttgaaaaacttcatgctttgataactttactggtgccaagatgcttacgtttgtggcgtagaggctattctcacggttatttttttgtatatgtgtggctaaatgtctctttcaattggtgaaataaagcttg

SEQ ID NO: 229105 - DNA, 1168 bp, Cannabis indica
gtcagagcaattggcaccataaacccacatttatcttctccctgaaatctctgtaatcaagaaagaacacattttaattgtgttgaacaagctcgaagaacaaatttttcttttcatatacataaatgaaaaatcaagtaagtttacatagacttatttctctgaaattgcaactgaggaagacatttccgagttttatcacacaatcataaattttattataagtttgccattcatactttctagcctgcaaaaaaataaccattttaaaatccattagcttaacaatgaaaataagtttgcaatccaaatattagtgcttcgatacacatctaatttaatgcaccaaagtaataacaaaaataccttcccatccaattaaagggaaaatttataacactaattaattaaaggcattgcttatataaccaaattattttactatttgaatcagtcatttgatcaagccttcgttcgtccaccgcaagtcaaccagcccagtccatcgtcatcaaacacttttcatcgtcctcaatcaaacaaccaggctagtagagagccattcccgattgcagtctcgccagaggaaaggtcaatcacatgctcgtggatggaggatgcatgattggccaaacagaagcagttgtcggaatgtcttcgaaagcaaagttccttccacattttcgatcgtctcaactcggtgaccaaggccactttggattttccatcgatgtcgtttctcatgtagaggtgaaacctgcacattccattgtgctggtaatctatgtgttgaatttttttgaaagtccactctcagctgttgaatatcatcgatgatattgatgatttgggagtggctgaccatcaatgtgtgtggctacaggaataatctccaatggattggcgactctcgatggtgatcgcagatgcggttgtcgacctccagagattttattgttaaaataataaatatctactgaatattatttaatgaaaaattcaataaaattttaaactgattagttacgtattatgtttacgattgaatttaaagatacagttagaattatctattttagtgatggattatattttgttattagttttttaattaatatttattacttcataatttttttttaatttttattaatatattttaatatat

SEQ ID NO: 229106 - DNA, 782 bp, Cannabis indica
agatgatgttcttttattttgcaagggggatttaaagagtgttctgtatatgttccaagctttgaagctgttctctataacttcagggctgcaacctaaccctaataaaactactatttattgcagcaatatgcagaatactgatgtaaaccagttgttgcagctctctggtttttcaaagcaagacctgccttttacatacttggggatcctgatcaatgcaaagagaatttctggcaaggagtgtgagattcttactgaaaaaatgactggaaggattaggagctggagctcgagaaacctgtcttttgcaggtagaacagtcttgattaattctattttgattgcaatataagcatattggagtcggattctgattcttccaaagaaaataatcaggggtactgaagcaatttgtagagccttttttatggaaaggtcaagcaatgtaacatggggcaggtgccattaattggaatactgtctgcacaccaaaaacaactgggggttaggcattaagaggcttggagaatggaacaaaatagccatgggtaagtacatttcggtaattgcaaacaataaggaaagtttatagatgaagtggatacataatgtgtacctaaagaagggagattggtggagtcactccgcttccattcatgccagctggtattggaagaagctggtggctttaaatgaccaagtaaggagcttgactgagtaaaaagaatttgctgtacaaaaatattctatagtagtaggctataaattcctcactccct

SEQ ID NO: 229107 - DNA, 814 bp, Cannabis indica
tggtactctagctaattttctcgttactctggccaatatatttggtactctggccgatatacttggtactctggccaatagactcggtattctaattgataaattaactagcatgtacgctaaatatgtatgcatgtatacttttatactaattttatctcaatttcgatttaagatgtgtttgtcaacctgagtgaaaattgctgctcaacaatttaaagtccttaatttaggctaatacaagttacaaccttcattctactaaaacccccttgatttgatgtgaaattggagaagaaaaatctaatcttggcttgggttgttggatgttttcaacatctcattatcatataattaataaatgggcaaataaatataaaacattaattaattattaggcaaaattatcaagagaatgaattactatacaaacggtaggccaaagattcatttgtttataaagccaaagctactaattaattaaaaaattgttaatttcttggaattagaaactttaaagacaatttatgttggaaaaagtttgattacaaatgtctcttttactttactactactcttcaaaagttcgattaatttttttttgaccaaaaaagcagccaaaatatagtctaaaactcctctttgaaaagcaaattacttaccacaatgaagatatgaaagaacaaatgaagcattatattaatttgtgatcatcaaaatccataaccatcacaaaattacatatgataattagtatttttatcctctaaactttttacactattaaattgtgctctccaaaatatacggctta

SEQ ID NO: 229108 - DNA, 1460 bp, Cannabis indica
tctcctatagtgagagcaaacacccgagcataagtgaattggttctccttcttctgtccctttgggaaatttcttttcagattgcctaatttcccacagttgtagcaccatcctgatttggctctacattcaccatggtgctctattttgcaagtgggacaaattggaatttcgacatagggcctcctttccttgttgttatggttgttcttcttctgcaccaatgttttacccttactatcatgatcattgttgtgattttcctcgtgttttctcttattctctttatttcctccatttattctttgggcttccacttagcagcgttgtccttctttatgttatttttgagcagctcagcttcaagagctctttccaacacctcagtatataccatgttggccacaactatgattttcacatccgttttaatcatggggttcattccttttaggaaccttaaggctcagagggcctcggttggtacaatatcttgtgtgaacttggcaaaacggttgaattgccttgcagactcattgacagtgagattgttctaatttaaattcataaactcatcttcctttgcagctaatatggtaaaaaatatagtacttcctattgaacacttctacaaagtctaacaaccaggtcattgctttatgttgcgactttgtcttactacttcccaccagattcgtgcgtcctttttaagtagtctggcatcataggacagtcttgccctatcattgaggtccatatattccaatatggactccattgagcgcaactactcttcagcttcaagtgagtctaagccctgaatgagatacctgaagaggggccttgttaggaccctactcttgaggttgtcccaaggaaaaagaacaaaaaaagtcgtagtaaagagcagagagaatacatcaacgaatggttaagtgaaggcttgtattttagagctctttcaagtcatgtctcacactcatcatatggaaattctaaagatttcaagtctaaaatttgtccccaagataagtgcaattttttccgtagattactcgaaaacgatccaacatatgagattcaaactttgaaagttgacgacgtttatcaagagtcaatttttaccattagatcattatcaatggccaagatcagtaccaaatgattttttctcatatattctgtattatttaattattattttaatagaacctccttccctatataagttgagctcctctagtttatttttcacattcttctaagtccccataaggtcaaatcatctctctctataggggtgttcattggatcacatcaaatgtttttaggcccatccagatccgatctaattgtatattggatgttagattttaccatccgatccgatccaattgatttcagtcatcaaatcgatccaacatccattggatgttggattggatcggttctatccattg

SEQ ID NO: 229109 - DNA, 1746 bp, Cannabis indica
attgggagttgtacaatcccaccacatcacttgggggaaggtcatgtatgatgattccgagactgtataggtatgagactacatacttgaagagggcttaaatagattgattggaactacctatatcaacaaggtgcatcttgacttgtggtaattttaggatgggtgacctcttagaaagtttttccaagaagtgtgcgagtgaggacaaagcacgctagaaacactcgtgttggtttgtaaggtcagccatcattccatgaagcagccaaagtgacgtattcgtgtataagaatcatcattctgtgggtgtaagggtccaatggaggcttgacagtggggaagttataaaatggtatcagagccttgacccaatcgaaagtgtggtcgacgaggatgtcggaccccgtaagggggggtgattgtaacagtcagtagtcatgtaatccataggggaaaatactgggagctgtacaattcacggttaagcattgacttggggtaatttcaagataggtgacatcttggaatgttttcccaagaagtgtgtgagtgaggacaaagcactttagaaatactcgtattagtttatatagggtcagtcatcattccatgaagcagtcaaagtgacgtagtactcgtgtataagagccatcattctatgggtgtaagagtccaattaaaacttaaagcggggatcacattattacataccttttaacatttttcatatatcaattatatatgcgcatatatataaattagtaatgtttacatgtcatccctgaagctattgtgattttataacactgtacaccgtcgtaaaaaaatgtgattattatttaattatgattatattaatatgtttatttatatctaattataatatgatatgataagtgcatactagctagcttgattagtgaccttatcatatgcagtctttttaattaaactttgtttattaaattaataattaattaattaaatacttgatcatcacctcatgagttgccacaccagcttgatttctccactgaaatgttaattatatctatatttatagtttctttttctcttccactatgacaagttggcaaaatgcttatatatttatatatatacaaaaatatatatttgaataatagtaacataatataaagtggcaatgcacttaatctacttgttaattaattgatagtgtacagttcagtggtataattaataaataaataagtgatcaccttaatttcctagctagttaataatctccattttaattattataataatataatgttttgtaaattaattaattgtaactaattaattggacaattataatatttaagataaacatatggatacccagattcgcttagatgaaaagtagagtcaataaaaagatattgttcgtccatctttctatatatttaacatatagtctacaatatatatatattaattaaatcaatcacttaattataaaaattaattatataaatattatatgtataaaatacgcattctcactataaaagaacattattattaggtattatgaatagttaataatttatttctataattatattagcaatcatattagcgggcattgagtaataattaatattatttattggacattttgtgtgttatatttaaagtaaaatgttagtattattggatattttctcacaaaattttacaaaaatactattctttttcaatccaaaaatgtacatt

SEQ ID NO: 229110 - DNA, 2286 bp, Cannabis indica
tatttgttatgtatatctttgtttcaagattttcagtttgaaattcagtgagtacttattattattattattattatttttgaaagaagattgcattggtttattttgcgaacaatgagtttgtaagttccattgtaattgccaagtcttgatattctaaacaataattaacataattttctaatcatgctattctttgatgccaaatttgaagtttggtataatactcaactgaattttgtcaatttgcccaagtgaacgaggcaaatttggagaatatttcctagtctaaagatttcagtgctagttttttttttttttttggatatttgaaaattagtgttctgtagtttaagctatttatttctatatatatatatttttaattcaatcttttggctatgagttagtaaatttagaaaatataacaacacggctggcgctcttttggttaaaacgtcttgtttttttcttctagatttactgttttttttcttttgagttggttaatttgtacttaagtgtatatatatatataaagttgattgattagtataaaaaaaaagctacaatgttatgagtagacaagtgtatatcagatactttataatggagaatgaataataccttatgattatttgggtggcctgccatgatgtttgtttgccctttttttataattttgagagttctgaatctatcctctcattgtattggccatgctcttggcatttgcttcttttatatacctttttttagaggaaacttgtgttgcttctcctgtactgtggtatgcataattttatatacaaatatatttgtttacgaattgtaatgtatatgactgtggatgaaaagagtttcttttgtgtatctgtttctacagattgaatggaactccatactatgggccataaaagaaagatagtttcttcaactgtagagagtgtagtttcatttgaatgtgatgacgctccaccttcttgtgatgaattatttcctattatctatgtggaagacgggatttgcctttaccaggactcaaagagagatcatataatttttgtccaagatcttccatagcattgtcattatgaaggcaatgattttaaaattgactatcgatcactttctggcgcaatcaatggttggaatgaatggagtacttctgtgtcaacacatttttaggcacttttgaaatcagtgagtataatatcttccatgtgggtatgctctggtattgagctattttgtgatgtgactagttcgaaccaattactgagttgctggtgtcctacgactcacacattttggtaaattggggtgaattttttataacattagaagatgtcctcctagcagcagatttatgtataatcaagagactaaccatgccttcttagcaggagtcgattgatgaggttgaagaaaaaatagatttaccaaaatttaaaaaactacaagctcatcagcaaaaagtagctcgatatttcaataagcaactaaaagtaaggaaattatttttgggtgacatggtactcagaagggtgttcctaaacactaaggacggtgtagcaagtgtactcggatgtaattaggaacggccatatcaagtaaccaaagttacaaaataggagcatacaagcttggttggtatgatgaaaacatggagctagttctagtaccacggtactggaatggcaagaatttaagaaatttttaccaataaatgctcttagatggcttcggtggtgtgaaatttcaacaagaactctaaagatttttgaggaaaaagaaaaatatggctctaatggtttaaagattaaaatggataaaagagtgttaagaaatcttaaatccctttttataagcatttggagggataactaagtaattcaaaatttgatttttggggtttctcccaaaaaaggataattaacactcattaaaaaagtacaaacgtcacacatgtggtacctagcaaccatcactacgtgtcttgaggtctaacttccaagacaacattaaactctctagacatcaaagagacattcgatcagtcacatcggataaagagtggcttgaatactgaacatgtgtcaccaatccgatcagcttattgactgaatacatgtgcgaccaggaagtacccacgtggacttgggagaaaatattatctcaatttttgcacaaggtgatgtggcatccacctttgtgacacgtggaaaagattctatagtttggacaggcagaccctcctatgaggtgtctgttgggttttatgcc

SEQ ID NO: 229111 - DNA, 948 bp, Cannabis indica
acacaaaacattacatcttagcaacacttttttaataggcctgagtgttctcttttcctatacattctatgaattttttttataaagagtcaaaacactctttatcaatgctacgaattgattttggcataacactctgcactctagtttttacatcactacaaatattatgcacaattaattttatccttctcactttaaatatccaaaatatggcttaacagatgtatctttaataggtattctagatctatcaatagtattgtaaatgatgtaaaaaatactttaaagtatagattgcaaattatgaatagtagaaaaatgactacacatgaaaaagactacctaataagattacgtaataggtagttttgttttgattttgttgttggccagttgttcaaggttggcttgtttgtgtaaatttatttgtatttgtatctattgattaatgaagttttttttttctttgataaaaaaaataatttattgagattattaaatttaactaaaagataaatattattatatgaatttatatatatatacattacttttgcttgtaatagaataaaaaaaatgctaaaaagtattagtaatgtctagtaccatctaatgagttacattattattggtatagttaaatatcgaacttaccatgatattagagaaatgataaaaagtattagtggtgtcaagtactactcagtgagtcatatcactactgatacaattaagtctcgtgtttgctatgatattagagaaatgttaaaaaatatttgtggtgtctagtaccaccaaaagggtattgttattggtacacttaagtattgagaaaacttagtctttcttctgaatttctttggtattagactatttttagcctaaattttgggtcattttttatagttattttttttctttgtttattatttttggaataaaatt

SEQ ID NO: 229112 - DNA, 1290 bp, Cannabis indica
aaaaaattgtttattatttagaatttagatgataattaattttttaataaaattaaaacaataattttttgaaataaaactatatatataaatatatattgcttgttattaactgaggtaggtttgagcttttactatttctagtactatagatcagatcagattatagtgacttgttttgatttattttgtgcttaattacagaaataaatgcatactcaaataaatgtatactctaaatactaagggaccaaatttaataaatgcaattaattgcaactcaatattattggacaagctagtcataaatatagacttgggtatgcgataaagaagagtgaaaaatatagatataagattatttttaatggtgttatttattttaagcttttatatatctctacattacttaaacatatcatatttttttttcacattattttcaggactcttacttttaaaaatactctaataatataacatatatattttaagaatactataattataattttgcacattattatatataaatatttttttattaaattattatatacatatatatattacacttttaaatttttttttttaaaaaatatagtatcaatgtcattatgtgccatcaatataaatttcaataataacattcttttttctctaataatataatatctctatatttttttacctaaactttccacaagggccgaccctgagttgaaatgggccataggcaaaacaaaaaatttgggtccttactgtaaagataaatgatatttttaaaaattattaaaaaaatatgtatattttttaaaagatatttttttatttgggctcctaaaatgagtgggccttaagcgcgggcctagcccgcctatgcctagggccgcccctgtaccccacactactattagtgtgtttgtctctagtttgtcattaacgttgcagttatttaagacatgttgtaaattttgagaaatttaaaataatttacaatataaaagataatattcaaatagtttattttatacatgtataaaatgaaattggtacgcgtaaatagattatgtgaacttgattttggacatgttacatttttataccaaacctaaatagttttttttttttttttttttttatttttttgtagaaaaaaacaatcttcttgaattgtggaaatgattacaaatatctctccacacaaaggcggacccacatagaagcgaaggagggcagttgcctcataaaataatattataaatatatatattagttagttacattagt

SEQ ID NO: 229113 - DNA, 1025 bp, Cannabis indica
attgaaatagagttttattttaaggcataaagcccaataatttttgcatcaacccaaaagatatttgttattaactcatctttatccacctgaatatcataaaaaagttcggatcttttaattcccttgaaagtactcaagaacaccacatgtttctcctaacttcattgaattgttcgttttgtttgtaaatgattcatataatcaatgtgagtaattcaaaggctttcacgtcctccagctctctttgtcattagttcccaactttcttttggagcaattcctgaacagtcaactaagtctatttctgcaggtagaacatgagtcagtttccttttgatctatgtaaatgaatttttgtaggagttgatgatctcacatgagtgtgtttatgaataaactcaacaacatgatatttaccagtttggcgacaatcgactttcattcttgctaaacatccaaacatcgtctcagcataatgacatcttacaataacatcccgcttatcattttgacgatacccttcacaagagcaacagaaaattctatttatcatcacaccatgtttatctttatatcttttactttttctaatgccaaaaccaactttataagcataagcatcgtaaaaattataagcttcgtcttcagttccaaattccatgccaatttttgaaattaatttctcagatatttcagattgaatcatttctatactctttatattattatccaccaacttatcttcattgatttcttcttctcccttttcaaactctagtttacgacgagattgaaattctatttccatagttttattatgatcatctataattttaaaacgtaatatcttgtatcaccaaaataaatatatactattcacatacatttttttattaaactgctatctttaataataaataaacaaaattgtgcatttattgaaataataataattccatacactaccaatatatataaataacctatattacttaataaaaaatatttgtaaattttttacc

SEQ ID NO: 229114 - DNA, 925 bp, Cannabis indica
ttattattatttttactattatatctatatatatggtttttttagtgaactattaattattattctttacttttatatacatatttccttctatttttctttttcattagtagtcgtttgttaattatgatattgttctgaactaaattttagtttctatactaaattctattccatttttctttctaaccaaacataccctagaataataaatcactaaaatataaacgaaattatattatgaaaataataattaataaattgagagggtagctagggcaccacaccagcatcctaggacttgcttaagttttaaaatattaatatattatttgtcaatcgaattttcttatataatacatggttggaaatattgattaaactattatttgtttaaaaaaataattatatatatgcatgttacaatagtacatttaagcacactacatacaaataatttctacatctatttttaatctgtgactcaaaatattcataaaaataagtgtgcaacttcttcaccataaaaaacaaataataacactataattatacttaacgtgaaatataaactattaagcaccttaattaaagtgtttaacatcatacggatatattaactaactatgtgttttctaaattctgttttacttagttagttagttctgttagtttcttaactaactcttggttttgccttgtaatacagtcatataaataaaaggttattggctcagttaagagtcaagcttttcagcaattctctctgttttctttctttctccttgagtttcttttctctggtttctaccatttctggtttctaccatttctgttttgctggtttagcttctacatggtatcagtcgcctgcaatggagtcgttgattccaccctccgatcctcctcagacggtcaccgcccc

SEQ ID NO: 229115 - DNA, 770 bp, Cannabis indica
ccggtggaatactctgttcatgagaaaagaagttatcaggatcaattttacttttaacactcaccaatctcttgaagttacccttgaaatacttttgaccccaaacacttgcttgttcgaagcttgtagcaccacccatctcgttcatcccaatatcaagatctctatagttcacataagcttctcgtggggacatagaaacataaggagtcatatactcatacaactcccttacccaattaatgtgcctctctggattttggtcctcactacttctccataagctcaagtactgactcataaaaatgattccttttctatgagggaaaggagaataagattcaggaatcaagctcatctttccaccataaggagtccaaataattatttttccctcaagctctttatccaacatccttttccatatcccctcgagagccactacaggtataggaacttttacatagtctgacttggctttgaaatatgtcctgtacaaagatttcgattgaagaaggtattcaactggtgttccaatcggttttccttcgaagaaacccacagattcaagccaactcattttgatacaatcattttgtgtcaaacccaactcagggaagctcattttcataattcgaaggagtttatctgtgtctccgagaaaaagagcttcataataagtttctacagtaccattaacaacaaccatagtgactttaatcataagatcttcatgaagtttatccacaatttgttgccacttttggatg

SEQ ID NO: 229116 - DNA, 1010 bp, Cannabis indica
taacttttacaaaacataaaatccaaaattactcttaggtaactttatatatgtgttgttaaaaaaaaagtaataataataaaaaaaaactttatattatatatatatgtgtgtgattttgagcattaataacaagaaacattgggaatgttaaaaagaaatcataataattaaacattatatatattgtgaagaaattacagttgttgataacaaattgtttttattaacattctttctcaaatgaagtgaatggtgaataatacataaatgtggtggagttggaggtagagaagaagggattgaacttaagatgtataatgttgatgataatgatgatgagtagtagtagttttcaatatattggaaagcaattggtagatttcattatattttcattctaaagattgcccaaagcaagttttgctctcaagtccttgcgcaagatttttcctgatggtgacttcggaatggcgtcaatgaaaaatactcgacttattctcttgtagaacacaacctgaaatttacaaaacaaaaatattcatgttatgacaaatgaagttattaagaaaaaaaatggaaaaattacactaatttttcattcttctctaattaaaatttcacccaaattttatcacaaacctatacatccatccatctataaaaaatacaaatatattatgtttgaaattatattaattatgtgagtgtgtgaagattatttgggtacaatatagttaaattaaattttatttggaaataaatttgattaatgtataaagaaagaggtatttttcaatttcttctaaaaaaaacatcattattaaagatttttgagcccaagctaatgagcccgttttcagttgggcctgaagcccagaaaaatccgaaaaattcgcaaaatttgttacttaaaacacaagaccctaaaactactaaaaccgatgtatatttttagaaaaaggggattttttttttttttttttttttttatttttttcatttatttt

SEQ ID NO: 229117 - DNA, 1014 bp, Cannabis indica
tctttttgtgatgcctgccaattcggaaagtcacatgccttacctttcaaacgatctattagtcatgcttctgttgttcttgatttaatacatactgacctatggggacccgcacccatagcctcccaaaacaattacagatactatatccactttgttgatgatcacacacgatatacatggttgtatcctcttaaaaacaagtctgaagctcttgaagcttttactcagttcaagttaatggttgaaaatcagtttaacactaagataaaaaaaactgagaacagattggggtggtgaatacaaacccttttctcagttagtcacggccaatggcatcatttttgatcattcatgcccccagacttcagaacaaaatggtcgtgctgaacgtaagcatcgacacattgtcgaaatggggctcacattgcttgcacaggctcacatgcctctaaagtattggattgaagcttttcagtcagccgtgtacttgattaatcggctccctaccccaatacttcttggaaaatcaccctttgaggctttatttcataagattcctgattatgattttctgaaggtatttggggtggcttgtttcccttgtcttagaacataccaaacacataagcttcaattccatactattaaatgtgttaatcttggttatagtattgttcataaaggatacaagtgtcttagtcctaccggtcgtatatacttttctaggcatgttgttttcaatgaaaaggaatttccttttgctactggttttttaaacaattaccagtaacctcctgaaattaccatgacagcaccacacacttggctcaatcttccacttgatagttcatcctcttttcctacagagactcctcacacaaacactactccctctcattcttcaacatccagtgctgagttacccactgatgcagatcatggctgtcctcttgctgcaacatctcctctttcacctgcttccaacacggtttcaccatcaagcatcagtcc

SEQ ID NO: 229118 - DNA, 1987 bp, Cannabis indica
gttgtaacagagagtcattctgaacactagtaatagtcggccgaataccacttaccacagtatcaaagttagagctagtggaagtaaatatatcagagaaataatcaacaataacatctgaaagacccccttcccaatcaacccacacaccagaattattcaaaagagagttaatggagttatttttcttacgagcagttgcctttgcatggaagaacttgctattctgatcaccctcacgaagccaaagtgcttggaacgctggcgccaaaaaacctcacgctgagtatacacttccccaagagcagcaacagaccgcttatactgagcaatagaaacctcatcggtacaccatttaagccttcggatctcttttttacaattagcaatcctcttcttaaaattgcacgtatagtcttgaccccaaaccatcaacttctcaccacaatattttattttgtcggttaaagtcagccccacgcaaacttcccagctatcaagtattacttgccgacacaatggctcacggagccatgcattttcaaaacgaaaattagtaaccgaatggtggagattgatcgcagcagtacggagaaggataggacaatgatctgatatcgtcacttcaagattgaagagctgggccgaaataaagcgttgagtccaatcatgtgaagcaagaacacgatcaaggcgaacctcaatccaattattagaaccacgacccctttcccaagtgaatggataacccgagagctccaagtcgttgagattacaatcctccaacactttacaaaaaccatctagtaaccattgtgggtacggctgcccacctcttttatccgcctgagacgttacattgttcaaatcaccgataatacaccaaggtagaggagagtcagactttaaagcacgaatttgatcccaagttctagcacgaaacgatctattaggctcaccattaaaccccgtaagcctccaaggtgcttctctagccgtggttatttttaaatcaatataattcaaagaataacccaacaaaacaacttcatcactaaaccggcacaacaacgcaacaccaccactatgaccacgagcatcactagccatcatgccctcaaaaccgatagccactctaagcttttccaccaaattctttcgacataacgtttcacaaagaaaaacaagattgggtcgcttctggataacaagatccgaaatgaattgaaaagcccatgggttcccaagcccccgacaattccagcttagtatattcataatgagcggtgggcctgggaaccagtacccaccaaaagcccattttttgagccctcttcagtatcatcatcacaaactaaaatatccatattttcactattttgcaagcccactccatcgggcccattagaacccacctcattagtccttcttcttttagtatcaactacaagcaaaggagaagcctcacttgtttccataatagtccccacgtgaataggatcagcaacaacattaattccttggatatttgacttgccaatattcactccttcaaattgatttgaaataataacaggtaatttacctgttgatattccttgattggtggtcataactcctcctaaagaagaagatttgaccttgagcgttgattgagggcaatgaacctggaccagtcgcaccaccagtgaaggagtcgtcttcatcctcaccggttctgagccatttcgaaccgattaagtgattccgtcttcttggctgggcacgcataccagccccataaggcttgacaattttatcagcaggcacaacgaacaattgaggacagaacctatccgaatgacccaatattccacaaataaaacagaaaggtaggaacatattcatacttgaaaatagcccagaatcctcctcagcagtagtacgacgtagctcttcctcctcttcaatggagtgttgatgtcgagtgtaacacgaacccgcaaat

SEQ ID NO: 229119 - DNA, 1062 bp, Cannabis indica
gataaaaaagaatcatgaaatcatgagaataagtggctagattcatatattggcaagggaaaatggcaaaatcagtaacagctaagacaaatacaagtgtaataagtgcatattgaaatggggttcatgttgagtgatttcttcttccagttctaagaaccaaaataaaaataaaaaaatcagctaaattgaacaacacccaaaagtaaaagaacacagaaaatgaaataagaagaaaaaggagcaacctttaacaaaaggtgtgagcttgttttggatgagtatgagtggaagaggagaaatacccattaaagaaactgcccccctttgacataatatggtggttcttccatagaaaaaggtagtgggcatcatccttggaacagtgactgagttcatcttcttcttcttcttctgttaatattattatgactttgtatggagataatagatgagattggtgaatgaagccttcttcagcttcacactctgtccacacactatttttctcagttggctaaattgttgggtcccacattccttttaaaaaatctttttatgttttttttactcttataatactactaagtatagagacagtgcaagcattgtgctgattttatatgtgaagaataatagttaatacaataatttagagaatgaaaattcaaaacattgtataatataaaattaaaattactactctttaacttctttctaagaattctgaaagacaacagtgtaattgaagaatataaaagaatgaataataataatgcatgattaatgtgttgaaatttattttatcaggatcttagatctactcacaagtatattgtttaaacaccctaaatatgaactttctaaaacgataaattaaacacatataaagttaagaaaaccttacattgatgcagtggaattaatgtcaccttccactcagatctctaacccttgtatcttttctgtgcagagtataatcaagatctgagcccgaatgtccttcttctttgtagtttgtatccttcactgtcttccaatctatgattgggttactgcttg

SEQ ID NO: 229120 - DNA, 2588 bp, Cannabis indica
taaattatgttataataataataataacaataataataatattgtaattacgatgaaacaatcatcaagatttaggtatggtccccgccaacattccttgagtaacactcccaaaaccattaatcgctggctggtccgactgttttcccaatcttgaattttggttcccttttcttgaggctaacttatcttacacatgtccaaaccccattattaacctcattttttatctatcaattaacttaattatcaatattaatccttcttcccaatgtgttgtacccaaaaaccatggcaatgatccacttacgatttttatcacacgttttgtacaaacacaagcaaattaataggcgacatgtggcaacatcttcgttatcaccgtttactaatagtttctaatatttctaattaattaccttcgtacccaagctaccattcatctctattcattctctgcatgtgttcaatgaggattaatgtctggtataccaaaaaaaattaaatatattaagaagaagattaatgtcttcagattaattttcagccaaattaaaaaagaaaagtcctttgattaattctatttttgtattttttttggcaagtatattaattccgcaacaaagtttttacaccattagcagcactaattataataggtatgcaactcctattataacttttccaatcattctatatccctttttaccattttattgggcataatgctcattactgttctctctttacatcaagtttaattatttttataataaaatttattgtgtatattttcatattccataaagcttcattccttgtccactaaatatgatatatatagttgcgaatacttgacgtttgaacctgtttgttttagcatttgagatttatctacaccatgaatagtgttagcagcagtagtccatcttatccaagccttgatgctagccaatatctaattgctcacatttgaagaataaacactcccatgtttctttgttcagcccacaaattgggcatccctattcttcagatacatattgtatttaaacaatctagatctcaatctcagcctacccaaaaccacaagtgaagagtttaaccatagataatctcttaactatcacatcaaataagtggaagactcattaaactaagacaggagacccaatacttgaagtaggaatcaatttgattccaccctacttattaattaatttagtaatgttgggcgagtcggtaatattgaacccagggctctgaccgcgtgcctgttgaagaatgagtcggcgactcacatgcagtggcttagttaagggaacccaccggagccgtagcgaaagcgagtcttttaagatgaattctatgtttggtacatatagacattcgattccacactttaccttgccagtaaacagtcgggaacttagggcaaagtcatctataagaatcattaatcaaattcgtacctcttgaattttttagaaagttatttagctccatcaatttcttttttactcgaaccacttatttccaataccagctattgttgggaggcacctcatagaccctccaatccttcttccctatgtacattgtaacccatagtgtattctttttctattgccgcttcattccactccttagttcttcttaaccccagacccttttcttttttggatttgcataaatcatttcatgcaaccaaccccaaatcccctttcttttcatttttgtaccttatttacctcaactcgaaaatttaataattattctgatataatttactatttattgtctaattaaaccaagtgaaataaattactttaaggaactcaaatatattaatataaacaaatttagccccaccaaatcaacaaaaaaaaaaaaacaaaaaacaaatgttagagatattgacgagaaagaatgatattttttgtcacagataataaatgttagagtagaaataaatattgggttttttttttcttattataattaattaagaaatgtattgcgcttcacgtgcagttgtattttatttagtgataattaagtcataaaattaactttaaaatttcgatacttatatatatatatattaataatgtgaataattattttactaaatattttttttatttttaataacataaaaaaaaaatttccaaaaatatattattatttgaataaattaaattagaattaaataattatatattattattattattattttgtgaatgaatgagcaattattttttaaaacataagaaatatgccaaaattaagtaaaagagcttaacaatattacaaatctttggtagtgatagatatattatttttatttttgaaattatacatactaaaaaaaatagttaggagaataaaaaatagaaaaaaaaagagaaaataaatctatttagtacattataattttagacgattaatttttaacttataatattaattaaaagtttgaaaaaaataaatataataataaatagccataatttggagggaaaatattgttgaacacgagccacaccgtccctctttttccacacacacactctctctctctc

SEQ ID NO: 229121 - DNA, 1443 bp, Cannabis indica
gaatcaggccatttattgacctgggcactggggcctttaaatcgagcatcgagattctatttttgatatttctaaggcttctaaacttgaagacgaggtttcttcccccattttttatcataccaaattcaatggttgcatcagatttgatgtttgagaaattgaaggcaatgtcctaaatagattgtcaacttaggcgttgtgccctatttccaaggactcgagtttatagttttctccttgagtttacttgaatcttcgttattttttatgactgtgaagatgtctagagcactttttgttgaactgaattggaaacagcctaggttgacaaaatgtcaacctcagcgcagggcccagtcccacgcgtcaacctgggcactaggtccctcttctaccccttttgaagttctattttgtcccaaaaaatagttaattgtcaatatttttcgaagacaaagatgatgcttaaaagaattttgggaaaactccatttttgtggcctaggttagcaaattgtcaacccgggcgcaaggccagcccaagtgtcaaactgggcgctaagccttattttttatgccctagaactattacttttcctctagaaggacctatttccccattttcaataaagacatattcaatgtaaaagtcatatctttgatcggacacttggaaggtgcccaaattgacaaattgtcaactcgggcactcggagcttggggccccgggtggtcaaaaatctacttgctccaattctgattccgatgcctcaaatatgtctatggtacgtcaagttgatgtcctagtgaaagttttggccactctgcactaagacggtcccaaaatttaaaaccctagttgtagatgtcaacttgggcgtcaggtggaaaccctaggtgcttagattggcttatgggttgcaggttcatgtaatttcaattcctgaaccttgtattaggttgctccatgtcttcatggtacataatactgaaagatagtcggttagattcaagttattgaagtccaaactttcatcccggaacttctagagtcaacttgggcgcagggctagggtctccatcccaggttgactgctatgactcatgactactcaacttcgtgacatcatccatcatgccatgtgtcaaacattaatgtccacgttaccagatttttttttttttggattaacagatagtctcttttaagttcaagcacttcgcagtgaattcaattgttatgaattctatttttggttttattgtcaacgattgtcaagttgttttttcttatctaaatcatgttgttttaagtttttttaaacgatctgtcagttgtgttgctcgctttattgtaaggggctttcaattcttgctaatcgtattgatgaattttttttaaacaaatcgcatggataaattttgtatcagttgaattaca

SEQ ID NO: 229122 - DNA, 1271 bp, Cannabis indica
gaatagtctttgaatttgagctgaaattcaaatttaaattcagtctgtgaatttgagctcaatagtttgaatttctcctaatctacggtgctaaaagtgttatgaaaatattacaatatgcaaaaaaatctgtattagagtatgacatagacatattaatgagttagtcctcttatcgctaattggtttttgtgatggaatattctgattctaatcagtgactaaatgtgaatttgagctcagtgaaaatattttctttattgcttatccaaggaagatagaggtcatcgcatacagagagcttgtgagataaacttaccagagttgccattgataaatctgtgttgaatgtagaaggattttgtgcgaagctactagtatccatgtaactctttccatagtagattttagaggtaaaacccaataactggatgtagggtagggattactcattattgtattcctaatttgaatatttctcggttttgtttatagctaaatttgaataaaaattactgtatgcaaaaatcaagtgtctgctgaatttcattattgaaaattttcttgaatttttggcagctattttgcagttgtttaaggtctagtggccggactgggataatagcttcagaggaggaagatgtgcctgttgcagtagaagaaacttactcaggaaactacattgttgtgtttgaccccattgatggctctgccaatattgatactgccttaactactggctctatctttggcatatacggcccagacaagcaatgccttgttgatcttgatgatgattccccggtaattttcatcttatcttgaatttcaatataaagattaaaaaaaaaaacttaaaacaaaaacaacccttttagttgagccaaagttgatcttatgctctgtagtcttcaaagcctgctgatttgaaaataagagaaaaacctcattttcaagtgttcctatcaggaccacaggatacagcttctcatttaggatttgtttcgaaactgctgaagagctccaaaaataaatctcttagcctgaaaacaaatgatatcaaacttaaagctacaaccacccttttagagccaatgctgacttgatcttatgttgtgttacttgtgtagtttcagaatcctaatatcttaaaacaatgacaaaaacatattgtaagcgtttgaatatctctgaaggctgatgtattgctccaagcaacatctctctctcagcgtgcttaatctgttctatttaatttatatttatatata

SEQ ID NO: 229123 - DNA, 1119 bp, Cannabis indica
ttttattttggtttgatcttgaatctttattcacatcatgcattaagatttaatttcaatataatatttaagttgtaacatagttataaattatgtatattatttatctattactcaattaaacatttttaattttgtaaaaatttgtagaatttacaaattaaagttcgagggtggcatgagttttcgctcctttatctattttaattaagttctcttggcaaaacaagcattgagaacctttgaaatgctaaattatctgcttagtaagttgttaaaacacaagtattactccaataatacttttttagaagcaagtcttagtcactctccatctttaacttcgtaaggtatttattattagggtcatgaacttctcatcaaggtctacgatataaaattagaaatggttcaacgtattttgtagtaccgatccataacctggtcataatgagttgaagtcactgtcttatataggcctgccatcatgacaaattgcgtacattttatttatgatataagggtatggaacatttcattgcgcaatgctcattttgttgatccagttgaacgaatccttacaatgtgtttcttcctatctcaaggccgacttatttagcatcacacaactgctggcatccattctattaagtcgggtattcgtttagtagctaccttagatgaaatggctgattcttacctcctctcaaataatcaccaaagttggtggataaatttttggaatttaaatctgccaccaaatattaagatcttcgcttggagggtcatccaaaatgcacttcctattgcagctgctctaattcataaaaggaaagttattgattctacaacatgctccttgtgcactcatgcttgcgaatccatagggcacattttattcacttgtcggtacgcaaagtcagtatggaagttctcaaagtgtaagattaactattagagagctcattatatgcaagatgaggaatatgtgattcatctatctttgttgtactcaaaaattgaatttaaaacactcatatgcataatgtgggctatttggacataacagaatagagtattaatttcatggaggtaatagacgagatgggtcatatgttg

SEQ ID NO: 229124 - DNA, 1061 bp, Cannabis indica
ttttttaaaaaaatggtaaaataggaagttcatgcaattaatggaattagtttgtacaaattagtggaggatctaaattttgatattaggagttttattagggtcaaaaagtaaaatctcccttactttacacttgtttgctatagctacagttactactttggttggatggtttaggtgtgagtgattttccatataaataatagatcacacctaaaaatattaatttcaatacctaaataaactaattaatttatttcaagaataattccctgaggaatcattcctggaggaatagtgtttgttgaattttatatatattgacacaaatataattaaattggattcaacacaagtaataatttaaagtaatcattaggtaatttacatataatctataatgcaatactcacagtagtttttaaactatgtgggatttttttttagaaagagtcactaatatgcaaatcaacaaaattatataaaataaattaaaaatgtaaaaaaagaataaagaaaacaaaaataatatggaacaatgctttcttagtatgtcacatcaaatttttattattttcttttatatataaataaatatataaattagaatttactcttaaatagatagagtatcttagataaaaattatgtataataaatatttggtatttatgccgttaaaaataaatattggaattatacctcttacaaacttaaaactttgagtacttatatcactattaccttaaaatatataacactctcaataaagaatgtcaaaaaaattagctggaaagtttccaaaatttaattttataggtttttttttaataattttatttaaactaataataataaatatagtgcatagcatcacaggccggccctaggtataggtaggctaggcccgtacttaaggttcactcattttagggacctaaataaaaaaaaataccttctaaaaatatacatatttttttaatagtttttaaatataccatctttatagtaaaactcatttcaactcagaactgacattgatgcatcattagagtggactt

SEQ ID NO: 229125 - DNA, 981 bp, Cannabis indica
cgggagatcaaacctaatcgttaaatttaacagaatattctttttttaagtatattctgttaaaccaagaatgttaaaccaagaaatgccgttagataggcacttttaatatataaagatatatattgtaagatgttattagaagagttgtgtgatgtttttattatgtttattaggtggtttgtaaatagcgttactcactttctagctcaatcatcctattttgtcgttgatcgcattcttttaagagttttttttcttgtaaatttcttcatgtaatcttgaatgattgtaattaataaaattgataaattcttacaaaaaaaaaaaaaaaagataatgcatcataaatgacaaatagcaaattattaattttgtattctgaatacacttaaataatcatttcatccgtgattgttgccacttttaataacattattatttaattcacaaaagagtcactgcaacaagctctcaatcttgacatcatcgatttattttcctttaatatttaccaaaatcaatataaaggaaggagaatattaaattttttacactaaaaaagtaattttgctttagaaaaattaaaaaatttactaaatttttaaaatccatcactcatattatcatcagttataatgcagtataatgattacatgaaataaatctcctcaaaaaaaaattacatgaaattaactataaacttttatatgtcctaatcttcaagatttactgtgtacaactcctgcaaaagaacaaatgtgtcaaaaataaaaatataatttaattaataaattttaaaatgaaaataattaccacatgcagatctacgtcattatcttgataatttacggtgattagtttagttgttgtgtctgtgagaaaaaataataaaaattatcaaaataatataacaaaatattgttaaagaggaggttccaatggttatattttttttagccatttagattattattgaat

SEQ ID NO: 229126 - DNA, 2070 bp, Cannabis indica
ctctagttacatttcgagatagctgctttaacttttatattttgcttcctctactcgtagatcacattacacataggtttgatacttagtatcccagataccatgtctaaattagttgtactgagtcgtactatggagtagccaagcagtacgggactatgatggatagggcgagtcatttagatgagagctggaatttagaaccaattaatccctatgatatattcaggatcacgggttgtagggatgttagaagatattatggtccttctaccccatattctagtgactatggtaaattccttaggtgaaaaattataccccaaactttccttttacttgtcttcaattaatgttatcactttatcttgtctcgtagaaatgcatttcgagggtctcgcccagaaagggaagaagagagtgaccacctcggaggctcctttcgaggtgagggggagcccctcaaaaggcaaaagaaaaccacagctaataagaaatgagcctcctagatcactaatctcgaggtccctaaggctgaaacccaagatcagattcatccttcggtcttcgcaagtactgacgagcttctccctaaagagactcaatcatctgcctcctcgagccaggccattcaaaatactacttgtcgaggccggaaagataggctcagagctcgcccaagagttcagagctgcatgttggcgtcaattcaaggctctccttccccatgattgggatttaatcaatcatggggatttagagggagtacttacaaggagtttgtctcacagtctcttggtaagtttctttgtccttatttgttcacttcttttattctttttcctcttttttatactcatgcatctttgtttgtggatttccaggcttctttcctctcttttgtcgcccagcggtgaggcttggaaaaggtaaaatacttggagactgaggtccataactaaataggccaacacgaggttgtggccaagaaatggaatgatgcccaactagagattactcgccttaataaagaagctgagaagatgaagaagagtcttgaagctgctgagaaggagacaaaggtcaaaagcgatgaatgcgagaaggttaaaggggaacttgaagctgctaaggtgacgcttgaagggaaggaggccgaaatccatgatcgatgtaatgttgttggcctccgtacaatctatcgagcctggatggaaaatccagatatagatacaagtttcctggaagaatctaaggaggaaattcttgctttctacgaaaagaccaaaaaggaggaagaggacgaggaggcagccaaggaagcaaaactatctaagtctaatactatgtaggctttggtttttatttttattacgtttgtggtcgtaaggccgagacagtggtttgccccttgtggcattttttgtaaagacatatttgcaaggtttgatggccaactttgcttttcattttttttttatctttataggatgcttcgtacttttatatttgaacttaaaatcttcttgtttgcttgcgttttcattcacaatataaacaatcatattttgatcaaatgcaaaatactttatgttttcccactgctcatattttcctttaataacatctaagtagtttattatctactatgtgcgctagcagtttattatctgccatgcttttgatttatgagcagttatcaattctgcctcgcaataacagctataatttgtttcaagcaaacttgaatatacttttaatgatttatcactttctatattttttattgcttatttgaatagttaggttgtctattcatatattaggtttaagtatttttttcaacgcatctttgtgtctcgtttaatactctcctatacaatgtaagtcgttagtatttagcttcacatgtgagttatgagttacatctcatttataacttttaattttcttttctcgtcagacagatttttaatcaaaaagttattcataatagtttgatcttcctttctcgttaaattttaaagagcaacacattgtaattacatgaaaaaagattattagtgatta

SEQ ID NO: 229127 - DNA, 756 bp, Cannabis indica
tgatagggacatgaaaataataagcatgatcttctatggccatctcacaatctggacgcatagtagaatttacaaagacttactttttgttgagattatttcgaataagaaagttagtatgaattacttactacaaaatgaagcaatgttttaaaactgaaagtgaataccaaacaatcttctcaaatgctatcgaaaagcactctgccagtagtgtatcatcagtgacggagcccgtcgtaaatgttagtaggggcatttttttttttttttgcaaaagtagcttattaataaaaaaaaattcttatttttataataaagaaaaatataaatgggacataaataaatatgtgagaataaaaataaaaataaatttttatagaataaatataaaaatatgtgagataaaaaaattataaatttacaagaataaaaataaaaatatatgatggcaaaaattaaaagaaatattttaaaaaagttatgcaaaaaaaataatttcttaaaagttgagtggggtcatgtgcccctacatgatcccattcccctccgcctctgtgtatcatacaccttattcacttgaaatctgtgaatgttacatactttcataaaatctacctgaaagaaaaccttaaatctcatgagtttccgccaatgcgagctcacatcaaattaagaccaaacatcttgatctttcaaatatatacaattagctcatttcactcaaagtacattttatctgtatatattttttgt

SEQ ID NO: 229128 - DNA, 995 bp, Cannabis indica
tccttataaaggagagcatcaagttcagattggaggcactgaactcgaaatcgactcatcttgtaataaaaattttaagcaaaaagaatgatagctaaagtgttgtgagatctcactactgtttggagagattagcaaatggtaattgggtttagggattagttgagagataattagtaggaactgaggtagcgtttggttggaggtaatgagatacaaaataaataatttttattttattcttttgtttggttgcatttcaaagtattggaatatcatttagtggaatatttattccattttaaatttttttaccaatatcttatttaatatcatgtatttcaacaatcaacctaattattaaactacctaaaacacgtttttctaaaactaaaattaaacaccttaagtaacagaatacttatagcgatgacatagtggaataatgtctccttccgccaaattatctaaaccccaaatcctttctatagcagggtaatcctaagaacgtgaactgacctttttagctttatctttctaaatagtcttctgaagtaatcttgcaattacctaaactactgtaggcaatttctcaactcactaatgatgatggtgaatttctatgagaaaaggaaaagatggatttcaaaattcactatagaagaaatcatgagtttcatttttcttgttctctaccagctaaagactaaatgagaagagaatgagagttaaatcttagctctatatatctttctttaattaagaaatccttacgctaggttaaactttaaaaaactaaattctctagattgttaaaatttaaattttttaataaaatatatttttttatcagaaaataatcaattcattataaaattactatgaataatataaaataggaaagaagaagataaagagagaaaaagaaactgaatgagaatctatcagtagtttattctaataggatgaatccctatttatacaaaaatataact

SEQ ID NO: 229129 - DNA, 1610 bp, Cannabis indica
ttgcacgctgcctatcttcttgtagcttaactttttctattaatggtgacatcaaaggacatgtgaagccaacaagaggactccgtcaaggggaccccctctcaccttatttgttcttgatatgttcggagggtctttcaagactgctgcaacatgaggaggctgtaaataatcttcaagggctgagaatcacaagaactgctccatcaatctcacatctactctttgctgatgacagcttgttattttgtgaagctactacttcttctgcattggctattcaaaaaattttgaccatatatcacaatgcctcgggtcaactcctcaattatcaaaagtcagtcatgtctttctcccctaacacgccgcaatcgactcaacaattttttcagaatacattgaacatgccaataagtgagtgtcatgagcgatatcttggtctaccctcatactcaggtcgtgataaaaaggctctctttagccatataaagaaagggtatggaagttgatgaatgcttggaatgagaagttgttttcagttggaggaaaggaggtgttactaaaggcggttgttcagtcaattcctacctacgccatgagttgtttccgcttaacgaaaacactttgccaacaattggaaagtatgatggctaacttctggtggggctcttctaaagatggttctaaaatacattggaagagatggaatttgctttgtaagtctaaatttgaaggtggtatgggattccgttcgtttattcattataaccaagccttacttgccaaacaagcttggaggatctttgacatgcccaattcgttacttagtcgactacttaagagcagatacttttcaaataattgctttttggaagctcgacttggcaacactccctcccttacatggcagagcatactttgggggcgagaattgcttcttaagggtcttcgttacaaggttggtaatggctataatatccgatgtggtgtcgacaagtggatacctggtcatactaatttcactccgctccattacactggtccacctacattgaatgtttcttctttgattactgacagtagggagtggaatcttcagctcttaaaggataattttagcccattggatgttgaacgaattttatcaattccattatctttttttccatctgaagataggctggtttggcatcatgcaacatcaggaatttataatgtcaagtctggttaccacttatctgctactttggatgaatgtgaccaagctgcaacctcggatcttcatagttcgtggtggaaaaccttttggcatttgtctctcccatccaagatcaaaatttttgcttggaaagtcatgcacaatgctattcctactgctgctgcattacacaagcgaaaagtaatagattctgcagcgtgttcgctgtgtacttgcgcttgggaatctatcgggcatgcccttttctcttgtaagcatgcgaaatctgtatggcttaacacctccttttctttggactataggcaggcacaacaaatgtttaatggtgactatcttttccacctttctaagctattctcacagcaagattttgagcttctcatttgtacaa

SEQ ID NO: 229130 - DNA, 2792 bp, Cannabis indica
tctcctacctcattttacacattcctcattctctctaaaaggtttaaaagcttctatctcttcacattttctttcttaaaaattgtaaaagtgaaaggagacttattcattttttctcgagttttcttcttaggcaattagcttttgtgataataaaagctccaagtaaacataatttcattatcgttgtgtcaaggggagttaacttctataatctttgtggtctcctttatttttcagttcattaattaattggccactaccatttattagatggtatggatgtatggagttgatcgcttttcaacgtcaatatatactataatattaagaaagcatgagcgttggtagctttatttgggtatgatttcaagttttgtatttttctactttggccaaattattgtataagtttatatttttttttattttttattttttgctaaatttttagttaaatataattgataatgtcattagaatattgtattgtctttttataattattgtatacatatatagatattgcgtattatgttgattaaaaaatttgttttagaaatttttatatcaattacttcctagcttattaattatttagtatgttaaatgtgttattttaatgtaatttgaaatgaaaattttaattttagaatatgtataaataagaaaaatttgtgtatatgaattatttaattatgataaagttgtgtggcttaaatctttagttgttcaaacatgcatatattgatgatcatgagataatttagatatattttagttgtaatgtgtatatatgttaattattatttttttataaaatttaaagaattttgtataggatatttaaattaatggttagaatgtatgacaagttttcttcgaaaaaattataatatatattgagtgtatattaaatttttagtttgtaatcttaatttattatcttgtttaattttgaaatgaaaagtttagttagagattgcaaaataatggttatgtttactcaaaaatttgacccaataatatagacaccacttttaacacatggcaagaaggaaacaaccatgagatcctacctctcaagactagagtggtcaacttgggcattggacaatgtgtcagtgccctagttgacatcagggagaacccaggtaggcaccaagatctagcgaagttgattatgggtgctatcattcaacaaagttcaagaaaacagatctcactgatcctaaaatgatgaacaatgaagctgaggatgtcatgtggagatcctaggactcatcctaaatgctgtactagagttgagtgcctaggtcgacatcttgtgcatcgtctcgcatcagtttttgttcctagcaactttctatgggcgatctacttagccattttccagggatacatgagagacatgccttagtcgagtttcagatttttgagttaactatacgagaaaggacacctaggcagtatgaaggcctaatgggcacccagtgtaatgccctgattaaaagaataccaagtgttttgattacattgcgctaattccgttaatcagggtctaataaaccaagttaataaaaaattaacttaaataacaaaataacttgtaataataatatcaatcctaattgtaatgccttgattaatggacgtcttgtggcgtgattacattgtgctaattgcattaatcgaggtctaataagtcaagtgaataaaaaataacttaacttaaataataaaacaggttgtaataataataaaatatttaattcaaaataaaataattgaattacatgtccgggatcccgtaaaattcttttcaaaatattacaagttgttacatataggctgacctaagcggtaaaatgagatttctaaacaatctcccccatataggacccaacccttgtggtctaggttggccagaacatgtacaattcaccatcaaaacccttgaactcatggtcagtctggcactgctttacccttgtctacacaatagagcacccgtgagccaaggtccagcaagaaagcacaattaaacccaaatataacatatagcatgcatatcacacttaatgttattgcatagataactgtggtaccacattaatataacacgccattgcgcttatgatgatgccatcggatcctaagtctatattgtatagacaatacgtgttatgccacatgtctattactatataaggtcttattagggtttatcttgattttgattaccgagtctaatcttattatttcttaacaacacaactctccacatacattaaactagttatgccttattcacataaccatttacatatactcaattaattcatgtattgcatttatagttcagaagctttagagcaataaccctaactcatatttttaactaaggatttcacataacatacaagtgtgccaccgcgctatactctatgtgaaaggttcactttcttaccgaaattccaaagtatgaggataattttcagtccacaggtgatcccaagcaagtgtcagtattcctaatcacaatctcggatttatacaaaaaagggttaatcttaaaatcacatttaataaatattcatatttaggactccaactctagaccaaataatagagctcgtaatgagctttccaacaatataaagaacgtccaaaacgaagattagagtcaaaagttatggccaaaataaaatttgaaaatcagggtcaaaaatgaattatcgacgcgatgtcgccaagttgaatccttacagggagcatcccctgttttcagt

SEQ ID NO: 229131 - DNA, 2457 bp, Cannabis indica
cggtaatgactgtatctttacctggatcataatcaagccacagacgataataatcatttcttacttaacgtgcttagcagtgcaaatagtttttttttatctcaatccaataatctagtgtgcgggccaatctgagtggaacaatgttcgacaatccagggtcctatatcactacaacggtaaatcaataagtgcttactccaaaacaccgtctaatacctgcatataatcacctaaaattttctaccgaatcttatggtgaaaacatcctaaaataagatacatatttttgctctaatttatgtttcatacagtagagctcttcataagcttctaaattgtatatagaatatctaaaatggacacccgagtaaagttatggtcaaaatacaaaaattggcgattcccaaaaaactgaccaaacagaattctggttggtacagccttgtaccatccagaattccagttcactataatagaaacttgaaaaaatttcaaagtcccaaaacttgctccaaacctaaccaattgttctcaaacttcacagaacagttctatatcacaaatacaatgtatttaaacattcaaaacatagaatcaccccaaaattacaaattcaccatagatgagtgaattattgagttcttgaactcaattcactccaatcaaacttaacagccaaagaattactcaatacacactcaaacaaccttgaattaaaacttaaaagtatgcttaaactctaaaaattcttacagacccgaaatcaaataagaactcatcaaaacttaacctacaacctaagaaatcaaaagggaaggatatagaacttacctccaatcttgtacaacccctaaagttggtttaatcgagtaaggattgactaagttgtgatgaaaaactctggttgcagctaggtctttagggttcgaaggtgagaggaaggaagaaagataaaggttttggtgataactcttatttttgtctttgttgactaaccttaattatcaatttagtaaataaactaaataataaatctaatattaataacttatttcagctagaaaattccatataagacaaaaatttaaaatcttatcaaatgattattctacccctccaacaatacataagctataatataatgtaggggtatttgggtcattcactagctatcccgattaaaccgacaactcaactttctaaactagtccggtatatttccaatgtatcacattccattgttgtcgtagcatttcttaccaacccgtcgattttctacgatcgttggacccgaaaatattttatttcaaaaatagtatataaaatacccacataatctgataaaatctccgcaattaataaattacattttatttattcatttactcaatatttcactaattaactcatatttagcttaagtaagtcataatcctactctaatgtccaaatattcacatatttaataaaatatgttcaattaaatattattatatttttctgggatattacactccattcactactagttcggcccaacacacaatcttccaaacaacacagcaaaactcttttcacacttcaacttggttcggcccaatatagcaattcaaccaaagaaaacaaaggaagccctaatcacttaaccctagatatataaggaaatatttttaaccttgaagctcttcttcctacaataatcactcttttctattccaagttcaaatctttttaagtttcttctctatcaaatagtcgatccaaaaagaaaactagggttagggttctaatgatttcttgggttttctaatgtttctcttcttcttctcatactcttgttgcctatcctttctatggttggggttctaatggtctctcttatcttcttttcctctaacaatagttgcacacaagggtgaggtttctaaggttctctcagccacggttcaaaaactcgacctgaaaaaactcactcacggtaaaactcaaacccagaaatacaaggccactcaaacccaaaagctcacccctaaactctcgacaaaacacaacaccgaacctaaaaatttcttcgccgaatctcaccacaccaaacccgaaaccaagaacaataatacaaacaaaatatcagagaaatcaaaaagatagggttatgagaaaacaaatagcgcaaagacaacacttgaaattattctcggagttcgcccagcaatggttacttctctgtcaagctctcctcaaagtagtcttgatcttcattcatcaacatatcaagtaaagattacaattttgtctctttttgttctcactgtttttctctcattttacaagttaccaactctctctttttctctcttttgcaaatacacactgagaaaataacacacaaagtgttcactctttcttacaatggctctctacaggaaaagctctctctctcaacggctctatgtt

SEQ ID NO: 229132 - DNA, 1709 bp, Cannabis indica
ttagaatccaacttttagcatccaatccaatccaattgtaatgaaaatccaattttttgtaattggattggattggattggttcttttcaattgggttggattggaggttgcccacccctattggccagtcatggccagttcctactcccagggctagccggacacaaccaactgccaggcatagggctggatggccttgagcataccctctcctagggtatggccgaccaagatctagctaatacatggttgtagctcaaccaagaagggccaatcaaccaagcccctgcagcgtcagatcattctgtgcaggcacaattggatcaaatgagagacaagatcaagggcttggctttcccgaaaccatcaaatcttgaactggatagatcaagaggctcaccattcatgtcatatatcaatgcattgcccttgcaagttcaagatgttagtatggaaaatttataccggatgagaagaccctctgacacacatcaagtacttcgagatgcaacttgatctccaaaaagttactagtgatgtgcggtgttagatcttcctagcaactttgtcagaaacatctcatcaatggtatttcaagctggtccgaggaagattcaattcttcgaatgaattttcccaagacttttacactcagttctcatcctcgagactgataccatcgaaactagaagaccttgttgaggttagacaatgacaaagagaaattttaaaggattagattgaaagtttcatgccaaaggccactaaggtcaaaggcctaacagaagaagaccggtatacgaccatactggggccatcttgccattgagtgacttttggaagatatctggagaatcttaaccaacaatatgaaggagttccttgatagagctgacaaatttatcaagctggaggaagttttctgacaagcccagacatggaaagtcgacaataggcagtcttagggtgccctgtagccccacgacttgtcaggtgcgtagggggcactagcaattccacccagacctctaggtgaaagaacactggaagcaagcgcaacaacaacaacaccataagaaaaagtggcaaaaaagggaagtacaacccttctcccacaccacaaaattagaaagataaggaggaagagtatacctgcttcacccttctaactgagaaacctgagagcattcttggccactcaatgtaatttcccatacaagaagcccccctcccatcaatagggagatgagcaaaatggacatgtcgaagttcttttgatttcacaatgacttcgaccatgactccaacgagtgtcaaaacttgaaaagggagattgaataccttataaggagaaacaatccccacttgcatcgttttgcgcagaacaaccaatctcagacacaagcttcacagaatagagaacctatgccacctccagtggcgggtcacttaggggtcatcattggtggaccccacattgcaagcgagatcaacaaggttagggaacactatgctcggacactacgttgcgagcctaaaagtgacatcctagccatggaagaaaggggctccaagcaactcaggcttggggaacccgccatcttttctatagaatgagatgctgcccaagtcaacttcccgcacatgaccccttggtcatactacataaatcgagaacataacagttgcaaggtgcatggtggatgac

SEQ ID NO: 229133 - DNA, 889 bp, Cannabis indica
atttaatgttatagttaattatactaataaaataagacaaatgacataaatataaataaaaaagtagtgcatttattatgatgtaaattttacatcatagcaaatgttgtgccaaatttggtacaaaatttgctatgtgtcaaatttaaattactttttggcacccattggagtatactttttgttaaatgagttatattttagctttctatcaatgaagatgctcactagtataaattggaaataaagtcataggatgatcaaacaaacattgtacacaaaaccttttcctctttgtttgaagtgcgattttgaatcgccttgctttctctgtgaaaatcgccttttgaatttgtcttcgagccgttcaagaccaccagcatgctttgagttgtccttaggtcgttgttctttttagaggggcttgatgcttttggttgctcaaagtgttctctcttcgaaacgctccctattctctagtgggtttctcaacctttcgattccattcgacctaggagtcctcgtagggctttccagctgtttttccaggcggtccttttgtggtggctagtgttggtcttggggttttggtgcgttttgtttcaagcttctcttccacttagtctagaacagaactcgtcttggttcttaaagcttgattagggggtttctgggttggatggcctgcttctggtttgattatgtcactgtctctgatttttttttcttttggcgtcgattttggtctccattcgcttgaaactttcctattcggatctaatttgtgattggtaagggttttgtgacagtcagtagtcccgtgatccgtaaggggaaatacgaggtaaactgtgcaatcccatatcgtctggggaaggtcaagtgtgat

SEQ ID NO: 229134 - DNA, 890 bp, Cannabis indica
gtaaaaacatgatgggaaaaatgatatcaaatatgggttctaaaacttaccacttgcataacatcaaatcaaatattgacaaaaaattttatagactctcctattaattattaaaatactaatataaaccataaaggttttttaaaattatacccaactatttgttagtttttttttatataaaattacactaaatataacatttatttaataactaaaattttattattgaattaaagtttaagtataaaaataccaaagtttttattaaagtgcttaaagagtcaacatttattgtggcaattggtgctaattttttggcactaaatactaaaatattttttaaaaaaaattaaaataattaaatttttatgtacttataatagtgtggaattgtggtggcaacatctaggattatgatgcaaaaaaatacataaaaaaaaataaaatattatattttagaatgatgtgaggataattgacacaagattacatgctattaatctttgagtataataataattcacatttctttttgtatttaccggtgccattttagatattgttcccattataatatctaataattgaccttatgacatgtattgtaatttgtacgtaagatatgatgtattgggtgattttaattttatttttgtgaggaaaatgcaaaggggtcatagaaggatggctccaaatttatatgataaagtcaagttcttatcctgtgaaagccaatgcaatggcattggtcaaaggccaatgtaatattaatctttatattaaattagaaaagtgatgtatagcgacttaacagtcatgtacattgtacgatctcaaaacacaaatgtacattgtacttaattcccttaaagagcattggaaaatat

SEQ ID NO: 229135 - DNA, 1233 bp, Cannabis indica
ctatatcatggaggagtgcaaaacaaacactcatagcttcattcaccatggcagcagatttattgcgtgttatgaggcatccaaccatggtatatggctgaggaactttgtcactgggttgcgcattgtggatggaattgaaagaccacttaagttatattgtgacaataagtcagctgtattgtattccaacaacaataggagcttgacgaagtcaaaacacactgacatcaagtttcttgttgcatgtaaagaaagggtacagagtagacaaatttctatagatcgatttgttaagaaacgacccaccaacagccacctattatcaatcttcaataagccatccgatacattatcaaataacaatccctcatcatcatcatcatttatcgaaaaacaatatttttttcatggtttcagtctgattctatatgttggccatactgggaagaagaaacaatcgtcaccaaaacaacaaaacgcaaaatacactaccagaaaacttttcaacaaactaccatgtcaaaacgacaagacttaagcacactgtaatataagtaaaatggtctttatatattgattatatattgtaacaaacttattttagtttaagaatactcatataaaattatattcattctccttttatgtttagaaattattttgatatattaatgacttttatgtttagagttcttattttaaatatatatataaattaaataagaaatagaaatataagtaaaaattatttgaaattaactaatagatttatatataaagaaaattaatttttgtttctattattttaattaaaaattaatacattttagaaataatttttagtagccttttagaaaaatgtcactagtataattttttacattttcaaaatgttactaaattattttttaaacattaaataaataaataataaatattataatgacatttgaaattgcaaatgttatatttaggtgaccttttaaaataaatttaaaataaaatgtcacttgaaaggttgtatttggccatgttgagtttctatagcaaatattgtgatgctaatttagttttcatgagagggtttaataaatacttgaatgagtttgaatagaatttttagggttttggtgaaatggtggagcattgtacttgatgttttttatttttgtctttaatgatggataatatctaaatgtatagggattaagtaatctataattgttgtaa

SEQ ID NO: 229136 - DNA, 1093 bp, Cannabis indica
gtcgacatcatgacagatatagtcaatatcatttagttatggaagttgtacaactaactaaattctcgaggagttactttctttgaaaattgatatatcttcatcatcctcatttgggaaacttcatacattatgcaagatgtaagcactgacgagcttccaataatctttgttcttcttgtaagggatgtaataaatcaactttcttgagatacaagtatgaacaatttattttggtacaatttacaggaagcttccaatcatctccattcttcttgtcaaggatgtaacaattaactttacttgagatgcaagtatgcacaatttattttaggtaccattcacaggaaacacatatgctagtgacaaaaccatcagtttatggccagcaattgttccttcaaaccactttcactttaaaagtataacactacaattcttgagataagttcattcatagacatgttgccaaacaaaatgaaccagtggccaaacccaactgcacatttctagggtccactgcaaggacatatgaagcctgtcaaattgcttccactcctttgcatccatgcgatgcctaagtacattgtctgtttcgggtctcttaaagtaatgcaaccagatatcctcaattaaatatcttgagatatataacctctttaatctcagactcaagggaaagttccacataactttgcgagcaacccttttttcatctcttttaatgacatttgccacaaatctaacaaaaattattcttcgtattttcttccaaaacaaagcacaattgatcatgtttgcatatgtcaatcgactaataaactaaccctatattacataatataatctttaactcgactttggtaattttatcctctttgaaaataactcaatgaagatggatagtaatatattgaaagaatgattgctcttgagaactttgtactgcatcaactttctaaaatattttttaattataaacttaacgtgttacaaaatgaactacatatcaaattacaattacaattatcatacactcaatgttaactttaaaaatacattcatatctcaaatcctcaattgctactaattc

SEQ ID NO: 229137 - DNA, 1992 bp, Cannabis indica
cttccttgtgaatttcaatatctatcataggtttattattattatttttgaacaagtttagttgtctgttgcttttttttttttgacctcattagttttatatccttattaacatatttcttctatgttacattagtacttatttttttaaaaagaacggtataagtatacaaagttttaaatttataagtggcataagtttaatattttttttagtgtcgtaagtattcaatatttataaaattgtaatttttcttcaattttcatcggtacggactcggttttaaatttattaaaaaaatatttgaaagttactgatactatatgtttatatctagacccgataatcgaaatattggattttatatgtatcttatttaagacaataatagagtctgtactgacaaaatttgaaaaaaaaattacaattttacaaatattgggtacttatgccactaaaaataaatattaaatttatgtcacttacaaagttaaaattttaaatacttatattattatttaccttaaaataaataaatggtacttttaatgtatttgccatagagtagtaatatgtgaaattaaattattaagttgacacacacttatttaacaaaaaaaataatctaaactaatcatttttttaagatggatctacttattaaaagtgatttaccacccaatttaaatattaaaataaaaaaaatgtatgcatgtcttcccaattaaatttgacacaaatatattataatgtttgaagttatttttaaaacaaaatatcaaaaactaaaaacactaaagtaattttttttttcattttgttgtatttgaaagattcaattataaatttacattttagtaaaacacaaaaacacttattagttaatttgtgcaattggtcaatcagattttaataaattttaattaattaaacaaattatgcattgacaaatgtcaactacctgactataaaatttgataaaaaataaatatttttttttttatatagtgtaaattaggagaaatgctaaagggtactagtggtgcctaacacactcctatgcgtcagtatcgctattggttcaactaagtatcgggtcccatatagtttaatataatagcttttagggagtatcactagccaatcgcaatgcgacatatcgagaaggtgctaggcaccacttatgtttaataacaatgctcgtaaattactaatgagaattagataatgagatatcttaatcaatattttaattttaaatatggtaatataaattcatgcttaatttacacaaaataaatatgtagagagagatggacaagagacaaaaagaaactaaaaagaaagagaaaaacttttgtgttgtgtttaggaaaatggggtgagtgcatgtgttggatacttttcatcatatttttttaactacttaattaaagaaataaaataaaaacaaattatgtttcttaacaatgaagtaaaagtatatggaatagaccaagacccacattatgcctttattccataaggtaaaaacatataaaaataaacaactaatatatagtactattttttagttcaaagcaaaaaaaaaaataaataaaaaaaaattgaacatgctttatatttatatttcatttggtgggctaagaataaaacttgaagtacaccaaaataaattatattagtcacaaaaatcaacatgctttatatttgagaatattgtaatatttaaaattttaaactaaatattaattttttaaaactttataataacaaacttccacataaatgtggtccattattttaatcaataggtaacatattctttggtgttaattatataaattagtgttaatatttatacataaattaatatataaaatttgaattttcttgttgatttgggttaaaatcacactttaattattaatatatttaatttaatttaatttttgaagtgttcaataccatgaaaataaaagtgggagaaa

SEQ ID NO: 229138 - DNA, 870 bp, Cannabis indica
cacctgagagagttgaggcctaagcaaatccacttttaaatgatgtttttgtagcaacttgtgttttatttttttttcttgttatgaaacaacttaaaatcatttttggggtctctttttggtactaatgttattcttcttaagtttagtattgattattattacttcttgatatagtaacaaagattatctgaaacacagtgatacattgataagttcttgaccaaatggacacaacaaatgtgtcatattcattggttttaaaatggtggtaatgcatgcacatgcgtcgcagattacgagtaaaaacaccacattgcaatgtaaaacattgttaataataatatcataaacaacaatctgattttgcaattttctgttcttcactcgttaataatttccattcttcatgagcttattctgaaattagtttccaagagaattgatgcagatcagttgcagagtacgatgtgatatatacaacacaccttattataataaagacttgtaaattggtatttttgcatttaggctattgtcacattaatgtgagcatttgtaatctttctgcttcaagtttttattggactttttatatggtttatacacaagcatgtcactctagttgttttatggactgttacataccaacaaaagtacttcttagatgctagttgttttatggactgttacataccaacacaagtacttcttagatgtcagtatctgtatttattttttttgacaaaagaaaaataaatttcattaaacaatcaaatcgttcatcaatacagaaataaactctgagggagcattgctcacactcaaactacgttcagctataaaacaagtggatctcgttaaatagtg

SEQ ID NO: 229139 - DNA, 940 bp, Cannabis indica
aatttcggtagaattaggataaatcttactaaaaccattcataatatttacataatacaaataactagttaattataacatagtgataagaagttaggtcacataaaaaataataatattcacatttatgtaaacttttggtgaagaattatataagccataggaagaatttttgttgctttataacttaatttggtgaaggagcatcaattagaactagaaacatcccaactaggttggcacccaactaaatcacctatcacatgctcaacaaacaccaaaacatgtagaatttattcatgtgaaacaaaagagtacaaaaaaaaaatagtttagaaacaatccaaatatgaatgagaaatcacaaattggaattggcgaatcaccaacctagaatatgcctcgttaaaacccttatagaaaaaacccacatgggaaaaaatctattagggaaaaagagtacatattcaaaaataaaacaacacacaacaataactttaaacaccataacatatatgagagagaaatttcatcaaatctgaaagccctgaaaattaaataatagagattatgatcgcaagaaatttcttaattagcaaatagcaaccttaattcaaaagacatattgatgacataaattaataaacattatttgtatgaacaatgctttctcatgagaagaaaaaaaggccaagatgatcataagaaactcattcaaaattgaataaaagaatggttaataatgaatattaaaacatgaagaatcataacactaaattagtattaagtaattataatacataacacaaaaataatgttattatattatatttaatataaatgtgcaaaaatgtaattaaatagggagtcttttaattaattgcatataagttaactaaacacatgttaaagtgttatgaattgcaatcaactacacttt

SEQ ID NO: 229140 - DNA, 1772 bp, Cannabis indica
aataaatcatctcaatatttaatgagaaaaaatgtattgtaagactaaaaaattatacaaatattaagaaatagaaaaaatgagaaagtatctaatattacactatatatatatatgaacaatttttttttaatttatttatttttttaattataaagaataatgattttaataattataatttattttacttaaattattataaaatttctcagcacacacaagctgggaaaagaggtcgaacgaaaagcagattccggccgtttcgtcccgaaaactccacagaaagaagagggttcttaagaataaagcttgccattagcttcgacgagaaggatctcaggtacaacccgcacaatccccttttttctataaccatgaaaaagcattagctctattatagtgtatttgatgaaactggaatcctacttttatgaattgggtatctccatgtgtgggtgtttggggatttttatttttatcggtgttttgtttatacggaaagcttaaaaatgtcatctttcaaaccaatcctcgattttcattatccatttatttacttgaaagatgatgtcagagttcaattcttcaaacacattgctgatctttctggaaaaaccaatttgactccttggtttcactgttataagtggagggaaacatgctgggaacagtttagcaattcaggtatgttgttttcagccttaaaacttcgtgtgttctctacaaaacttgtgatttttattttcaacttttataaattcaaagattgtgaatgctttgctgcctctgaattatagcctttgtggttgctttactttatttctagctggaaaaaaaaaaactcaaattttcttcatttcaacattctttgagaatcctcaataggtgactttaggccaagaaatttacatgattagtacttctttagatgagacattatttaactatgattggttgcatttcctacacaattttctgtattaatatgataattttgtttctgacgaaaaaagatataaaaatgtagataaggagataacactattattcacttaatcattgactgtattcttattacatatataaaaagaccatattacaaaattgtgtatgtgagaaagagaatacaaaacttaatactgacagttagttgcctgtgtgataaaccatttatttacttgactcaatttttcatttttcatggttgatttatgcatttattaatgtttcaaacaaagtcttgattgttctgcaagaataggtgtctgattttagttgcaagcaaggtatgcacaaggtagagctgaataattatgtttatggttcactcccatgaggtttcaggttcaatatcttgtagggagcacctattatctttttagtattttatgttttgcaaagattttgtttggttacagtgccagtatgtttggtacaagtctatgttgtttcgttacagtgccagtatatcatgttgatgatgcatttcagaaagggtttgttaaacatacaagtggtactcagcagcaatttgagtccacacattctccactagctgctgctctgagggatgtaattaattcagcatcaatgatcactcgaaccttaagtggagaattagctgaaggcctatgtaaactgatggcgtttgcagctgcaggtgctagctcaaaaggaccgaattccttgacaacacagttgagcaatggtccactttctagtgtacatgaaatggcagaatcaccggttgatcctattaaggaattatc

SEQ ID NO: 229141 - DNA, 679 bp, Cannabis indica
caaacttaccattggtgatcctacctatgctaagtttgagggggtgtgttaggacagcttgttagatagttagttaggatagtagttaattcagataactacctaaccacctattatttcacgtggttaatttttttgttcattactcgtgtgtatataaacttgtaaatgctcagattgatcaataagagatccttttctctctctttctttctcattgcctttcttcttcttttttcatcttcttcctctgttttgttcttctgcaactatatcaaagaggttgaatacctctcacagtctagagtctagagtggttaacgttaagtattttacgttttgtactgttactgatagtccatatgtcagcaaaaagatattttaaatttttagttgtctagctggttacaatagtctatttcgagttttattttttagctaggtataaataacatttttttgtcattgttttgactaacctttagattacagagcataatgaatcttggatcgatcgaatatctctttcttcttctctctttgtttgcatatggttttatactcttgccggaactccattgaagggtgaagttcaaagtaagggttaagactactgcagcagttgaagggagttcaaagtggtgcttagcaattgcacaaggggatcttgtgcataacc

SEQ ID NO: 229142 - DNA, 2483 bp, Cannabis indica
ctctctcttctctctctctctctatctatctatcttgatcgattgtttgaactcactcactcactctccctctatatcaattgatcatcatgtcggcgccggcaaccaaactagaaaatgaatgtccaatttataaacttagtttgaagtacaacgaatttggaacaatatccaggtttctaacagaattcagtgaaacagaagttttaggtatctctatcactataaaactttttatatgtacatataaatatatatatatatatatatgtgtttatataatttttctcacatatcctaatccgtaaatatttttatttgtatgcaaatatgtttgattcactgactgatcagatctgtgttagtgttagtatagttaaatagttgttaaacttagtttatatgtatgcaaagatgtttgattcaccgaccgatctgatctgtgttagtcttagtatagttaaatagttgttaaaaattagtttatatgtatgcaaatatgtttgatgcaccgaccgatctgatctgtgttaatgttagtatagctaaatagttgttaaatttagtttatatgtatgtaaatatatttgattcaccgactgatctcatctgtattagtatatgtatgcaaataattcgtttataaatagttaatcaattggtagagaattgtttttcatgtgcactgccttgttttcattctactcattctacaatttgctcgacaaaataaaatttaaatgtgcatatttcatggaagttctagaggttttgccgtagttactaaatgtaacaataatttggacaaagcaccatacgccatgaaaaaggtatcaattcttgagggtgttgaagattttgactttaaatactgtataaattaataaagttatatactcttaaattaaattaaattaaattaatgtatactataacatttttattgttattaaatattaatatttatttgtagggaagcaaaatttttagcttcgttggaccatcccaacataatcagatattactctgtacataactaaatagttcaatttttttaatttataattaataagttaagtgttttatttttttttcctaattatgctttcttttttttcttcagttttgggttgtagagaagatgaaaggattgagagcaagagactcaaccccatatcttccttgtccctatatacagttgcagctctgtaaagagacactcggagatgtcataagtagtaatcacagaggtaacatggtcaagctttttgaaggacggctaaaagctcttcatcacatccatgtgaggggcgtaattcatatgaatgttagccaaataatatatttttggactatgatggcaatatccatttggctgattttaatgtaggtaaagtttattttttttttatttttttttgcatatgaagaaacatacaagatttctaccaactccgatacgttttcagttggtgtaatattgtatgagtgtgcatcaaacttcagtactgatcaacaaaagaagattgttttgagcaaactattgaaactggatggtgaagataagatgattgagataaatcaacttggggctactgatgtctacaagatgatactgcttcaattgctcgatagacaactatcaaaacgtccttcggcagagatggttttaactcgactcaaaaaaaatgtttgtttaatccatagacaatatgaacccatagacggtatgaatccatattagcctgaaacttggacttaataataagctagtattcgaacttaagttataaaaatatctaaactcaatttctaacccaaaattacctcaatttttgcaagaaaacatcagaattagtctcataactgcccgagaacaatcctattctaatttgcaaaactcctatacgaaactaattgttttaaacttaaaacggaattaaaccttacctaaagctttcctgttctgaaaattttctatctcgctactaccagagcttagatcgctaagttttggattgaaaactgaagaaaataaatataaaaaggagagagtagttttgataaaaaaaaatgagagtttcatttcatttacgtttactattataaatttataatataatatatataataaacttatctcataaatgtatataaaaatataatattataataataatataataatattaataataaaataatattaataaaactttattattcataattatcttattatttattattcactacgaaatttatatttctaaggcgttaagttgaatcccacataatcctaattatccaaacacttatattatcaatttatcataatattctcattaattctatcagttaaacgtgttatgatatttctgacgcccaatcaagtctccaaggtcgccaaatctaaaaatatttttattgcacgagtaactcatattacattcacatacactatataaatctccataatttat

SEQ ID NO: 229143 - DNA, 1493 bp, Cannabis indica
tataaataggggcagagtatacaaaaaaagggactaaaaacctttgagtgaaagagatcataaactgtaattctatatccagaaatatctttaataagattgactcgtggactatacagagttaactgcgaaaccacttaaaaacttggtgatattattatccttatcaattctcttatatctctgtttaatttattacgtaaaagacttattaatcgttaacaaaaatcagcgttaatagtagaaaactctcatgttccgtttgttatgcccaaaattatcccaaggaacgtaaaaactatattgtttaagtgtttaatatcgcaataataaagaagagtgtcgtattaaaaatattttggggcatgatcaagatttgtattttgaacctatagatcacgcacttaaaaatattatttaatttggtattgttataatatttaggtcttacatgaaaggttgaaaaattcaaaagagagagagacggagaaatactttcgtttaattgatccaaattgggtttctctagtgggatcccatttgctacgaaaatgtagaatcaataagacatcaattagcaggcacaatggagataagtgaaggccaaaattgggctcaggctcaatgtcacatgcgatgtttctaaaaaatgctcaaacaagattgggttggactatttgactagttatgacgatatgatcaacataccaagcccaataagcccaaaaagatacagtcaagtcagacattaacattatccatggcctaacattgagctcacgatgatccgacctgtatacaagactgagtcttatcactcatctaacgatctctaaagtgatcaatcaaactgaccacactaatgacaatctccctgatcaagtaggagaggagcgcttcacaagggggtgagcggtcatgagtaacgcctttccatagacgcctataagagccactcttagttactgagagagagatcaattttcagtgatcccactacttctcacttatcgttcacactctcattctctctaaaattacatacttatttctgcagtcaagataggtggtaacttagttcagtcatttactatcatctttttttattacattattaacaatcttcctgacttgaccgttggagtccctttggtcggtaccatcccggtgtcccaacgtttcccaattaatttcttctttgttctacaggttgtcgatacccgcgtacgatcatcttcgattgattgtggattttagggtctaaaagatgtaactttcattgatctctattaatttagggtaagattaatctaaattattttaattagctatatagtaatatatttatatataacaatttatttttccatcaacaattattattgggtgagaataatatttagggcattttacaattttgtatacattattttaattaattacaaaatatgtgcaaaaaaacttattatcattttttcatacacttttatata

SEQ ID NO: 229144 - DNA, 1562 bp, Cannabis indica
ttggtttttgcataattaatttctaatcaatccctgtggagacgatactcttttacttatcattgtattacttgtttgtgactatgtccacttgcgtatatctaattttagcacaaacatatgtccgacaatattggaacgcgacgtttggtcaatagaatcacatttttttatgacttagtattttagtaataatggggcaatttagatagacattgagaatatcgagaatattcgagatattaggtttgatcaaaatacccttgggttgtaaggatatttttttggcttaaacaagggcaaaatggtctattttctttatgtttcttttgtctctttagttgagttttattatgttgtataatatgattttataatttaataaagttagaaaataacttagatttttatttaaccaaaaattagaaaaaacaccaaaaattcaactttctctctctcgacctctctagaatcagcaacaaactagggcttttagagttcaattctgggtttgttgtcaagatcttagtatatctacttcaaggtaaactcccaagctcatcactttttgatttaggttttttgcatgattttctatggtttaggtgctgtgggtttgattgtgtatggattatgttttcagaaattattatagggataattaagctgatttaagttaggtttggtgcttggtgttgtgcttgagcaaggtttgagctttagagctcaagctttgctctccactggtgatatttgtttttgaggttgttacatgattttattgcatgcattttccttattgtggtgtaaataggtggtctagaagatttggaattatttggggttgaattttggtgtttttgggggtttctgcactgaatcggttgaccagttcagtgggacctgtaggaatcgaaattccagttggtccccaggcagaccccacagaattggtcttctagttggggaatcgatttatcggttggggattttagggcaccctagattttcctgtttttacgatatttaggatattgccatgttatccatcgatagggaaacttttagttttgattttaagtcctcaaaaagtaatttagcgcgtcactcaccagttttacgaatattgatttagggtcttgtaaatcgtcgagcagctgttctactcaggttgaccgacacacctgaattcgaaagtgagataagattagtataatgatatgcaatgtgtttacacgtttaacacacatatttattaagcctgttagattacattgatagcggtatcaatatgatactctttaatggtttcacttttaaaaattagtctatatgtatatatatgattgcttatttgattcttacaatagaaagtttttaactctgcagaattatgatgatgatttttacaattacgtacatataaaattttaaactgaattaggcatgtacagtagaagttctttcttttattttattgtgatttggtatgttttattttctccaaggcatcttttctaataagtccaatagtagtgtaatgaccgctctagtaatgtgga

SEQ ID NO: 229145 - DNA, 1197 bp, Cannabis indica
attcattcataataggactcgttgcttttgatccaaaaaggaggacataaatacagttttagtataaaagcttcatctgtttctacgagaagattttccatggctgtccttgttaataattattctataatcatcctcttcttcttattgttgtttcatattagaactagctccgcaaaatcatcaaatcctcattgtccaccctcttcttgtgataattatattagtgtaaaactaaataagaaacagggttgtttgccatttaaaactaaataaattaatcacatcatatatgttaaggtctgactatcttagtgtaatttgtgtgattattgtcgacagcaacagtatatataattgagaaataagagtgaaggtgattatgatctactacaaatattaaagtactatgttgtttgggattccaattattcaattttaattagttggtgaaaagagataaagagttgacagctcgttacatagtcccttcgcattcattcaattcctaattatattcattttctctttttgttcatcggccaactaggccattcatgaaatgaataagactgctctggtcttcccaactaaagaaaccacaggatcgtgcagaccttgttgcatatttgaaggtctgcttgatattttcaaccattgcctattccattttgtagttcaacaattatataaggattaaacatttttatactatattctgatttattttttctttcttagaataaggatttacagtcaattatataagcttgtttcccttttatgctagcaaagtgtttttcagtctagaaaaaggaaaaaaagaaagaagattgtcaattatataattcatttgttgtttttcagtgacagaaggaagagtaataaacttgtgaatgtagaagatgttccaagtgatgtgcagcctgaggagaatgaaagttctcagcaagatagtcttccggagaagagtcccgtcaagaaagacaagtcatctgatatggacagtgaatctgatgattcaagtacccaaaaaattgatgaaaaggctgataacatcatggaatttactccaagaaaaccaaggtagttttcagtattttttactataagatgataaacgaaatcttatatattctataggtattttgcattgctgttattgtcacttttactaatattaaatgagacatgggg

SEQ ID NO: 229146 - DNA, 1980 bp, Cannabis indica
aaatacaactcactaacaagaagaccaagtcatctaatcagcacttcaaccaacgaggagtcagagtactcaagcgagacgacaaagtgacgaaccaaccacctcaagggggttggttggccctatggccagcataggccagccaaattctggtcatcccatggccagccaacatccatcctgaaggtgcatggccagccagcctttggcctgacaagatttcagtacacagctttcagacgtggacagcaagctagaccacaaattgagccttaacaactcacgaatatagaaagaaaatatctattttgaggggtattttagtcatttctaggggttgaccccctgcgaacccaaacatgtcgacccctaaaaaccaaacgtcgtcgcgccctttcaaactcgaacccttcgtgcccttctcctaaccatcttccttccccaagctgggggtgggctatgaggatggcgaggttaaggtgaggacggtcggacggtgacgagatgacaagaaaccaagagagagagaggacgatgaggttggggtttactgggtttgggttcgtgggtggggttttgagtttttgggttagggtaagagttttttgggttggggtaatttatatttggattatttgggttgggattagattttttgggttcaatttttgggttggggttcgtgggggtgggggttaatttctgagaagaacaaacgaagaagaaatagaaagatgaagaaaaaaaaaacattaattgttttttagatattttaaactattttttaacatataaattattaaaattaggtggactaatgaaattttgctacatgtacactgtggcagtccactttagcacttaacagaccaaaatagatggaaggactatagagcaaaagattgtcgagtccaaagagtatagccgtaatttttcaagtaagggagttaaatcataataaacataaaatataaggaatttagcaataagttaccttaaaaaaataaatattaaataataaaaaggaaatagtgtaagaaaagacagttgctttctttcaaaaaaaaaaaaagtaaaataaaaagggaaatttgaatttccatgcttaataaactcataaattggttccctaaactaatactatgcataatttgtaaaatgggataacttttttctaaatcccaaaatacacctcccatttttcccaaccgtccctctctcttcctctttttccaaaaaattaactgaccatcaggccctatatcgggcctttggcttcaacccagattcaattttttcatcatgatgcatcgggcctccatcggacttgcatcgggcctgcctagaaaatgcattttccaacccaaaaatcacagattaaccaccgccttcaacccagatccatcggactgcgtttgcctttgatcttcggtggtgttcggccggcgtgcgtgcgtggtggatcgccgatggtggttcggtcgagatgggtatggatgggcgtgggttggttttcggcgtgggtggtgctcgccgtgcgtgggtggttcgacgaggaggagagggacgacgtgggtggagtggttcgacgaagaagagagggatggccttggatgggcgtcggtggggtggttcgacgaagaagaaaggaatggccagtatgggttttgggatgggaaatttgagagaaaaaagaagaagagagagggacggttgggaaaaatgggaggggtattttggggtttaggaaaaagttatctcattttacaaattatgcatagtataagtttaggggaccaatttatgagtttattaagcgtagaaattcagatttcccaataaaaaaaaaaggcagtttctctctttcactttttttgaaagaacgcgtttatagcatagaatactaaagagttagacctctcggtcattacaaaatagggttttcgggacggaagcgaccgggatagacccaaaagtctg

SEQ ID NO: 229147 - DNA, 2283 bp, Cannabis indica
atgtcaaacatgcactaaaaataaaaatgttattttctatttaatttttttttttaaattttctctcacatacccgagtctgggtttgggattggggtctgactcttggtctgcggccgaggttcaaaactaggtccgggtctggatttggatctagggctcaagttagtgtccagttctaagtatgggtctaagactaaaatcggggtcgaggtccaaggtttgggtatgtaaaaagaatttttccttccaatatcttcttaatctacaattatcttcttctttcttcccattctcctatcaagtagaatgagtatgtaaaagaagatcaaaatatgataagtggtatattaatttgaataggctgtttaaataattaaaaaaggagataagtaaatcatatttactctttctattaagttaaatgatctataagattttttttaatgtatatatatattaacactaaattatccaaccctcacgttccctaccaccctcttttctcctctcagcactctaaccttaactcagtcccgtagttagagaaagagagagtgaggacaggaaaaatgatagtttccttagtacatagaaattgcatagaaattaattttttttctcttttcagtttaatggttttattttattatgatttaatttttaaaacttaaaattagaatattgtattttccacctggctatttaaattattaccttaggcaattagggtgagatgtgtaagaagattaacagacttaaaagaacgaaatagttaatttgccaatagaaatgaacctaagatagttttcttaccaaaataataaataaaaaaagagattaattctataataaattatgatgggtttgaccataaatttttctaattgaggatagatttaacaattgtaattatacgtcttacgtcttgttgtttagcaattcaaaattatacaacgtttctataatgtacatttatatatattttttatgataccgctctttatttaaattttcattgaatgtgtataaaaatatgagtccatcatctctaattaaatgttacacagaatttttaacaaaacatttggtggaagatggcaataattggttcagtgactttgatttagctattattcccacatcgataacttgaagttcatgtctaattttttaatcttttataattgaagttaatattttttcttttatgtaatatagtaatatcattccaaattgaaatgtcaaaaatgaatttgtaataatatccttgacaagccaacactccaaattacccgccaaagatgtaatgttttgtttccttaaattcccttttgaacttcatccacagccatgttgttctctggcattgtctgcaatggcactcttgtgctcttctctagttcttgcttattcttttggttgcttagtttttctttgagaattttctgtagctgccttagattcttttcttcataaaacataattttctgttctttagttaatatttttttttagatcatacaaatataataaaattaaattctatcatttaactttatgtcaaacttctttaaccgattgtagacaaatttgatagattgttaaaatttcttgtacttttaattctttcttgaaaaagatgagaagctaccttccttgtagcaaaaagagaagaaaagctatgcagagaagttgttcattatgaagcaaaaggagaagagataatgtgcttaattactttgaatggttatgaagaatatgtactatttatattgaatgcctatcaatttattaagagcattcacattaatttctctaaaatagagaaaatttaaaaaattttaaaaagcgtactaaaaatatgttacagtagatattttaaattctttattcattttaatttttttaaaatttactattcacgctctacatttgtagaaaattattcattgatctaaacatatttattaattattttgagttttaataattatttatgtatggggatatgtgtatatatattaatattatatatttaatatgaataaaataaataatttttttaaaaagtagatttttggaattttagtgacatattttaaatgatagagtagaaaagttgttgggagtattctaagttacacctcaaacttaataaaattatctctactcaccaattacattatatgaactggaaagaacaatgaagatataaatgaaagtttttttagatggacaaaagtggaagttgaatcaattagaattttttttatttattaa

SEQ ID NO: 229148 - DNA, 1791 bp, Cannabis indica
ttttattattattttattatattatatataataatatttattatttattaaataaaataaaaagtcacctataaatttttcataaaccaaaaattttagttatataggcacactttatattgaatagatatccgtaactataacacgtactaaattataatgttttaactcccctagtatatagatataactcatcaattttataatgtacaaaagttttggaatggagatcacacgtggtggctagctgctttgcattggaattatataatatatatgagctggttggcacttggagatatgtatatataaggtacatgacataattatgatcataataatttaatatatatctatatactcttgaagatgttgtggtcttttgtagacaaggaaacctaggtttatggggcaacctcataattccctgacttatccactctttgcatgtgtacatccaacgtagaaaaatcgaaataaaattataatggagttataatttttgtgaagtttaaaataacaataatttcaaatttatatgtctaaacaatttataaacaaattaaaaaaaaaaaaacttaaggggccgggagtgtctcacaaccgcactagcttgcatggctaggaatccgaagatatatatgttagaatatgatatgactgatatacaaataatagagtgttttaagtaaagaaaataatttagatactaattttgtgatttatatttatatatattgtatgtactagatgggtgttatgtttagttttattttaatttttttataatatcttaagttaaagaattaaatagggttttatatagaaatgtaatagtaatttcatgtcaaaaaaatgtaatagtaattttaaatatattgcgtaaaagaaaatgaaaatgaaaaccaaatgttaataaaataaattaaaagcaatattaataaagttatgaaatccatggagataacgatatcaagcttgaaatataaaattcctcacttcacaacaaaacattctgccatatacattgaagacctataaacaatgtaccaccttatctccatcaaagccttaattaatacattccttctggtatagtttattaaaataaactcttttttttttttaatatagaggacaaaatagtcttttgaaataaaaaattacaacagaaattaatagaaaaattaatccaaaacttttatgtatacaaccagacaaggaccatcttttctccttgaagaatccattttctaaaggattagaaagtaaataaaacatacatgtttgacagctgctaattaaatttattcttacttcctaatatctgtatgaccttccattttattaactttagaacttatactaaaagaaagtgcatcaacccctcataaaagttctaaatatgaaaggaattttaaattattggaaaatgaacttttgccttgtaaaatatttggcattatgctcaaccatttcatactcaagcaataatataattatatcaccattgctattagtgctcgcactttctagacgtgtcatcttacgatttgttaacgatacttcctaaaaattattacattaaattatataggtccctatacttaattacaccaatagcgatattaacatgtaaaagagtggactaggcactactggtgtcaagaaatttttattctttggttttctcctcacaataggtctctgcacctaccttaacttgttaatattatcagctcatcatttgtgtactgttttgttggcgtattgccattctgttatattttt

SEQ ID NO: 229149 - DNA, 647 bp, Cannabis indica
aaaaaaaaagaaaattaaaataatcctaattattcctatattaaaagacaaattatgtaattcctcaaatattcttgaaaatctcaaatcaccaataattgagcctaccaataaaattgtacctctcgagacttttggtaatattgttaaaacaaaaaatatctaatattatttatttaaaaatattaaaataagtaataaaataattttaactaattaaattagaaaaaaaatacatctagtagtagtaaccaaaattttaaattatggacaaaaatagagttaattattttaatatcaccaatacctatttctttaattcaattaatggtatgctatttatggtacgtaagaattctcttgaatttatgtgctatgcctttctatatttatattttattttttttcctttttcctttaatgaaggtaaggcattaatatgatctaactttctatccctcttttcacataattttaaaaagatttttctttgatgctatcaacaattgtttggacttaaaattttatatatttttaaagtgattatattaatatatgagaagtatagtttttttttttaaaaattaattatacgtacaaactaaaatatcaattaaattattaaggtgacctttaataatattttt

SEQ ID NO: 229150 - DNA, 1416 bp, Cannabis indica
atttgatactttttggtgttttgatttttttagtgtactcctatttagttataacctctcaataagaatataacctctcaaagcttgcctaagtgatacccaaacaagtactcgatgggcctatcacggatgttgaccgcccaaaagaaatatagacatctaccttggggataaacttgaatcgctcatcgacggttatgtttttttgacacaagatcagatattatcccctgtgccagaacatggtagtgcgacatcccatacaccttttttccagacaaatctatttttattccacaaatagctcatattacattcacacatgctatataaatttccataattaataaattacgcttatttacccacttatagcatatttaaaatttatgctaagatatacttgtaggatcataatcctacttataacctgattaatccataatataaacataaaccctaattatttagcattaggcttgttgggatattacaaaatccctaatcgagttcatgacaacggaacaggcctttattaatttagaagatgcctatcagcaagctttcagagtccctccggtacgaaccccttctgcatctattctagggtttgttccacaagtccctgtttcctagactcggtatacttcaactgtctacagaccttctgcatccgtgcaggcacctacataaatccatttttctgggtatggagcggtacaaactaaatgtagtatctctcttggatagttgaagcctcaaatggaaattttggaacagaatgtaagtcactcctaaagtaagagaagtgagaagaaccaaggtcggagtgaaaatttgaagaagctaaagaaggattatgagtcaaaatatacagagtacaccagcttggtggacactcgagaaaatgtgtataaggaaacctgcaaatatggtccattatatggatgcctcaagagggaaaattaaaagagatcagaacaaaaggtgtgagtatcatagaaacatgggacagacaaccaatggatgtggctacttaaatgatgagatgtagatcttgggaggagccgaagacttgggggtcaatgggtccgtattcccattatttatcccaaacagggggttgttcacggaccattagttgttctaggatagcagggtaccataaattctccgcaaggagtaagtcaccctcaagctcttagatcacaacttctgaccctacctgctctgccagcttacgctacagtagcagtacttactccaggatggggaacccatactcttcaagctctgctactagtggatggacatgcaaccacaatctttggaggaccacatattgcaggaagtgttggattatttattttaccaggatcttagatctactcagaagtatgttgtttaaacacccta

SEQ ID NO: 229151 - DNA, 3070 bp, Cannabis indica
cccacctgtctccctatgatctaacatcaagaacctaaggctttgaagattgaatcaagacataccatcatgaaggctgaccaagcctgttcaatggctcctcgtcaatatcatatccacgcagagagcacttgggaaggatagaacaaaatctataactccttctcctaacaggcgcaacgtcctcaacctcaaattcagagtcaaaactctcgaccccttggtcgacttcaggcacctttgcctgatcaacatccttacgaagttgtgtggcctcctctacaaccctgactctacccattattgtcaccctgtaatatgaggatcgtatggtagtgctctatgacatgtttttttgttctggccatgactgttagtctaggatcacacaaaaggagtaaggggacactaaatgctctctctcaaaagtaaggctgacaagacctatgacacagcagttgtcaccttcccaaatcaacattcaaaatcacctgcatagaagagacacgaggaggtgagcaacctgacaaagctagaaacaaagttctaattaactatacccaagggtacctttcaagaaaaacacactataaaagactaattattagcgaagtaccatatcaagtacatttacttagacaaattgtgagtcctaagttgtgcactcaactataatggactcactaccaagtctcatacagagtccctaaggggggccacacatgagattatagttgtatatgcctccaaggccgtcgtgagaccctagtcgaggtcaatagaggacaaaagactagcgggccacttggaaccttgacccagcctagggtcagccaggtcctatgacccagcctagggctagccaggtcccatgacccagcctagggctagccaggtcccatgacctagcctagggccggccaggaactttacttccaggcatacactagccagcctatagggtatctcctgttggccggccagaccccatggtgaccacccatggctgaccaagtcttgaacaagacctctttggctggctagggtgtataaaggatccgagcatgtgttttttcatgagctcaaacatgttctttatgttctttgtgttcttcgtgactcaaagagccaagaatcacaatgaaggttagaattagattttttttgtctgaaaattagacattgcacatcctaagactaccatgcgaatcaagataattaaaagattacaatctaaaatgggaatctaaagacattaaaagtaaagaataaggttcatgcattcatgaaaaaattaactaaatcaagtgaataagcaagaatagaaagcttacccacaacgagaaaccgttgatgaagaaaatgggaagcttggactgtcgaaatggcgcaaaaatctcgagagatggagcaatgtgggtttgacctttagagagaaggaggaacttcttcaaagtttcttttttttagtgagagaatagaaagtgaaaagtgcagagaagtttccccccaaaaagacttaactagattctgtgggaccactcattcacttgccatgtagtactcagctaaaaggcatgtagaattgcaaagcagttaatttactgcaacaaatgagatcaaatagtcaagagcaggtatttcaaagactaaaatcacagcaacatttattcagtaaaggctacatcagttccaacttagttggtaagtccctatctgcatagacatctgcatagggacttaggggataattctatcccgatttttgctcaccttacatggcatgtatacatggccaatatcagcgccacatggcagtacaacttacgatcaaggagctcaagccagcaccctagctaatggggggtcccaacactcaaacaggacgacaagctacaaaccagccacctcaagggggctaggcaaccaccattggctggccctatggctagcaagcttctagacaacacaaagttggccagcctccatcttacacgtgcgtggcaagctagaattggacctggcaagactttgctgcacaaccttacatgtggactacaagctagactacaaattgggccttaacaacccatgaaagtagatagaaaatacctatttttaaggggtattttagtcttttgtattttacaaatttaatatgtaaatatctcttattttatctcttaattagggtttaatctctcctatagaaagagccttaacttaaccctaaaaccctaagtcatagctaagtctcatttataactcacttcatctctctctctctctctctctcacacccactgtagcttctctcaacacttgagattttccatctttgattcctactttgtagctttaagagagctatattagatctcacctatattgatttgaatagtgttatctcttggtatcaatacaactaaaaggagagtaggtcattacccgctaactaagggggttgaacctttataaaaatccttgtgctcttttactttatagttctaattgtgtaacacgtggcaagcatcagtttaatacgactctactgttagttggccaatttctgaggtcaacaacttgcatttcacaagttcaactttgtccgtccatctactaggtttaggcaaaccctttatttgtgttggtaattgcataacttgctaaataaaaagataaaatggacacagttagaatgataattaatatctttatttatttattggtctagatatgttgttaacgctgtaacataaatttattgaattagaaaagctattacatgatctaactaatctttagataattaaaacataaaatgattgaatgatatattctgcccaaaagatattgctcaagaataatgatttttgaacatactgtactttaggggtggtcatctgacctaagtacaattttttttttccaaatctttgagcaaggttcgctcagaaggccacctacttaagattaagtgttcaagcattgtgcacttttggggggccatcaagccttgtacgcttattggtagtattttcttagatgctcaccattccaataccttggt

SEQ ID NO: 229152 - DNA, 719 bp, Cannabis indica
ggaagagaaagagagaataaatgataaaggagactttggtggagaaaataatggctcgggataatgaaaatggtggttgggggtggagataggtggctgccggctgtggtggattggagaaatcgcagagaaaagaaaaaagaagaaagagaaagagaagaggaaaagtggggggggggagggttcgtgcaaggtatttattcagcttggacttttgccggcgcacttaaggttgccggcaaaagtcgaagttaaaataatggcaatgaaacgtagcgtttcattaagttctatacttttgtcggcgcattaatgtgccccggcaaaagtttccaccaaaattttcacccacgttttcaactgggcgagaaattgaccgccaaaaaatttcacaacctttgccggcatatttgagcgtcggcaaaagccaaaatatgatgcaacatgccgattcaataaatgtgaatacttttgtcggcgcaattaagtgcaccagcaaaagttttcacctacttttgcgcgcacgtttttcactacgagggaattttaccgccttttttcactacttttgttggcacatttatgcgccggcaaaagataaaagaaattagttaccttttgccggtgcatttgaatttgccggtaaaaggtgactcgaaccgccaaaagttcccaccttttggcagttagattgccaacatttaccagcgaatttaagg

SEQ ID NO: 229153 - DNA, 1464 bp, Cannabis indica
tctctctctctctctcttaatccggccatctctctcagctcatcctatctcagcctctcgatctctctctgtctctggtggacattgaacaaccggaccacaccttaatccctcaaaaattattcaaccattataatggttaagttgtattttttttttagacattaggaatagtatgtagtttgtttccgttatatatgtgtgatgtttatttgaactggtgttattttgttgtttttttttgtcaaaaacactaaatttagttttttcttagaatctgggttttttactgtttatcgatagtatgtctacgtaatatcaaattcttgcaatccaatgtcaagaatgaccattatcgacatgatgtcgataatttgttaacatgttgtcaacaatacacctaattattaatttaagcatcgttgttgatagtatatcaacatgttgtcgatgttttggaatataatctggtatttttgtttgtcaacattttatcgatagaatgtcaacattaatacaaaaaaagagtgacaacttttaaacatcagtaaagacaaaacaagtgaaaactttaacccttgagtaaagacgaaacaagtaaatttttttaaacataagtaaaaatgaaataaactttaaaagtaacccctaaacaatcataacaatttaaagtctcggtagtttgggcgattcatgcaatacactcacaaccacccaggcttgaccggctcacctttaacataacctaatttgcaacgacgacatacttgggggaaccctgggtggataagagagataaccattctttttactgcgttagaacctccattcgttcgacagcctttcattttcaaacagttccatacactccacccaggcttgactggttcacctttaacataacataatctacaacgacggcacccttgggggaaccctggtggtggataagagagataacaattcttttcactacattggaccctctattcgttcgccaacctttcattttcaaacagttccatacactccaattgctctttttgcagagcgcgatgatattcttcactacgtttgtgtttgctctctttactagacatttacaacttaaaagagaagaatactctagggttaaagaataagaaagatatgcaacttatgaagaaagaacgccaactaataacattctttgagatgagagcaacaatgtcaaacacatattttacgccattatttgtgaccaaggtaagaaaagttgggaatatggagcctaccccgcctactaatcctctccctcaaagtgtggtagggtcttttgttcttgaaacagatgttgggagtgttgggttttgtgccctaaatagaacccatttcaatataattagatttactaattaataaagataagaaatcattttatgttgcatggtgcacatgatttatttcatgattgtttaatgtata

SEQ ID NO: 229154 - DNA, 3353 bp, Cannabis indica
aggagagtaaagttaagttgaagctgctcgatgataacgcgataaagatccaaatcatagaataacggttgttcatttttaaatactggttataaatgtttccacctatttgtagataaataaaacgtgggaaatatccacatttcataaaccgctacatagataagatccaataaatgatatctaacccctgtaaatagcaagaacgcataggtaaatgggacgatcaaatttcaaacttaaagaaattctatcaatttgtatccatttttataacaatctcagaaataatatagactcgtaataattaactacaaaactatgttaaaaaatctctcttttattcagtattaatttttgacactttattctagattatgtatattcaaagtattaattatctagtctcattaaatgttaacaaaattatgagttagtagtgcactattctacaaaattgatgtagaattttcacattattttacttcaagtatatactaaattagtgtgcactaaattttacaccattaatagtgtttgatttcaaatctaaaccaaattagtgcataactttttattttcattttaactcttctttttatttattttaaaatataatcagataatttttgttgataatatgcataaatatatcataaattagttatttttagttattgttgaccgagattttttgaaaccaaataaaagaaaatgtttcctctgtgcttcattctttttcttttcttaaggatagagtttcctctatgctttattcctggcattctaaatgtttttctaaggcaaggaaggaaatccttcttaaagctgttattcaagccattcttgcttatgcgctggcttgctttcggctgcctgttaagctttgtaaggaaattgagggtgtgatggccagattttggtagggctcttcaggggattctagaaaaatacattagaaaagttggaagtctctttgtcgttcaaaatttgttgggggtttgggttttaggtctcttgtctattttaatcaagctatgcttgctaagcaggcttggcgtatcttcactcaacctaattctttgttgagtcttactctcaaagctaggtactttcctcactcttctatctgaaatgctaaggctggtcataatccttctttctcttggcgtagtattctttgggggatggatttattaacttctggtttagtgtggaaagtggatgatgggagactactaatactctaactgatcattggcttcctacttctaaatttaagcaacccctttgtgatatggattgccaccagtctaaactctcttatttcattaatcagtcaggcccttaaaaccttgataggcttaattcttgttttgattcctctactgtcaatgatattttggaggttcctttcttagtacttgatggttaagctgagcaaatttggaggagggatagctctggtctttttactgtaaaatcaacatatcatttagcccttgagaatagagacattccctcaacttcatctttccaagctttgaaatccttctggactaaaatttggcatgtaaatgttcctcccaaagttaaacactttatgtggagatttgtttcaaactttatacttgtggctgttttgctctttcaaaggcatattatcccttctcatttgtgccccttgtataataatcatcctgaaacaattgtgcatgctttgctagagtgtcctagagccaggaaagcttggaaaccttcaaactttgcccacttttacttacaaaataaacattttgatattatgcattttattactaatatttttttaggtttggataaagggtctgcagatattgtgctgtgtatcttgtggacaatttggaatcaaaggaataatgctttctttaatcggtttgttcttgatccgaaagagatgtttgcctagtgtcaaaattttctcctctagtatttgaatgctcaatagaagagacttgctcctcgtgaccaatgtgattaggattcttctgaagtcatgaggtgttctctaggttggtgccaggtttttactgatgcagcactagatgttaagaagaggatttacaacctaagtgtagtggtgaagaatgattcaaatcaaatagttgcagggctggttaagcctttttctggtttagttgctcctgctgtagctgaagcgaaggctgttccttttgcggtcacatggtctaattcgattaagttgcctgtccaagtcattaaaaccgattgcaaaagtattgtggataaacttaataattgtaattagaataatagcgtttttgatgatttgcttgtagatgttaaaaactctttgttctttaatcctagccttcgagttgcttttgttatagcaaggatatgaatactaatgctcataatttagcaaagttaggattaggattagataaagagttgttgtggaatggttctttaccttccttgtaatggcttgtatgctttgtttcttctcacttaaatgaagcttcaagttcaaaaaacaaataatttatagtcttgaagattaattttgcaattgatataccctcctccttcaccacaggtagttttgaatttgatgttgctactccagacaattgctccttgttgtaacagcaagagtgaataatcttctatgacaatcaaggcccctaaatccattagacatgtctttgggaatatagttgtttatataaataccctatgtagaaacccacgaatagatctgaggccactacaatagatctcgaagaaactgggattattattattcagacccaaaaatatacgaaagcaagagaataaacaaaaaattagttagctttttttgtttaccattttcaagtcaattaagcttaataagtttattaaaattacacataaaatcactccaaaatattattgggaaattctacagtgcacccccttaaaatggatacattgatgcacctttatctgttttagcactcgaaaaaatttttagtcaaattttttctaaagacatactgcaaaattttaaaaaattttaaaaaattttaacacgctgaaaactacgttcaaacagtgtattgcacgcgtgactattttattttatacgagtgtaaaataaactgttttaacattgttttctatattataaattattcggaatttttcaaaattttgtagattatcttaaatagttataatgtaggtgaatatgaaaaaaattagactcaaaaatttctcaaaatcatccaatattattattatacaatactattacctgtttattttaatttcaattttaatacacgtagttttttaaattcacg

SEQ ID NO: 229155 - DNA, 1353 bp, Cannabis indica
aacccactaaaggacaaaagaaaattatggtaaaagaccatttgcccctttttttccccatgaacttacattgccaccaaagggcattttagtcaaattaaatacctcgaatattcttgacatctccaatatctaactaaattgcccaaacactaaaatataaccatttaaaaatgtgaatctatcagtcaaacgttgagttccactattactgggcataaaacatgaaattcataaaaattcatatataacctaaaaaatgcacctagcattcaaatatatttccgtagttgagaaaataattttttaaggcctatttcttaatttctactaagagacacaaaaatcacataataataattaaccttctaattatctgctaattctcatgacttaactatgcggttattataattatcccccgcgttaaaaggattttgtcctcgaatcagatctgaataactagggcctggagccacacgtcggattctaattcccagttgatttccttcactttattgtttctttaaatatcttaactaatactataactctgtcgcagatatctttatttttcttattgagaatcttaacctatttttctttaaagagtaggtttaattgaagttttaagttccataactaaagatatgagccaaatttctcaatatactacatgaaaacgtcttgtgtgctgcaaatgctacttgtaaggttaaacacaatattattatcctgatgttctctggaaattctaaaattcttgtgaatctaaggcatatcttattcttgttcccaaagtatttctcctacttaggaattttgcattcttttgagctttggattaacatgacctctgttgtctatgttgagtagaaagtaccctaatcataatcttcactatagccttatcaatttgctgaactaacctcggatctatcctattttgagtttataacaagaacaacacttcatactatataacatctttataggaaccatccctgttacactctgacaattgttggttgcacgagaacttgatcaaaatagatatttattctataagttcttgcaattcctcacataaacttacagtatatacaaataaataaattttctgtccagacatgccatttgtctaagtatcagaagttgtgctaaactttaactacataatatcagtcctctatagacttcattaaaacctaaagatgaatttcggtttcctatctaaaataatggacttaagagtcccacaaaaccatactatcccccttataatttttcgtactagctctcgtacccaagtagtaccataccaaatcaaacatactcaaggatctaggtaat

SEQ ID NO: 229156 - DNA, 876 bp, Cannabis indica
acattttctacagttgatgtatttttctgagcaactaaggcagccacttgattagataaagctgaaatttgagctgctatatttgtcataggatctacttcatgtaacccagccaccttttttgagtatttattttaataggccaattatagctattaatggccatctcctccagtaaatacatggcttcagttgcaggtttagacaataacgctcctctagcaacaacatcaataatagtcctagttggaccattcaacccattatagaaaattgaaacttgcatctagttctcgtagccatgttgtgggaaacgatgtaataagcctttgaatcactcccatcttcataaagttactctgaatcaaactgtctgaattgcctaatctcactcctcaattgttcagactttgatggaggaaagaatttcaccatgaactttctggccatttcatcccatgtattaatggagcctggctggatagattgcaaccaacttcttgctctatcccttaaagagaaaggaaagagtcctagtcttatggcatcatctgtaacatcattcatcttcacagtagcacatacttccagaaatatgggtagatggatattgggatctttagtagccaacccaccaaactgattatgtttcaccaaattgattaaagcatgcttcaattcaaaattattagcagcaatgactggattagcaatatcagtcagattttcattcaccacaagtaagcaataatcacgaacagcctgtggttgtgcatcagctgcagcaggtgctggttggttgttattaaggccattgttgttattggctgccatggtgaagtctagttttttcttcgctttcaactgcttcaaagc

SEQ ID NO: 229157 - DNA, 956 bp, Cannabis indica
gctcgcttaaattttaagaattatatataatactgatttggatattcgaggattaatgcttcagaatatagtatttaattttgcctaactttttattatataaacaaataataagtcggttatagttggtttttaaagaatacgacaaatttattattaccagtaattatgcggtgacatggtaaaaataaggatatactattgcatttttataattggtttggtgaacttacgaagtatttggttattatgaggaagaaaaggaaacaacatcccaagactccactttcccatttccactgcaacaaccataaccaaaatataacagttagttattataatccaaaccaagtatatatttataatcaatttaacaagatactttatacattttattattaattaatatgaatggccaatcgtatataattacttatttcttaaattccatatttgattaattctaaatatatagtcaatcgtaattggtaggatatataacattataccacaagtaataattatttaattattcatttcaaaaaaaaaataaataataattatttcattatttaattatatattatgttggtttcaaaaaaacttatataaatgtaattgtaggaaaaagacaagaaacctgatgtgtttgggtgaagacggatctcatgactgagacaatatcagtagaatgggtgaaatggtcaagcccaagaatcccttttagctgttgcaggcaaactactgtggctgctcctgccatgaaccctactatcgttgcatgtgataagaaatccacgataaaccctagcctgccaccattacaatattattatcattaggattattatttattcatattcatatattattattattattattattattattagagtagtgctaccgttaacctcttattacgacttttaagtcaatttccacgcccgaaaaca

SEQ ID NO: 229158 - DNA, 1119 bp, Cannabis indica
aaatattgtaaactttgagatatctataatagtttaaaatttatattcttttttatgtgtattaattgagttaagttaattatatataatttgttggaaaaaaaatatattatataatataaataattatttataatttaatataaaaataaagaaacaaaattaattttacagcatttaatttaaaaacaaaaaacaaaaaaatctagtttcaagtccaacttagctagactagaaaagtattcctagtgtgggatcgcttttcaagtccagcattgttgttggactaaaaatatttttctaatccaacaattaaatttcatgttatgcgaccgctttttaagtctaataatattagactaaatatgtttttctagttcattggactagaaatgtttttgcagtcaaacattgttagactttctaatctaataatattgaactagactttaaaaaaaaaaatattgaactagaaaaatatcatttttatatcctaggctatcatatccaacacaaaaggcactcaagactaatattgatggacttaaagtgaggtttttctagtagtgtttgtatggtaaacgatcttttgacactagtataacagtagtagtagcaattctgctaggctcattgatggttatgtctggagaagggggtcttaaaccaacaaagatgggtgcatgagagtttgaggttgagcaatgcccttccccttatcagtatgagtaatcacataattaaccatgattggggtgaagggagaatcgagatgaccctattcaaacccctagcgtttcgtttgatgtaatcttgaattgtacatctcattttattggtaacgaaagttaattcatattattgaggtttgtgttctcatgtgtatatatacctccttttgtcaactacactaaaatcaaacaacctatatttagtgtgattctaaaataaaataaaaaatacaatgagtgaacaaaaagctgttcacattaatattttaaatttgatttttattttgaaatttttacatcaaaaatctaatttactcaatttattacaaaaaaacccctacacgcttacatcattattttacctttcctctttcttttattacaatta

SEQ ID NO: 229159 - DNA, 1595 bp, Cannabis indica
atattttaaattaaaagataatgttatcttttaattaaaaatatacctaataataaaatatttaaccttataattaaataatatataaatattaaaaaaattaataaattttaaaatctgaccataatttaaaaaataaaataatcaatttttaaatttaaacctcaaaatatcagaaattaataataatctattaaaaattaaatattattaatttaaaatattgatattttggtttaaatataaaataatattttatattgatattaattgatttgaaaaataaaaattcgaaatttgtgaaaaaaatatcacaaaaatcgaattttggatgaaaaaatcacccttggccgagcgacaggctgcatgcagccctgtctgcgcctagggaagcagcagggtgggatggccggcatttctcggcgcctacagggtttacgtgcacgagttgtaagctcctaggcgaggctctcctgtttgaacgggtgataccgtgtcttcatacacggttttgtcccagtccgcgcgcacaagctcccttcttgtccgagtttctggtgcgagcgagcaccatgctcgaaccacttggacccgatttttcaaatcaacatatctccttcaatttttatcggaatggagtttcgtaaaaatcaaaattacttaatttttaacacgaaatctaaataaattattttcatggaaaaatttcgtaaatcacatacattcatcaaataagacataaaccatcatgaacacatccaaatcaacacaataaacaatattcatcgttttaaatccatatttcatgaaagtaaatcattaccatggctttgaggccagttgttcggaatattttaccaggatctagatttactaacaagtatgttgattaacattgtaaatatgaatatctctaaaataatgaaattaatcacataaaagtttagaaaaccttacattgattgcagcggaataatatgactctttctgctcagatctctaacccttgttcctttccatcgtagagtattatcaagatttaagccttgatctctttctctccttcgggtttggttaccaccgtcttacccactatgattgagtacttgacttgctatgtgtgggcatgacactccatcactataggctgactacgaagaacaatgaaagaggctcaaaaatcactatagaaggtgtctctcatctattagtgggaaggaatgcaatctcttttttcccagagtgagaaaaccattcctttctccagtaaagggtccaacccaccttcgaatccaaaccccgtccagatgtttcatcctttccccacatctgattcgaaggattcgggataaacaggtgctgtagccccgattcgttagcatttcgcccttcaaacttggttacacaagaagtcatcatttcaacggcccgccttctctaaaaagccttaaccttcggtgaatagtaatgggtcttcaccggttcagtggcagtggcatggcagatcagggcattaagattttaggactcctacaacttcaatcttggagaaaggtgaagttggccttttttgtttgtgcatctttccgttggtc

SEQ ID NO: 229160 - DNA, 1227 bp, Cannabis indica
ctgcagtatgaaactccatataaaaaatatagtaaaaaataaaaaatattgtctgacattatttttgtaaaaaaaatgacaaaaattagtattccatgtaaatttcctaaaatttatacatcatcttaaaatataatattttattttatctcttttttacattatttttatatttgtactctaaaaatattttaatatatagccatctttaaaaatattataattataattttacatattattttttaatatatatcctactttttaattacaataattttttagcttcaatttttcattaaaaaaagtaatagcatcaatgctataacatagtatttatgcaaatttctaaaatgacatttttttttctcgaacggtataacatcttaatattttgccaaataatatatccacattactaaacataatttaccattaaaaatgctctaataatattatactagaaattttatttatacatttttttaataagttttatatgtatatttttattatatatacacacaaaataaaaaaaaaaatctagtgtttctacacttctccaacttcaattctctcctcgacaaaataataagttacccaattattttttttgatatatttaaatcacaaaagttacctaattattgaaagttcaaaaatgtttcgaatcataaagtgctattacaaatggggatcttcccttgctacttgtgattgtgaaggtcattgacttgtcaaatcctttttaattctttactctattttaaggtgacactttttttttttccgttccataatatttttttttaattttataaaacacatgtattatttctttaaattttttagaaacaaagaataattattaaagtcatatattgttatgacttatcataaattatttatttatattaaaaataattactatatcagtatgtatatattgagttattatataaaaaaaaaattggatacattgtttacatttgttcgtgttaagaatcatcttcaagttggttatattaaaaaataagttcatggtactattttgtaccaatttgaaaaatacaaggtccaattgtcattttacaaaatagaaaatcaaatcagtaacttttacaaaatacagagtctaaaatggtattaacacttaaataaataattttttatgatgtgattaataaacttttgacgcgtgacgattttaagaactacaaacaaagt

SEQ ID NO: 229161 - DNA, 1013 bp, Cannabis indica
ttggaagttttcagggtttttttgatcatcttcttttcacagatttgaaattgtatttttatagtccatgaacagtgggacattgtatgattttacataaaagtatttaccaataccattgtgttttattcctatttccaagaaaatttcacttctagacttctaggatggtttcatgctagaattttgaaggactatgacaaaaattcaaagaaagatcgaagtttttattcaagtcttttagagtttgaacctttttagctactgattattttatctaatctaccaaaagtgataaagctatagtaaagaacagaaaatattaatcagaaccaatgagaagtaacatgtagagttcaatatttgggactgagttactgctcagaatttattacctcaaaaacaaaattcaattaatctattgcacttgtgtatgtttcattttatacgcgtactttttaaataactattgcttagtgagtttttcaaaaacgggatatatcaaaagattaagctaaagaaaatacaattaaggagaaaagagacatccaaaaaaaaaaaaaaagaagaaaagagacatattttgtatgtggttggggcattaatgagccttagttcatgaggcggtattacaacctctttgtaatggagttcttaccgcacaaataatttgtattttttggttatcaaaaatgtgaaccaaagttctcaaactcttgcatggagatagggccatatttataggtagctaagctcaataggtcggacgaatttgttttgtactaggtttttggtcaatatgactccttctgttcagatttctaaccttgattcttttctgtagcatagcatttagctgaacctgaatcttctcttcctttaattgtgttcatcacagtcttctacaattgcctgagtatcaccttaaatagtatgggttgatagtcaaattacctttagaacaatattttgagagagaaacttcacagtgaattcgaaaatcaagagaagag

SEQ ID NO: 229162 - DNA, 1710 bp, Cannabis indica
ttaattaaataaaaaaaaattacaagatacactattttaatataaagtttacatttatacggtagcatagtaatttttataaatttacaatttcacattttaaagaatcacagctattgtcataacttataggaaccatccaagagattcccgggatcaattagatgtgtgtcaaccaagttcccctgtaggaaagagttggacaagctatctggtaatttagactcacaatttgagataaccaacctctctcatctctccaagaaccgcttcgtttagcattacagagcccctcacgcaccctttccacaccagaacgtccaccagaactagaatttccatcatgagcctgttgctcagcataaatcaaaccagtaggatcggccaaaccaacctccttactcttttccacgaaaccaagcccagtaatggtgggagtaacaaccgaacccgctaccttccttggtaacaactcaggacaaacaacagaagaggagctacccgcattaaccttcccaggattagtgggcaaaacatcagaatgagagacctctttcactggaaagccagggggagtggtggtctgagcaaatctgctagaagaaccttgagaagacaaagcagagaagtctcttctctcatcaacctttaaccaagaaccatatcccgacagttgattccccaatccatcctcaaaaaatttgactggctctgcacaaacccgagcatcatatcccacaaaaccacatttaaaacacataaaaggtcgatcatacctgaatgggagccaaatcttccgaccctcactcggaaaaaggaagcatgggcatataggaattgaaatatcacaccaaaccttgaaggtgaaaaatcccttagtcacgatcttagagatatcaactttttgaacttcaataacttcgcccgcataacccgccagtcgctccaagttcccctgtgtgatcgaacgagtaggcaactgaagaattcgcccactaagagggaaacgagtgagcactttatcccaatcttgaggaattccatcaagcctctccacaattagaaagccattattaaagaaccaagggttcttggtcaaaatcctatccaaatcttgagatgatttgaaggagaagactaagaaacttgattctttagtagtaagtttaatttccactccccaatccctttctgaaattccccaaacacgtctcagaatcgttttcaataaagaacgactcatcggacggttggagcacaaacgccccattgcacagattgaggccactttagtcccttcggtagtattaacttcccatccttcctcatctagcactattagattagtagttctagcaagcagatcatccatggtggtatcaggcttttccagcatttcaggcttttccagcatctctacaggaaggttcttctcgagagagagcatttacaatttcacatcttaatttactataatacgggcatatctttaaattatatttttcttatataatgtaagaaggtgtgatatagagttgacccaaagtgaagaattgcctgtaataagagtgtgtgagtttgagatataagttgtgtattaatttttttaactaattttatatttatttttgctaacactcacatgccaaatattttctcattccatactatttttttttaatattattgtatttaatagaatctcaatta

SEQ ID NO: 229163 - DNA, 1285 bp, Cannabis indica
cgcctatgctagttaggttgttacacttaggttgtataatgtatattatacgctaagtgttctaacagtcaacatgcctcgtcttaacctttttatacgaagcgaggttggtgcctcactttgtattactgatgtcatccttacgattcttctgatgcgaaatggtttctcgttaatgcatgagtgaatatttttttcatcctcatctcgcttaagactttactgtcagcgaattataaatatattctatcagctccacatttaatgagctattctattttaatatcctttaatataattgccattatattcgttgattcgtattcttcaaggttgacacatgtcctcctctaaagtgctagtcgaatttcaggtataacaatttccctttaaaaagaccctttttagtaaaaaaatgctttttaaataattactgagggtatttttgtcataattcattttgaaattatgcatgcctttgattttggtagtttaatggtcccaatgcacgtcaatatcattaatgaaccgtcttttctacttctcttttattttcatccattagatcttctgttttaggatcggatggttattaactttagagtataaaacggtaagaatccaattttctaccatcttcgtcttcttcaaaaacttaagctttctaaaacttgaacatcctgaatccgtgcatgccatccttatctttgaccttcttcctgcgcatttactcggactcgctcttcgactcctagtgttcgaaaaactcttcttgcaggccatcgcgtctccattcgcagaattctccaacacccggttttttgacttaacacagtaagtacctcatccttttacgtttccctctttttttgggttatgattgtcttgcattttgttacctcattcgaattaacaattaggattcatattttctgggtgatttatagggtttagacataatttaggtttatcacattccttaagcctctagtttgataaatttcatcaaaaattgggattgtttttcttttgtaaaaatgtcccagtctggttccgaagtttattctcctgaatttttagaaccaatatatcctaaacatctagcctctccatataaacctagaaatttcaaacctcaatcaaaattagaagtaaatgatgccagaattagagaccatctaattaagtcgaaccaagaagagactgtaagtcgttataggcgattcctataagaaatttttgagggcaagcatcatttcttacgagacgtggcctggcctgaacc

SEQ ID NO: 229164 - DNA, 877 bp, Cannabis indica
aaaaattcacaagaagaggaagatttgagatgagatattctattgatgacctttccacacaccaatgaaaagttaaagagagattcttaatggcattgcagacagagagatttattgcgccaaatgaaatttcacgtagttccaaagattcaagattcatggcttcaatttgctccactctatctgaaccattaattttcaagatcttgaggcttgaactatgtatgcgaaactgctgattataatcaatattccaactccaactacaagcattaaaccacaatttctcaagggaaggagaacccaacaaaagctcacttaccacattcttatctccaaactgaacaagagtcaatgtcaatgacttcaatgatggaaaactaaacgagtaactacaattcaactccaccaacatcaactccaaaatagtcaaaaactttgcattgaccaatagtgttttaggtaagaaatagtaatagtaatagtaattgccatcattatcataatagtacccttcccctaattcaagagtgatttccttgactctattctcaactgcataagctaaccatttatcaatgccatcagaatggctcaacttataggatttcatcctaagcttaaaactagtaatggccgaattggggataaattgcatacctctcttgcgttgttccaaacaattttcaacataattgcgtagcttttttcctccccctggcaattgaaaataagttctataggaaaaagagagagtgggaactgaataccatatgaatttccaacgctttgaaaggaggcaagtgggaacaacatccttagtaagaagaaatgacagtatgtgtaggattaacgcatcaggtagttttgaaattct

SEQ ID NO: 229165 - DNA, 1374 bp, Cannabis indica
acaaaaccttgaagctacacaaagccttgcccatggagctacacaaaacgttagagttgcacaaaacattctccagaaacttgaagctacaccaaaagttgcccagaaccttgctcagtatctcttagctgcaaacctttcttgcacacttcaaggacaaaaccacgcccaagatccaaattatctccccaatgcccagggagaccaacctaacttttacaatttacaccaagctcaaatacgccatgcccacaaggtcaaagatgcccataaccttgccgagaacattgaagcttctgggaatcttgcccaggacctcgtgaacctctactcccataaacttgccgaaaacagaaagaatctcaataatcagttgggtgacctaaatcgccttcaaatagacatgcaaaatgcccaaaaccttgaacaatacatcacaaatgatcggaacctcctaacccaaaaccttgcacagaacatggcaaataaccaaaacctcccacagcgaaaactccaagcccaaacccttgcacaaaacatcacaattgcccagagatttgccaaaaattttgcccagaacttccaagccaacaaccttgatcataacattaaagcttcccaaatgattgtcaataatcttacaaatgcccgtaaccttctccaaaacctccaagctcaggacttaaaagctgcccaaagcgttgccgaaagccttgcccaaaacattgaagattcccagaggcttcaccaggacgtcaacgataccttgaactatgctacgaatctcagaattagatatctcgcagatgcaggtaccctcgtcctaatgattcaaggtgcccaacgcattgaacccgctattgttcaacgtagctcggtgcttgttacaagtctccaagtccacaaccttatccagaacctccaagctcagaatttttctcgtaaagtcaatgttgtccagaaccttgatagacagctcaaagaaactcaagtttcccagaacgctgttcaaggcattgaactttgccagaaccttgctcagggccttgttcagatcctcgaagctcccgaacctgagcaattcgttggtgagaaccccgaagctgtcaaccacgaacatgtcgttgctccgaactgtggagatacaggtaatcttcctatcgcgaatggtgtagtttaacaaactaaaatcccaggagtgtacatatgtttaatatgagtgctaacttattttatattgtttaatacttttggatagtaatcaaaattttaaactttatcttcattcaatattaatggcactggtatatgcatgatcataaatatatttatataagctattattctttttgcctaagtctatgtgtatttaca

SEQ ID NO: 229166 - DNA, 2284 bp, Cannabis indica
ttattattattattaaattatcgaacttttgaatgtattattatttcgagctaatctatttgtgtttacgtgctgtatttttggatttgtcgtctcgtatcgtgcctaaacctatatttttcgtgcgtgttgtgccaattcgtaacactgtatcgtatcgtgtctaagtccacatttttcatgttgtgtcgtgcctatatttataatttttcgtgtcaggtcgtgctcgtgccgtgttaaaaagctcgacctatatttacaatactagtttaaaccctactttttacattgtaagttatttcaaatttctcaaaactttaccaaaatattttaaacaactacaatataaactatctcgtacaccataaaaccatccattgttatgcattaatctaaaaaagttttaagtggtgattctaaatctaatccatgacttatgggggaccataggccgcaaaggaaatgatgatcatgaaatagaatcattgaatgttcaaatgttataaaattattgtgttaataacaaataagtaaattaacaaattatggaagaaaaaaataaaataaaatacttatgggtgaaaaattgctataaaattcatataagcataagaataattgaatgacccatttatcatgtatttaacatgtccctatattttaatttattggaatatgattgttaagaaacaataaaaagtagaccatatgtaattaacaaatttctttttttttacaaatcatactagctagtggtcatagcattgctaaaacaacaaacaacaaataaaataagaaatattccttaaatagcaaatatttaatcatatttaaataacattaatatcctaactctttatgtctacacttgaatttttcatatattgcaagaaaacacaaaattaaaacaaagcaaactaaagtgctctaaagtctaaacctagtactacatttactaatattgcctttatatatttttcaagaagccaaggaaatgaataaaaatgtctctttttctttttttagggaataaagagttaaagaaattgttttcaatcaaaaaaaaaaaaagagttaaagaaattgcctatattataaacacatttttttaggtaggggttctaaaaagtctcatgtagggttctttttctatttatcatacttaaacaaaaattataaattaagtttttcatatgtaattataacatgcattttacctgcttttaaaaaattatgaataaatttacaatttttaacgtatataattaattttgttgaattttctttttcaataaaataaaataatttgatttttttaaaaaaaaaatcacaagtaataactacaaatcatttagaataaacatagattataatcaatttaagcacctaaaatataagataatggcctaccaatacaaaaacggaaggcttctctatggtagactcactcatatatataaatctatatacaatacactatagtattattacaaaaaaaaatatatattttcagtcgtaataaaacttaagactacaagtaaaaaagttgtgactaattataaattatcatttttatattgtaactatagtacctgtgactaaaaatattagttataaaaatcagttgtgactaaatatatttttagtcacaatatttattatgactaaatctaaattagtgacaatttgtatctaaatgctatattgtagacagacgtaattttttattgtctaaaaatcacatttaattaaaaaaaattatattgtgattaaaaaattagcaacacgattttgttccgtgatgtactttcacgaaatgtatttcgtggtacattaaatgggtcttagggtacattagataagtgtcagggtacgttactattttttttaaccctaattacccctagatcagtctcaaccctcagatcaaataactccatcatctaatggctgccgtacatcaatacattccgtgaaagtacaatcacatgactcatgtcactaaaaaattatcacaaaatataactgttttttttagtgcatgacactatatatattataatgaatagtgatttcaaagggagctagggagctaggaaatttgaaagcttggtttgatgaattattaaagtaagccatacatgtctattccacattgaaaaaggttaatacttcttctcctacaaaaacaaaaagatgaagaatcaaagttgaaaaagaagaacccaactgaattatttcatatggtgtgtgtgtgagtgggaccccacagatgggtatggct

SEQ ID NO: 229167 - DNA, 1342 bp, Cannabis indica
aatgcaacagagtgttctattctaagtacaaagtttgaaacttagacactacataatcatatgattgtagtatgaaaaaaagactctagtttttttttctaactgcattgcaattgtgtttattatttttttttttcaatgatgtacatacgttcagctggaatattgatgtttaagtgaagatgaatatgtaagcatttgcaagtcaattttatgatttttggactcttgtttcgaatggttgaggatatacaagtagttttatattcgagttattagttttagcagtagtttgttttttgacagtttgtataggaaatcccttgatcaccacaagttttattactacttttttcttaaacagaatctattaagtaaagtggtgatgcatgtgaagctcaaattgaattttagaaaacaagtttgacatcataaagaggattaaagtcattggttataagcctttaatttggaaaatttagtcggattaagaaattttgttagtcagcttaatgagcagcaggttatttggttgtagtggtttatatgcttggtgctatttgtacgtgaaattctgtgctgttgttatttgaatccacatacattttttttaatgaaagttcatgattctaacttgtaatcagatttcatccacgggtgtttaattttttcaatttaagataaccatgtattatgtatggtgattcttgacttgtgatcaattgatcatcattttcatattggtggtgttttatattagaaaccaaaataatattgaatcaaactaaagaacttttctgggtgatacgggtagaaatctttagatattataagattcatctgttcttgacagcatttgatgatcatttgtgatatgctgttgtgaaatttagacttgatatcataggcctgatgttcccaatattaaactttggtaaccgctttaacatgttctatgacattatgagttaatcttctcacctagaatgatctttcattttcattagtagaaggctggaagccagtccacaaataacaatcttcatttgcttatttaaacttcttgggttgcagcaagttgacgtgagctatgtttaatacttatatttgaaatatcatttactttgctttgccgtttggaaaaaagaaaatagtttgattggtattaggtttgaagccagttttatggtggaccactcacatggtagttttccaaaagtcgatcgactattagtaccatgaggaacaagttgcagttcgactattagtcacttgtacatggaatgttagctttgatgaagtaatgctattctcaatggtcaactaaatgagaccgtatata

SEQ ID NO: 229168 - DNA, 1413 bp, Cannabis indica
aaaatttccttatacaggctttacccgtctaaagagacacaagagaatgatcaagtagtcaagaatcttactcctgagcgagaggttttagagaagaagaaggagaataaaaatccaaccaagcaaagtttggagccagtagaacaacctattcaaatcagggatgattctgaagcagcagctcgcgtggttgccgaaaaagggaaggcagtaatggaggtgtcagacaaaggagactcctccaatgaggatgctccatctttgcttgatcaggagggtgctctagttattatgaaaaactagacgaatggttgagacggtatcaaaatctcataagcagaatcgagcgcatcaggccatttgtcaacttgggcgttgggtgctcattttggagctttcgagatatcgttttgatacttctaaggttatagatcttgaggatgagatctcgtaccccatttttaaccatttggaaagaatgctcagagcaaatttgacatttgagtgatcgatagtgaaaccagtgcaccaggttgattgtcaacctaggcgctggtcttagtttccaagccctcgggattgtggttttctccccgagtttgattttatctttattatttctaatgacaaaaaaaaataccaagaacactttttcaaaaactgattggaaagggtccaggttcacaatatcttaacttgggcactgggtctagcttcaggccacctgaaagttctgtttggtctccaaaaatagtgaacctcaatctttgttgaaaacgaagaatatgcctagaagagttctcgaaaaaaatcctcaaaaatggcccaggctgacaaaatgttaacttgggtgctggccttaattgtggtgcccatcaagtgttgtttcctccctgaaagcactattttccccatttttgatgaagacgaacaagatgcacgagtaagatttttgattagatacttcgaagtggtctaaattgataaattgtcaacctaggagtcgggtgcccaggcactaggtgcttaaaaataaactttctccgaatatgattcggatgcctcaaatatgtttgtggtatgtctaaaagacggtcctaaaaattgaaaccctagtttaggatgtcaacttgggcgctgggtgaaaccctaagtgctcaggttgactttcagggtgttggttcgtgtatttttagctctcggggtctagatttggttgatcgatgtcatcatgggacaaaatactgagaaataatgagttgtaaatgagtcatcgaagtccgaacttccattctagagttcccgaagtcaacctgagcgtagggctaagaaccattctcaggtcgactggtgtgacttggaactactcaactttaagaggtcatctttcttatatgtgtcaaatattcatgt

SEQ ID NO: 229169 - DNA, 1467 bp, Cannabis indica
agatagtcataatatgctataaacttgtgagtcatttttagttctttcaccttgatcttgaggtcgttggccttcatcttcaatgtcgtgtctcgaatattgagatgctcaatattgtgatccttgatattgtgacccctgatattgtgatccctgatattgagatccctaacattgtgatccctgatattgagatccctggtatagatatccctgatattgagatccctcatattgagatccttctcattgttctccaacttcggatatttgtgctctttcatgtaaattcatctttttttttactttgaatgtactgacgaacctctagatcggatatagaattcaaatccgtgaataaaattttttggtcagccttttttctatgacgttcatttatattcttcttactcttttcaaaaacttgagtgagttctttattttgttccattagtttgttgaattaaccattacctaattgtttttcctttaattttttcacaccacatggtcttttgttggataagtattgatttcctcattgttcatgtttggatcaaatgaactcatattggtggatgtcgatgttggagactcaaaattgtgagatgataatttggatgaagtgaaattaggaccttcgtgttagaatctacgtggtgcattgatgttgtcatcattgagaacttttgaatacctttgatgatgtgtcacaaatgatcaaatttaaaacttttgtcgtgttttttatcttgggttaataacatttttgcttgaattaactgttacaatataaattaaataatagcgtcaataaaaggtaaaagaataagataataacaattactaaattataatcacaaacacttacaatgtctcttgctgaagcaccacttggatttttattttcaatttggttggtacatctccttaattttgcatctgcactattaatagtagacatttgagtttgcaaagatcttactggttgaggtttattactaaattttctatctttgtggtactctgattcatctcttgctaaaaaattattacctgtttggtttcttcctataattggttcttgagaaatgttaacatagacacgacgcaagtgcacatcttcctctactgagtaagaagaaccacgaatgattttttttttttttgaagaaaatgtagctatttagaatatgttgaagagatctgatcaaatggaatgagaagtgtgagattatatagggaaggaaaatacactgtaacagttgagatcgtggtcaaataatttcagcggccaagattaaaccgcgagatttcttatcttctaattttagattcagaagataaggatgtgatgtgacaacacactacaacagttgagatcgtggtaaaataatttcagcaaccaagattaaactgctagatttcttatcttttaattttgaattcaaaagataaggatgtgat

SEQ ID NO: 229170 - DNA, 1692 bp, Cannabis indica
tgtagggtcagtcgtcagtccatgaagcagctagagtgacgtactcgtgtacaagagccatcattccgtgggtgtaagggcccaatggaggcttgaagcagggacgttacagccaacttgggcacctagggtttgacccaacacccaagttgatgtttcgaactagggtttcagctttcgggatggtcttagggaaaatgggtcaaaacttgcattagaacatcaactagacatttcacggatatatttgaggcattagaatcaaaatcatagcaagttcctttttagcaccggggcccttaggcccttagcaacctagcgcccaggttgagaatttgtcaatctaggcgccttccaagtatcaaatcgacgatccaaaattttcatcttcgtaatcttcatcaaaaatggggaaatatgtccttttggggaagaaacagcactttctaggtgccagaaacaaggccaagtgcccagattgacattttgtcaacctgggccgatgtcaataatttttatgagaactcttccgagtatcttctccgttttcagaaaatattaagattcaactatttttgggaaccaaacaaaacttctgaaaggccaaaagggggactcagcgcccaaattgacatattgtcaacttgggctttttccaatcaagttcactaaaaagtgtttcagatattttttgtcatcagaaataataaagattcgagcaaactcagggagaaaaccacaaacttgagcccttggaagtggagcccagcgcccaagttgacctagtgttgcgcctagtgcccaggttgacaatcaacctggggtgctccttcgattgctcaaatgtcaaatctaattcgaccaatgaatctggaatgataaaaaatggggtaggagacctcatcctcaagttcaagaaccttaggtgtatcaaaacgagatcacgggagctcagggaacgagtacccaatgcctaggttgacaaacggcctgatgcactaattttctgcttatccaattctaatttcgttttgaccgtccatctagtttttcacaataactaagatccatgaagtcagagaagtcaaattcacaatttcgcatttctcatttctcatttctgacatgggaaactcgctcggaaataaagagtttcgagtctctcatttttgcagaacagcaacatcttcgagaagtcgtgaccaacttcaccagagcacataaacaaggtaaatgatgtcaaaatatcacttaggcatcttaaagtacatctcttggacatttttacacttacccagcttccaagttgacgttatatgttaacctgggctctgggaagtcaacaaaggtgctggatgttaacctgggcgatgggttatgaactaccttcaataaaacattcataactcactcaatattgattcgattgacgcaattcaacttgagttcaaagataattcaatgctctatcaagtcatgtctcactttaatcaaaattttgaagttatcatcgtcaaatttcatcccaaaggacttacaaaaataagctccaagttcccagcagtaggacccgttggcctccgaaaaatggccatcgccaccaagagctaatttttatcattagatcatcatctacggtcaaaaacatcaaattttaatttttctcctatttttgtgggcctccttcaccta

SEQ ID NO: 229171 - DNA, 1045 bp, Cannabis indica
tctgatcatgttattagtgtcgtgcttgtgcgagaggaagaaatggtccaattctcggtctattacgtaagcaaaagattgttgggtgcagaatccagatatcccatgatcgagaagttgacattttgcttactaaatgcgtcctgaaaattaagaccatacttctaagcccatgccataaaagtactaacgaatcatcccctcctccaggtgcttcggtatctagagtcctatggcaggttgctaaaatgggccatggaacttagccagttcgatatctagtaccagctgcaggtatctatcaaaggtcaagccttttttaatattatagtagagtgttctagcttgaatgaccacctagaagatctagtcctagaactgcccacctgaaggtctatgatgaaaaaagattcagagtcgggatcattctgatctcccgataagggcaccaactctagagtgctctacattttagtttttgtgcttccaacaacaaagcaaaacacgaagctatggtggcaggcttaaaattaggtaaggaagtaagagctgaatatatcaaaatacacagtgattgccagctggtggtgaatcaaatttctagtgagtaccagacaaagggcaaaaaaatggctatatacgccatgatgtcctaagagttgttgcaagaattcaaaagttacagcgtcttccatgtttcgagagaacaaaatttgcttgtggacatgttagcaaaacttgcaacgaaccctaagatcatcaaacactgagtagtcctaatttgtcacctatagaagccaagctttgaagtgtaggggtaaatgtcatagtcgacaactctcactcatggatggcatgcatttacaatttcttgaatttaggagagcttcccatggataaggctgcttccagaaaggttcagtattaagcttcatgttatgtgatcatggatgggaaaccttatcgccggggactatcaatgccatacttgaggtacatcgctggattagaaattagcaccatgatccatgagattcatggtggc

SEQ ID NO: 229172 - DNA, 1030 bp, Cannabis indica
ttagaagatcaatgtatgagttctataccgtacttaaatacaacttacaaaaagaatgcgaagaatctttattgttcatcaagaggtaaatgttttatgttcatcttttcgttgtttgatttaatatatatatatatatatatgtgagattcttgggtggtaaaaatgataatcatattaaaatatttttgctgtatacttgatttagtactacaaaaactaacaataccgaagtttcatttacaaagaactcaatgttttaaggataaaatactttgagaaataacggtaaaatagtatcccactcatgtagatcacctatagaaggttgattgattgttgatggttataacaatggataaggtatccatataggttggacagtgttctgtgaatttaagagtgtaattctaaatttatagtggagtcacaaggatctaataaattaataaatttacaataatatttgttggagcttgaatttatagatccataattcctacgttgtctttgaatagttcttttaatcaagctcaaactaatattttaagtgacaaatagaacagaagaaactcacaaggtcaatttcgagatgttgaactgaaaaaagaaaaaggaaaaagtataaacatgatatgtttatagagaatacatcaactttgattatgagatcaaattaatttataattatttaataataaattaattaactatgaaaattaataaagacaatttaattaaaattaattggacttaaaaaattagaaaattcatctaaaccaaactcacatgaggttttggacatgctagtattttttttttattaattttagctaattatttatttatgaaaatatttaattagttgtagcaaatgtaaaaatattttgattaaaaagtaattaagcaatttaattaagatatatggaaagatattatatgcccaaccacattggggatttcggctacatagttatttggaaaaaaaaaacagaaaaatacaaaagaaggaacaaaaattacaaaaata

SEQ ID NO: 229173 - DNA, 1292 bp, Cannabis indica
tttttaaaaggaaaatttttttttgagctcaggcacacgcctagcccgcctataattgagggcggccttttatccacacagagtattttcccatcaaactagttctcatcaacttattcatcaaactctcaattgtatttgtgtcttgatagtttacttttttgttttccaaatattgtttttataatgttcttaacatacctgaatattttaatccagcttcactttaatttaatcaaccttgtatatctaaaagattcaatcaaattgagatcagataggataggccatacaaataggctaacccctgtattttcttgagtagtagctggattggaacacattaataattagcatgtgatctatatataataatgatctcataattagtcacagctatcagaatatctcatccagattaaggatcatcaatccttgcatgttttttaataatcaaattcttaaggtgacctattaataatctgaataatggttacaattgaagagtttggaaggaagacaatcccatgtcattatcagtccttatcttctatttaggtccctccacaaataaaactttgttaatatgaaaatgcatcttaatcattagtctaattacatgactttgctgaaataagtacaggaattatccaaaaccttgagtgtgactaaaaaaataggcaatgaaagtacaattgatactgatctatgtcccataatgtgatccttgaatggggcaagcctaagacatcttaaagtgagattattttgttgtggggttggaaattaaagcaaaaatagtataagagaaagaaagaaaatgccatgtgatggctcaagggcaattcctctaaccagatgaccccatccaactaattgcctctttaatcttcaccattttattttccatcaaaatagacatatctgtcctacaaaacttatctagagtattgattatatatactcaactcataccaattaatgagtttctcaattatcaagctttcttttgcaatcctcttagattctttgtttgaccattttttctttctttacaaaattttacaatcatgggtttttcactttgttagcttagttcatgtcaagcaactcattactcagaggcaagttcaaaaaatactccctgaggtatacttgaaccaaccttcattccaagactttttaagtcaagccgaagacgaattcgaattagatattccctgcacaaaagatgacttcattgatcttatttattgcttaggcgcctaatcatatacaagtatagacaccaa

SEQ ID NO: 229174 - DNA, 676 bp, Cannabis indica
gaagccacaaactctctccactcaatctcatttattatggctttgtgcaatctcggtggcttctcgagaagttgtggagccaaatctttaacatcataaataccttttgttaaggtagtattggagaaaggtagtatgtggattgattttgtccgcagaaagaccaataaagatattcctaggttaattggcaaattgaggccacctagcgtcaattattttccaagcgggggagttagctggatgtcgcatcttatcatctagttttctatagctagcatgccaagtcaaatttttagcgtgattgacatttcaaaagaatcaaaccaaacgaggtattaggggtaggtactataaaatcattgtagggacaccaatctttaccttgtcagaattctttttcttttgccacctagactcaccacacacgggacatgatattgcatctacaaacctcttacggtataggatgcaattgttaggacatgaatgtattttttcaaattgcatacctaaggaaggcagtttattctttgtctcgtagaaagacaaaggcatcacattaccttcaagtaataactctactaggaaagctataaatctgtaaaccttttatccctccacccatatttttattttatattgtatatgttatcccaaattttgcactctgacg

SEQ ID NO: 229175 - DNA, 1175 bp, Cannabis indica
aattaaagtttaacatagtattatacaaaaatatgatatataatccaatttaatataatacaatacaatacaataagacttaatacggcattccaatacgacgtgccaaacgagtgcataattgtataattacttgatgagtttgtttagaaattggttcaggccttacacaaaggtgctgataggatgtaatttgaagtactcaatgaagtttttcgattcaccaaataaataaataacgtgaggtggtgcaattagttcagtgctaattacttttaacgacttataaatataacagacacactttgctcttgatgtgctgaaaaggggcgatgtctcagctgctctgtttgctcctggatgggtctatgagactaaacaaccaccagattttcaaactgcacaaaatcagtaatacatttccttggactaaatccaaaatcctatactgctacattaattatgttttacactttaccattgtagttgttgaacatggtttattttacaattatgagtattactcatagtcatgtatttgggttttgcagttggtggagccttgtggagaaatcatggggaataggaaaacattatcctagaggcctaccattctactcaaattttgatcaggtttaaactaactagaaagaaaatattgtttttatcttttgggttcctattacagcacttttgtatgaattaggttcacttttggtcaacagaaattaaatctgactcaccggtaaatgaaaaacttgatacttattttctagggccgtgctcatcatttttctgttgatggagtgcatattctagattcttcatggaataacctttcaactcgaggctttcaggtttgtaataaagccttaaccctttgacctttcttttacaatgatgttttctaaccttgtcaagagtaactagtttcttaatataacattttaagtaaagttattatgatgtgctcaaagagccaaaagttataatgattattgatttggcaactttattagttttagagtggctggttcagtacctataaaaaataatccattgtggttaattatttggtatattactcaacaaatgatgtgataataaaacaaagatactattatgttcttgcatattaatccacactctggttgggatttgaattttataattca

SEQ ID NO: 229176 - DNA, 2431 bp, Cannabis indica
ttttcatcagctctttcaggtgaccgatgttgatttcagtagtgtggtagagtgcattccttcggttatctctgaggagcaaaatgctaagtttctccatgatgttactaccgaagaagtaagacatgcactgtttcaaatacatcctgagaagtccccctggacctgatagtatgacacccgagctttttaccagaaatgctggagtgttgtaggcgatgacgtggtgtcactggtaaggtcgtttttctacactgatgtgtttcctctctttaaatgcaaccaatattgtgttgattcccaaagaaaaaattgccagaatatatgggtgatcttcgtcctatctctctctgcaatgttctctacaaggtaatttcaaaagtgattgctaaccggttaaaagtggcttttccttttgtcatatttctaatacgcaaaatacttttttacctgggcgtttgatttctgacaatatcatgatttcttttgaaattatgcattacttgaagagaaagagaatgggaaaggagggtgtgatggcgcttaagctcaatatgagtaaggcgtatgactgagttggatggacgtttcttgaggcaatgatggttcgtatgggttttagtaggcgtgttgtttccttgattatgtttcgtgtctttaccgtgagctacaatgttacttatgggggtcatgtattggtcctataattttgggaaggagaattagacaaggagatctattatctccttatctgaaggattatcagctctgttgaaacagtatgagtataattggtggttgactggttgtcaagtggctagaggtgctcctagagttttacatatgttttttgccgatgatagctatgtgtactgcaaggccaatgaaaacgaagcctctaatatgttacaacttcttcatgtgtatgagatggcattgggacaacaagttaactatactaaatcatctgtattcttcagtaaaaatgctagtgtggctatgcggtcaaggatgtgtgaattgctaggcatggtggaagcttcagataacagtttttgtttgaggttgccttgtattatggggagaaataaaaatacaatccttagtttcctttaggataaaatgtagaaatagatctttagttgggaaaagcgggaaaggaaatcttgttaaaatcggtggcctaagcattgccatgttatgttatgagcgtctttttgctcacaaaagaaatctgttctagccttgaaggactgatgtccaagttttggtggaaatctcagtcaagatcggctaataaatgggtgagttggaaaaggctttgtaaacacaaatatgttggaggcattgggttctgcgatcttcataactataatcttgcgttttggggaaaacaaggttggcaactattgactaatgaagattctttggccagcaaaatttataaagttagatattatccttcgggtagttttctcaatgctactcttggacaaaatcctagttttatttggcggagtatttttgaagcccaagatctggttcgggcaggggtgcaaaggtcaataggcaatggtaaattggtgagtagcttacatgatccttggttgccagatttggataacccttatgtcatttcaggtcatcctggtttggttaatcaaatggtttttaacttgttctcggtgaggtctacaagctgggatttggaggtgattgatgatatgtttagggcaagagatagagatttgatcgtctctatacaactttgtgatacagctgaaagtgatgagcgatactggaatagagaagcttatatgggttttatactatgaaaagtacatataagtttctgcaatgttaatggggttgctgaagtggttcggtcggagtaaaaattattatggacagttggatgtcccgccaaaagttcaatcattttttgtggcgagctgtttcggggtgtcttcctactaaggtacaattagacactatgcatgttaatgttgatttctccaatgcaggtttacacagacttgttggagtgtttcttgtgtgaacatggatgctgttatggatggagactacatcagctagtttttttaatgtggcagagactcaaagtgagttgttggtgctagaagctgccatgattagttggaaaatttgggcagttaggaatgatgtattgtggaagaacaaatcgtgctttgctagggaggtggttcggtcagctagagttgtccttgaccaatggaagaatgctcaatctcaaaaatgtggtgcattgttagttgatgatattaacaatgttagtgagctatggaggaaaccaatgttgaatacagtcaaggtgaatgttgacagattgtgtatctttagtattgttagacgatctgtaaataaggtcgctcattgtattgttagagag

SEQ ID NO: 229177 - DNA, 1236 bp, Cannabis indica
aatattatactttgtaatagacttataattgtaaacattatgtttaaaataatattaaatttgtaaacataattattattatataaatgatatttaaattgatttttaagctaaaaaatattcttattattgtttattatatattaatataatttatgtttataatgctattttgtaatatattttgtttattatatcagtattttaaaaattattaataatataatatgtttattaaacacaaaataaacaatttcgtaaaattaattacataaataacaaacagttttataaaaataaacaaattaaatatttttttttattaagagtagatgtttattatttattttagtatgaattatcataatttaataatttttttcaatgaaatacaatatcaaaattataaacattaatgtatataaattttaaaagtgtgtttatttaaaattaaaaaacacaaaaataaataaaatttaaatgtgtgcttattatgttattatatcaatgtttataattttaaaagattactaataatttataataatgtatataattataggacacttctatagtagggatgcattttttgtctctatgatagagacactttattacacattgattaatgatccaatagtgagaagaatgtaaggagtatgatagtgaatatggactttactacatggttacatatctcttcaaatcttaataatattttaatccttattcttttctttaattttgtttttactttagtcaatttttctcataatttaatttttttctttttcttttttaattaaaaaataattagtaaatttatttttatttcaaatagttagttgagacttttttttttcttttaaataaaaataattttatgatagttttttaaaaaaataagttgatctaataaaaattagtgcacctcctttcagtagaccccttgtttcggtatccaaaaatatttctaattttttcagtgaactatttgtaaattttcaaaaaattctaaataatttacaatgttaaaaataaggttaaaatattttattgcacgaatgattgttttttcttatagacgtagtaatcaactgtttgaattttatttacggcactgtaaactatttaaaattttatgaaaatttactggtgtttctaagtaactacaatgtacaggatcaaaaaataataataatttaaaacagagaaggaggtctatcgaaataaccc

SEQ ID NO: 229178 - DNA, 547 bp, Cannabis indica
ccacatgaagaaactcatcactgttatgggaaagagcccatgggcgccaaaaggtcttctaacccacagtttagacagaccaccccctccaggaggactcagcctgagggtggcccccaacactcgaaccacacattctaggaggacccaacctgacgttggtcccagtacacgaacgacacgctcgaggacgacttagcgtggttattgccagaatcatggaatgagggatgaggaacccaatagtggaggtactcagcctatgggagatagcacttacgaaacgtaaaatcaccaccttagatgccgctcagaggaggcacaacggaggaacgctgaattagagcgtaatgcagccgcaactagggcgacacaagggactaacactcaaaatcaacctgaacctggtgtgagaagaccacggggtaggcctcgtaaccaggagacaggaaaatgcccagggagaacaacctggagaaaatgagattccccctgaaaattctaatgatcggccagaaccctcacatagaaatgagaatgggaggca

SEQ ID NO: 229179 - DNA, 1268 bp, Cannabis indica
ttataattaaataaatataaaaattgaaattttaaaacatgtggtgcggtgcggtttgaatcgcggtttaataattcaaaaccgcaaaccgcaccgcaccgcgcggtttgggaaaaattcaaactgcaaccgcaccgcgaagaatttcaaaccgcattctttttgcggtgcggtacgggcggtttgagcggtttgatgtacacccctactttgaacaataaccttcttgtacttttttttaatgaaaggtaaatggaatttttatttggaaaatttcactattaatgtttaaaaatacattttatattaaaatttacactacgggctcgtttggaacgtcgtattaagttgtattgtattgtattgtattgtattatattgaattggattatatatcatatttttatataatattatgttaaactttaatttatactaaaatattatacatttaggtgtccataaaagttaataccatatatagttgtacataaaaatattgcataaaatacaagttaatataatacaatacaatacaatacgacctaatacggcgttccaaacgagccttataagtgtataacataatttaactaattgatttttttaattttgaaagatttttaaaatacccctaaattaaactttacctctctctgtatgtgtctttctctcttcacgcacaccatctcccccaacaaaaccaacccactgtctccccaccgtctccactaactctaaccaaccatgaagagtcttcatctctgacgaccacgaaacccacgaaattcaccaccaaactcgccgtcttcaccatagtcgcatgaaaccaacaaaactcgtgtcttttcttcatttgcgacgaccacgaaagctaccaccaaacttcgaccatttcgcagtgacacgaaacccaagaactctgccaaactccactatttactgagataactatttcacccaattcaaaaaggtaccatttttttttaaaaaaaaacagttattattttttattgttgtgttttgttgtggattttgtgatctctccggtgatagattgaagtgttggattttgtacctataaatgatattctagtgaactaatataatcactgaaatgagtactcaactatttatctctgttaagccaagctcgaaggaaatcatcgtttgacttctatatcgggatagaagctatagattctatatttatgattaacgctcccacttaattgaactaccatgtccttaacctatatgtcacgaga

SEQ ID NO: 229180 - DNA, 734 bp, Cannabis indica
aataaattcctattcattctttcaacaaacttattctgttggagtgttaacctgatagtcctatgtctcagtaaaccattctctctgcaataggcatcaaataagtcattgcaaaattctaacccatattctttccttaggaccttaagttttctacctgtttggttttccatcaataattttcagtgaacaatcttctgaaaagtatcatttttctatttgagtaaatatacccaaactttcctagaataaccatccactatggataaaaaataagaacagcctccatgtgtgctaacctttttaggaccccaaagatcagatgtacatattctagtatgtgcctagacttgtgtgtcccagtcttaaatttcagcctatggtgctttttccaagaatacaatattcacaaaaatcaacctttgttaccttatcttttccaagtagattctgttcacttactatttgtaaccccttctcactaatgtgacccaacgtctatgccatagtgttgtatttttattttctgaagcctgtgctactgcattgttgcaactagccactggttcaccacataggtagtatagaccatcattctttactcctttcataatgaccatggagcctttgcatagcttgatatgtctagcttcactactagaaaattaggttttagtcacactccacacgtgtcactgaaatcttttagtgacacttcaacgcgtgtcactaat

SEQ ID NO: 229181 - DNA, 2629 bp, Cannabis indica
aagtcttcagcagaaactccatcgtccggactgagcaaatttgcaacacaacggggatggtaaaatttgccacaggttgccaaaacacaacgaaacacctaaagcaattcatatcaccaggctcatatcaaacaactagctatgtttgcacagtttgcataaagaataaataaaacaatcccaacagacacacaaaaagaaaatttcacaggaatgtgctattttaatatattcttgtttgtcttgtaatcacttaatgccctgttatttaaccttaaatcagtttaaagctgaacttttgaaccaattcaggtaaaaaatatgtatatgaataagtaaaattgatttctaatgcaactaaaatacactcaatttaaaaagtattttgagaatccataagctaattttgaaccagttccacaacagaacaccttatttgcattaaaaaaaaaaggcatcttgaattttcaattgaaaagatatgaaaacattaatatttcatatccttttcctctattaatactctttttgttttacaaccatgttcaactctaaaaagaaattaaagtgaataaatttgggatattttggtcaaaattgaaaaactgttaaccaaaactggtggaaacatataattttaaaactaaaatgactaattaggtaataattacaccacaagacaaaacagaatactaaaatggtatatttcccaaatcactaccactatttatttatcaacacaaaatgcaatgaagcaacaaactccttttcacattaactttgaccataaccatgtaagatgtatagtaaattgaaatattttgactcagttcagttagttgcaaaaagtcagaaactcttacctcagcacctgaacagttatcagatgagcctaatgtcccacaaacataacactggtgctgtttatattcacaattcttgcacaaacactgaatcgactggcaagtttcgtaagataaaagacataaaagaagattaatctccaacataaaaacaacaaaatgaaaccagagttgcagaattgatacaaatcagcaacatacctctacttcatcctctgtatagcctagagaaatgcacgaagcttctctaccgctctccacagttggatggaacgaccttaaacagctaccagtacagctacaatggatcacaaatagcattaacatcttaaattcaataaccaactttgtgaatgaatgttaaaaacactacaaaacaatcatgaatgaggagagttgaagttgtatatcgaaattataaattcagattgtataataatgtatatgtacacaaccaaacttctgttgtagtaaaactaaattcacttgagattagtgaaagtggttgggcatgtgagtgtgtaagaggtggaacaggtttaaatcccctttgtatccattcttgtaaactaaagttaatatataagcagcaaaactatctaagattttctcattctgatacataattagtaaagttttttccacatttactaaagcttgtgtggttttaccaataatattcttatattttatatcatcactaatataagtagcaatatttttttcaaaactgagaaagaaaaaaggttcaacaacaataacatacctcaaaagattaccaccatcatcacaaaaagtacagatgtcaaagttatcagaatcatcgtgctgtacattatctactatcttctcgtctgtttcttcaactataaatcttggagtagatgttgcttgcttttcctgataaataatatatttttcccattgagaaaatagataaaattgaaaaacaaagaaaaatataggaaaggagaaaccaagtgaataagtgagcgtgataatatgacctcatcaagtagtctcctctttctctttctgggcttctcatcaagaaattcaagtaaaaactgtgcaacaaataaattaaattacagttgagagatgtatgttagaaactgagcaatgaagacttcaatacaaacttctatgtttcctaactagaggcttggttcaacattgttcatataacttcatacaaatgcacaatggaacttaataccatacagacagccaacaaatatagcaacctaatgtgtagccatggaaactaaattagcaagcaaactaaagggttttttttattgttgttattaacaaaatcctgaaatgttgtgaccttaacaaatttgcatctaatgtttggatttatgatattcatgctctctataacacggatatatgatatatcaaatcccaacttattttttaattgccaaataataaaagctatacaaaccttagaccttgctaaggtgccatgccttttaatagcttttgcgattaaagttgagtgatctgccaaatcaaactcagaatgcctaaccttacataatctgaaaaaaatgaatagagaatgttagtgaacaatgttaccaagctaaaacaaaataatgactattcgctaagtacataagtgcaaaagacacctgaaaacttcagaccacaaatatttccctgatgtatagggatttctctttatgacatgaagacagttcatgttaggttttatgccctaaataaaactctttacaatctgattagttatc

SEQ ID NO: 229182 - DNA, 1686 bp, Cannabis indica
agacatgataacacgattcaaaacttgtacgagagttaatggattttggttatctttaaatgagttcgggttgtgttcgggttaacttgtctaacttgtttaataaacgagttatgttcgggttgacacagctaatacgaaattgatttgttaatgacttatttaaagttattttaatattttaataggtcataaacgtattgaatatgtaataaacgtgttattagctgacatgttaaaaaaaaatatgcttataaacaagttacgtctgtttataaacatgtcgtaattaggttttattttctagcacaattattaaacggatggtgttcggatcaagtatatacatgttatacataattctcgacacgatacaaatatgacccgcaaacaacgactcctacgattacgtcaacatgatattgctcaagaatgatcaattttgtgctatgaaatgtttaatttataaactgggcacccacaaccaccaccattaaaaattatgagtgggcttagttggatttccttgatttatttattgttttatggatttttcctattggagaaagttttgtaccattgaatttcaccagtgatcatcctaatcagtccactaattggatattatgtataatgcataatgattgttatgtggacactttgggggcatagaagaaaattaaaaaaaatgatatatagttaattataaacttggaccattgccataatccaaaattatcagttgaatcattgcaattcttcttttctttccacccattaatatgaaaatattattttactatatttgacatgtaaaacttttacaaaagatttatacaataatttcaagttccaacccatgtgaaaaaatattagaagttttatttacattctaaaaatttataaatatactattttttaataatttttattttatataaaacttatactttaattatattaattttttttctttcaaatcatattcttaacagatataatcaattaaaaaaaattatataatttttttaaaaaaataaaaagttataaaaataaaatttaaacatgtattgaatactaacataaaataatgtgaggaatttttttaaaaaataatattaaaagtaatttttaaaaattattttaaactttcttaattttgagatgtacatataattactttgtgggggaggggggtttgtaaatagaattttttaaaatattttttatatatacaaatagagatatattatttatagggatcgtacttggttatgggacccttaaattgttttagagtatggttaaatgttttgttgtatttatttggagtgtagttgaagaatgccaaaaacattttgttgcttggtcattccaatcaaatccaaataatatttgttgctttttcagagcaaagcacatggaaatttgtaaccatttggctacaaacaaacattcataagaccatctccaaggagctcatcaaatatggtgtcacactatcaccaaatttgatgttaaaaactatcttcactccaaccacaacaccaaaaattatactaaaaaaatattccttattattatattaattttttaataaaaaaagactaaaaaacacattgtaatttaataaatacaattaataatatagacatatacaaaaattagttataaaaaaaaaaaaaa

SEQ ID NO: 229183 - DNA, 1632 bp, Cannabis indica
aatgtcctgatttataaaaaaaaaaaaaaaaacttttggatatcccagccgccattatctatcagaagctcagccaccttatccattcaacaaatggaggaaccattagcatgaaggctgaaacctttcttatgagctatccaagggtcctcccagaccttagtatctttgccattcacaaccaccttgcacgctcctttttttaaaatagggatggcactgacacaacttttccaaaacgaagaatcagaatctttggaagtataattgagaaagcgctttcctttaaggtatttagcttccaagattttgcaacaaagggattgactgccagacaggaggttccatccccatttggccaagaacgcttggttaatttctttagttttcctgaaacccaaaccagttagagacttagggaggcaaagcttgtcccaagctttaagatggagaccatggttacccgtttccgacccccactagaagtccctaaccagcccatcaatttgagcaacaagacggttcgaaagcttagttgtttgcatagcatacataggcaacaacaaagcccacagagtttataagggtcgcaggacttgctttggtcagagtcttagctttccagccctgaagtttagatgtgaggttatccaagataaagttgaaatctgcatccttttgcctagatctaaaaagaggtagccccagatattttatgttaccttccggagagctcaaacccagagcctccttaatacttcttttgatcccattagaggtatttttgctaaataatatagaggttttgatcttgttgacttgctgacctgacccagcgcagaatctctcaaggcaatgtgagtaacctttggcttcctccatgtttgctcttcccagcaatattaaatcatctgcaaagaagatatgagagataatggggccccctctactgagcttaatgcccttatagagccattatcttgggcatcaatcaaaagtttggacaaaatttccgctgcgcaaataaaaaggtaaggagataaagggtcgccctggcgcaggccacaacagggtataattctaccaaactgccctccattaatgcaaatgttgagtgaggtggtagtgatacactggagatccaacctctaaattttttgtggcgctccaaaactagcaagcacttagtcaataaaattcaaactcaacttgtcgtacgcgttcataaggtcaatttttatggcaaaaaaaccttcttttcctcttttcctgttgaagagtggataatttcttggataatcacattattgtcttgagtgttccttcctgagacaaaagccgcttgggtaggacaaattagggaaggaagcaggggcttgattctattggcaatgattttagagatgaccttatacataacgttacagagggagataggcctgtaatggttggttcttttcggattctgcaccttgggaataagcacaatattcgtagcattgacacccttatgcattcttctcgtctgaaaaaaattagacactgcatcgcaaacgtccctacccacagatccccagtagtgcttgatgaaaagaacaaacattccaagccttattgttactcatggcaaac

SEQ ID NO: 229184 - DNA, 1474 bp, Cannabis indica
agaataaaagtgaaaaataaaaatactaaacctaataagataatctccaatagagatgctattaaggatgcttgatgatacatttttagtattttttaattgatgcttaccattgaaataaaaagaatcccacaaaagaatatcatactataacattctttacatcttctctttcttatttttttattattattttatcataaagtaacaaaatttatttatctaatatatattaaatagtaatataatattattttttaataatttttagagatgcttaccattggattattttagaacaaaaagtgccaaaaaatgatgtgtaagagagataaaataaaataatatatttttaagtgatgggaaagtttttgacaatcttaaagaatgccactattggagatgttctaaccgtaaaaattaaaaaaaataataataaaacactaaatgaaaataccctcttcctaaccctaactcctcagtatctgaagatcgatttcccaacttgaaggatccaaaacaagagcaccaacatcgatatgtaatcctctactaccaccgcttgacccttaccaatccttggttcacgaaacaacattggggaaggctaaaagaatcaaaactttgagccacaaaagatggagaaaagttttcaccttcactagcaaagatttacaaccctcttggccagagccacccaagcctagcatgggtcatctagctccaaccgagagaaatgagaaactcccccaatggtgtcgttgcataagatagggaaattaagcccttaattttcgaaattaagcccttattttattttcaatcttgtatgtacactattattcaatatcctatcttaaaatttatttattttttttcgaatttatttggttaaatcatataaaaaatttacttaagatttgtagagtggataaaatctatgaaatagtgcaggggtttattagtaatttgtaaggagtgtgaatgactataaatatataattatgtagcaattgttggaaatagaatgagaaaataatacttcgattcaagtgggagattgacactgtctcaaagagcgtattttaggagaatttgtcatgtctcaaaacggactattatctatcattgatgccttcattgtgaggtcaaatctcctaaaatgcactcttcaagacagtgtcaatgtcccaattaaactgaagttctattttctcattctattcctaacaataactacacaattacatatttatagtccttcacacttttacaaattactaataaacctctgcactatttcatagtgtaacactttcccattcttcaaaattaccttgtcctcaaggtgataaaaataaaaataaaatgcaaaaacacacaaaataataacaatcaagctcaaatgtagcccatttattattatggcctaatacacttttcagtgaagtcaagcccaaagtacctagggcaa

SEQ ID NO: 229185 - DNA, 713 bp, Cannabis indica
gaaaaatctgactaattttgccaagattatcattaggaaaaaaagaaaacggcaaagaagagtaaatgagtaaagtgaaagatagtagttaataaaagaaaaaaaatcaaagatggcattatttttcccaaatccaatcgtatcctcttagtgggtctcttgattttgattgtgtttaaagtcaagacaaaaagtggcagaaaaatagtggtgatttttaatcacattattcaaatattttatacatgcctttcacttgtcaaaacaatccctctcctatgaattttgcaaaccaaaccaaacccaactcaacctacctcaactccttattaattgacctaaaatttaaaaattagaattaagttgccatactgatcatcaaaattgacgacaatgatgatgattctttgacataatcatgactgaaggattattaatgaaccacaaataatttggaagcaggctattagtatgtagaggcgaattaagcaaacgtgtttaattttattccactagtttctcttaattactctcaaagaaagataaattactttcacactaaaacacgttgacaattaatgtaagtgtatagtttacgtcttctctttatacttaataaaataaatatacatattttatatagtacccttaaaagttaaaattaaaagtacaaattacaccatatataataaaattacaaaagtttacttttt

SEQ ID NO: 229186 - DNA, 1006 bp, Cannabis indica
aaagaaataatttaatcttatgtagaaataatttaatcttatgtagaacctagaaatgacattatgcatcaagcaataatacaataataaagattaaacataaaactaaacataaatattatttttattaaatagaaacacatagaaagagcatgactaatcctatatatctttagtaaaaacaatgacaaagagatagaaatagagatggtggtgatagtgaaggaaatgaacattatagtttatcgaggaactccttcgtgttgttaattgagatcctctaaatgtctttccatatcttactcaatgagaggatgcctcgagcatgggtcgtatactgaccttcttctgtaaggctattgttgagcctgagatccctgtaggggaaggtttgtcctggttcctaaagaacctagttagttagcttgttgatagaccctccctgatctatcaactagtcttcgttggagtagatctttgatgagatcctagcctcttccatttgttctctgattgaatcgccttatcaagtcattggcttctctgttgcgccgatccagcttttcttggtgagttcaaaagatgtactattggtcatccatccatctcaagaatttgcatctctactttgtgaatacatcacaatcaatagcgtgtggttcttaagttaggctggcttggtagacggcctctctcagtctagctaactcgagatcttctcccaagtccacatggggcttgccaattcctggtcctgtctctccaacatagtactagagacgaggttttgttgttgaacctgagggctattccccaagggtctttcctttagtgggaggtgccagtggtgggtcttccttcggaggcaagggtctgctgcttagatccaccgggatgtttgtgtcactctggcagctgtagtgaccaaattcgaggtgcctgtcatgatggtaagattgaccacatctgcatgggaattccaatagtggctggaacatgaacatca

SEQ ID NO: 229187 - DNA, 2607 bp, Cannabis indica
ttggggtccttatcatattccatctcactctaaccaccaatattttcttactttggttgacgacaagactagatttacttggatctacttgatgagacaaaaatctgatgtttctcatattattcctcaatttatttcttatattcagacacaatttaattgcatattcaaatgcttcagatctgataatgccccagagttagtctttaaggatttatttgctaaatttggcattttacatgactttacttgcgtggaaactcctgaacaaaatgcggtcgctgaaagaaaacatcagcatcttttaaatgttgctcgtgctttgctttttcaatctaatttgcctattaaattttggagtgaatgcattatgacagctgcatatttgataaatcgaacacccactcccaacttaggtaatactactccttatgaattattgtttaacaaagctcctaaatatgaacatctaaggaattttggctgcttagtttttgcatctactcttactgcacatcgcactaaatttgaacctagaacacgcacatgtgtttttatgggttatcctcaaggagtaaagggatacaagttgtatgacataaacaacaaacaattcctcatatctaggaatgttgttttccacgaaaacatatatcctttttacaaacttaacaatgacagcctgcatattgatcctttctctcatattgtattacctactgctgatgttaatgatactagtgtagcagatttttctccagcagccgaagaagagaatgaaatcagtgatttctctcaaaataatgactctcactcgcaagaaacaaactgcccctcagaaacaaatcagaatgcagcaacagatcccccaattcagcaacctcaattagataatctgccaagaagaacaagccgagtaataaggcagccagcctatttacgtgactacgaatgtcactctgttattcaggataaaacctctactccccatcctttaaataagtttgtatcttatgatcgattatctaccacttataaatctttcatccttgctttaacagctcatttcgaacctacaaactacaatcaggcctcacaataccgtgtttggaatcaagcaatgcagcgtgaattatttgctctcctcaagaacaagacctggacatatgttcgcttgccacctaacaaaagagtcataggatgtcgctgggtatacaaaattaaatacaatagtgatggatctgttgagcgatgcaaggcacgtctcgttgcttaaggatacacgcagcaagaaagactagacttcttcgacactttctcacctgtagctaaaatggttacattcaagctactgctcgccattgccaccatccaacaatggcacacattacaaatagatgtggacaacgccttcctcaacggagatcttcatgaagaagtctacatggaactaccaaaaggtctcaagctaccggattcaatagaaccaaactctaacttggtatgtaaactcaacaaatcaatctatggattgaaacaatcatcaagacaatggtatcgcaagctctcggacactttacttcaagaaggtttcgttcaatcaagggctgattacaccctttttactagaggacacgatgagtcatttgttgcacttctagtctatgttgacgacattatattggcgggaccaaatctcaccctcctacagcagatacaacaacaactaaaccagaaattctctctcaaaactttaggaaatctcaagtacttccttggttttgagatagctcgagcaaaggacgctttggttctcacacaacgaaaatatactttgactctccttgaagacaatggtctctctggaagcaaaccagcaaagacccctatggaccccaaagtcaagcttgacgatgaaaccggtactcttctcaccaacccctctcagtatcgtcaactggttggcaagcttctatatcttacgctatctcgacccgacatcacatatgctgtgaacactttgagtcaattcatgacaactccgagaaccacacacatgcaagctgttactcatcttttacgatacttaaaaggcaatcctgggcagggcctaatatactcaaccagctcttcattacaccttcggggtttctctgactccgattgggctgcctgcccaactacgagacgttccactacaggtttttgtatctttcttggggattgcctcatttcctggcgcaccaaaaagcaaccaactatctcccgcagttcagcagaagcagagtaccgcgctctcgctgctaccagcagtgagattacatggttgcaataccttcttcaagactttcagattcagcaagataaacccgccttcatatactgcgataaccaatcggccatacacattgcaaacaatccgacttttcacgaaagaacaaaacacatagagctggattgtcacttcattcgtgacaaaatcaaggaatctaccatcagactaatcccagttaataccacacaacaactagctgatgctttcacaaagcctttatcttccaccattctcaactctcacataggcaaaatggctgtatatgacatata

SEQ ID NO: 229188 - DNA, 1838 bp, Cannabis indica
ttttttttaaattatatatatttacaagatcataatatagttaggagagaaagtgacatatttgtccccgtttaactccttcaaccaaaataacatgtccacaatttcaatcaatattctgaatattgatattatatcaacaacaaaccaaatgttaaatatataggcacaatgaaagtttcaaatcaacattttatttttattaattagtcataataattttgtcaaggtgattaatatgtcaatacatatattttatttaattatagcaccacattgttaattggtgtataacggtaatatagtacaatatacatatacatcactacaaagataagaattatttatttatttagttttcgtgtcgagttgatgatacaagaatattgattattgctattatatatacacaaaataatattatttatttatttttgttgccatatagtttatttataattaattttttatttctcgttatattgattttatgttatttttttatatttttttgttgaattttataaataaaaacttcaagtactaaaaattaaaaaaaaaaaaaaaaagtaatttgaacatttctctatatattaagtacataatttttttttcttggttccaatatatattttcttctgattgagtattgtaagaaaattggcaacaaaataaaataatgtcttgatcaaatagaattacatatcttctatatgctaatacacataattatatatattattattgtgaaataaatagatgtgactgctattggagttatttatagcgatatagaagggaagtctcacaaggcactaattcgtgataaaggagaagtaatactaagtgcaggtgcacttggaagccctcaacttttgttacttagtggaattggtccaaaatcatacctctcatcacaacatattcccatagtcctatcccaacccaatgttggaaaattcatggctgataatcctcgtaacaatcttaatctcataatcccattcccattggaagcatcaacaggacaagttgtaggaattaccaaagattattacatagagaccaactcatatagcttgccattttcaccaacaaaattaccttttggcttttaccccaccccattattaccaccacaattaaccctaacagtattcgtagaaaaaattgttgggcctttgtccacgggtactcttacgttggcttctgccactgatgtcaaagtcacaccacatgttcggttcaactacttctctaatccaattgacctagcgcgttgcgttagcgcaatgaagaaatttggcgagttgttgaagactaagtctatggatcgatttaagtacaaggatatggatggtgttagggatttcatgtttctagggcaacttttgccgacaaatcaatcagatgattcgttaatggaagactattgtcgaagttcggttacaaccttttggcattatcatggcggatgtcttgtgggaaaagttgttgatggtgaatttagggttattggagctaattcacttcgagttgttgatggttcaacttttactgtgtctccagggaccaaccctcaagccactctaatgatgattggtcggtaagtctatttttatatatatatatatatatatatatatattttttctttcataacatttataaatttctattatgttattagaaatgacactcactaccaataccacaacataatttttttttatgtgattaatacatgcagttatcttggactgaagatggtaagagaaagaggagagtgacaattacaaatataaaatgaagatctatattatctattatatttcttt

SEQ ID NO: 229189 - DNA, 979 bp, Cannabis indica
tttctgatcctgcttgacccctacatgtaaagaattattcccaatattaattaatatctaatagatgatgtttatgtagaatatatttttgattagatgatgttaatagaagctatcaattacatcctagagtcaaagttttgtttttaactctggcattggatatattatttgccaaaccgtatgtcacgtagcacagtcatatttcgttgaaaatgtataaatacatacctatgtggtgattggtacataaaataaaataaaatataagaaaaaatatttgtccggaaaaagggagtttggtttgctattttatgacatctctcgtttacgaatgaaatttaaatagaattatcccacatcgtacaagtttggcggatgaaaggttttatatacgtacgttttgcaagcttgatcgccgggcctagtaacgtgggcctgtgaccaagtggggcattaaaatggtagggatgcacttggtgtggccgggaccggggagagcgggtgtggttgcagatcatgttgtaagccagttgttacgaggtcctccattagaccaccacccgggggatggtcggtaggaagttgtgcctttatttgtagagcacagttgaggacgagactgaaggatcaaacccacacaacgcattgcggttagtcattacctggttccggttcacatcgcaaacaaccattttttaattgtgtgatctcatgccattatgaatgagacctgttaataccgcaatccatgccttaaaccaacactctactcctagtactactaataaccatgcttcttcttctggaccacgagcttccatgcctttcttaatatagtgaggtttttcttactataatattgcaagctatttttaaaactgcgatttctctataaccgagtccttgcggagagggtaaatttatgccgataacatgtttgttaccaaaatattattccttttttaaaaaaaaaaaa

SEQ ID NO: 229190 - DNA, 1445 bp, Cannabis indica
tatactactactactactactctctctctctctctctctctctctctctctctctctctctctctctcttaatgatctgacttggtgtactttatttgtttatagacaaacgttgccagatttgatggacatgttggagcagtaactgctatatctttctctgaaaatggttacttccttgcggtatgtgcttttgtttaaaaaaaaaagcaaaatgcagttgaattgtctattagatgtaccatgttttgatgttgggtctgaaatggacagactgcagcaagtgacggtgtgaagctctgggatttacgtaaattgaggaacttcaggacatttgctccttatggttcagagacgccaacaagctctggtatgtacattggcatacatgtatttatttaatgaatgatgttgacgatctggttgtgacacatgcacatagattattctaggccaacttttgtatgatgtgtgatgttcttgttgcagttgaattcgaccatagtggaagttaccttgcacttgcgggtgctgatataaggtgtgcttcgaaaactatatttgtattttgctatatttttatgctgatgagatggcaccactcaccaccccagaataagtagagcttaatgtaattcacttttgaggtggtactactatatcagtcttctacctcgaaagaaatttgatgaaaataaacaaaggactaacgattaggattgtacttctgcagagtttaccaggttgcaaatgttaaatcggaatggaattgtatcaaaactttccctgatttgtctggcacaggtatgtatgcatacattataaccatcaatggtacagaactggatttaaattaagttttctcacactaattcttcattctaggtaaagcaacgtgtgtaaaatttggcccggatgcaaagtaccttgcagttggatcaatggaccgaaacctccggatttttggcctaccaggggataccgaagcaatggagtcttaaaccaacataaagtcaatctagctagaaaaattactgttgtacctctactcgctgattcatttttgttgggcctgaatactgatgattagttggatgtggccgtgtatgctcccagttccgaaacaatgaactggaagagagctggaggcaattcctacatttgagcattatgcggcaacttcatcttcttctcatctgagttgtgacattcttaatagccagtggttagaacttaggcacatcatctctctttctcttgtactattttgttctttatcatgtgatttttttctcttgaaatatactgcagtttatgaatggtaaaaaatggagttatgattattgattgagaactctactcgcatgtaatttttatgaaattgtttttattattgatcaacccactttagcctcatacaatcaggtcatcagttgaaaacattt

SEQ ID NO: 229191 - DNA, 1206 bp, Cannabis indica
caatgagagagagattggtcaaaagccatgattatatttaaaagaatatctgtaccaaccaagaatttgattcataataccatgtccttttggctttctcatatacaagcacaatttcttttctttttaatctttacttctctccttggtttctttaattagctacaaaaattcagtaactatagatatattgagtcttcaaattgaacaaattaagttaaattttgtcaaaatgcatagaacacatgaccattacttactcatcctaatgttatagcaaacataaattttttggtaagggaatatgttgtcaaagaaaaatggtcaacttacaaatacaattcaatattttgcaattccaaaaggacttttagaatgatgtacaagtacaattcaaaagttttgaataagagataattattgttattattctttcttttttgtttctttgtaaaaaaaagaatgacctaatcacttcactctcatatgcacttattattattggcccctcaatctggcgtttaaaatgaaaaaacaatgctctcaaacagtaacaaaatctatatataaaacaaagccaaagatcagaaacagagttaaataaatgttatgctgctcaaactgtacaatgttgaaatgcataattgctgagttagaagccaaagtacgcaaattctttttgcacttttccgttatatttttatttgatttactctatggctaatataaacgtttaatcttaggtggcgcttatttaagagaaattaaaatataaaaataaaaataaaaataaaaataaaaataaaaataaaaatagaaataataataaaaataaaatttaaaatacatgtaaaaattgataagaatatttcattccgtttgaaaaaagaataattattatacttaaagagtagaaagaccattttattagaataacattctaatatttttaaatataactaaataaataaataaaataaaaattatatcatttatattttattttattttattacctctaactaaataccaccttaatcttgaggttaggagcttacattcaatggtgaaaagaaccttacctaaggagaaaataggaaaaacataatgaccattgaatgctagttgagctctcaattttggttattttattttgtctttatctatcttctttttcttcttttatttctttgttttttttttttt

SEQ ID NO: 229192 - DNA, 2892 bp, Cannabis indica
acattagtccaaacgtcatcttttcacattttaaaatgttaacaaaaacatgcctgttgtgcagcaaaaaagatgtccccttgatctggtcaaatcagaggttctaaaacaagaagtggacaagatgctgtcaaatatcttcatccgagatgtttactacccagagtggttgactaacccagttctagcaccaaaacccaataggacatggcgagtatacattgaattcatggacttgaacaaggcatgtcccaaagattatttcccattaccctgaattgaccaaatggtggatgccacgtccaatatgagttgttatctttcatggacgcttactttggttacaaccagattaagatgcacgtggctgaccacgagtgtactagcttcagggcagataaatgggtatattgttacttggtcatgccttttgggctaaagactgaaggagcaacttaccaacgactggttaattggatgttcaaaaattagttggaaagaaacatggaggtttatgtagatgacatgcaagtcaagtccaaaaccagtaagaaccattctgacgaccttaaagaatgttttaaagtagtaagaaagtacgggatgaagctcaatcccaagaagtacacttttagagtaaagctaagaaaatttctaggattcataatcaaccgacgagggataaaagctaaacccaagaaaatacaagccttgctagatatgccctcccccaagaaatataaggatgtgcaaagattaatgggaaagatagatgccttgagccctttcatctccaattccattgacaaatgtatcccgttcattaatatattaaagaaaagccaaaagttaaaattgaccaaggaatgcaaggaggcattcaggagattaaaggaacatatgaccaaaccaccaattttatccaaaccaatgcaaggggaagattgtacctttatttagctatctctgagaatgttgccagcacaaccttagtctgtgaggaagttaagaactagcatcatgtttattacgtcaacaaacggatgataggagcagaagtttggtaccctttgatagagaagctagccttctatctactagtagcatcttggaagctatgactctacttccaatcacattcaatcaatgtctttaccaaccatccactttgacaagttttgtataagtcagagtccttagggagattgcttaaatgggtcattgaacttagttaatttaacattcagtacctccgcacattttgattaaatgacaggtcttagcagacttcattgtagagtgcaatgaaactgaggcaaatatgaatacgccggaagtaattgcacccacctagatagtgtatgtggatggggcctcaaacgaaagtggatcaggagaaaaactagtgatgatatctccaaaagggttcagaataccctgcatttcaaattcccaacctctaacaatgaggtagagtatgaggccttgctggcacaattgagattgtcaaaagttgtgggagcctaccggatagaaattttcagtgactcccaatttgtttttaatcaggttctgggggaatatcaaacttaaggagaaaagatgacctcttacgtctccgccgcaagagaatcgctccaagagttcaagaagtaaaaaattgagcagatcccaagggagaaaaatgcacatgcggattgcctagcaaagttagcttcaaataaggaagtaatgagactaagggtagtccccatcgagtacctctctgagccaagtatcctaaccaagacagaggttagattcactgttcaagagcccagctaaatggacccaattattaattacctgaccaagggagagttgcctcagtacagggcagcctctagaaaagttcagtagtaggctccccattatctcacaatttaaggtatactctaccagagagacttaagtatgccttatctcaggtgtgtttctcaccttgaagccaaacaaacaatgaaggagattcatgaaggattttttggggaccacatagtttgtctaaaaagattttgagacaagggtacttctggcccactgtgaaaaaataatgcatagactatgtctagaaatgtgacccttgccaaagttttgcaaacatctcgagggccccccaaatggaatcacatcaataacgagtccatggtcatttgtagtatggggcattgaccttattaggtctctcccagcgagaatgggtagagtcaaacatgtaatagttgttatagactatttcacgaagtggacaaaggccgagccaataaactcaatcaatgctaaaaataccctagacttcgtggttaaaaacattgtttgtcgatatggactgccccagaagatagtctcagacaatggcaaacagttttacaatgattaacagaattatacgaaaaatatggagccatcaaaagcttttctatggttgcaagaccacatgcaaatggtcaagtagaaactatgaataagatattgaaggtcacactaaagaagaaactcttggcctgtgaaaacaattggcttgaggaattgtcgcatgtactctaggcataccgaaccactacccggaagaccattagacattctccattttctatggtatatggatgtgaggcaatgatcgtggtagagagtacaattccctccgacagaaggaccgcctacgacctaaccactgatcgtgggaggagtcataatacgtttggtcgcataccaaaggaaagtggaaaaacactttaattcaaaagttaaaaataggacgttctcaacaagagacgtggttctaagaagggtttttcccgcctcacaagaccccgaagtgggggtattaggcctgaactgggaagaatttta

SEQ ID NO: 229193 - DNA, 2538 bp, Cannabis indica
taacagaatattcttttatttttaaggtatattctgttaaaccaagaaatgccgttagatatgcacttttaatatataaagatatatatatatatatatactaggtagaagttacgtgcactgtacgtatacttagttatatgtttaatttttattttaatttatgtattttaatttttgaattaaaaaaatatcaaatatagtttaattaagtatacaatattattttaatagaaaattgcttaattttttatttaaaaaaacgcataatagtattttgaaaaaacagttaaagaatataaaattaaatgaaaaatatttacaaaatgacctagaagtaattacattttgaaaattaaaaagaaattgtttactattctaaatattaaaaagaaatatagtctaaagttttaaaaattaagaaaaactctgcttataatgttaacatgtctacacgctattataaaaccaaacataaaggccgcattttataatttctagagttaacatcgctttaagaaaaaatatttaaaataaagtctatctctgatctaaattttaaaagaacttggattataatgctaacccacatataacttgaaaaaagaattatcattttctctttttagcagctccaccagatgtgcaagaaaaccacaaaagaaaattaaaaaaacaggtattagaaccaaaataaatcaatctttactgataatggataaataaacaatgtttcagaaagcaaaaaaaaaaacaacaacagaattattaattttctaatgtgatgaaaataaattcaatgttataaggctaaaatctacttaatttaagaaaaacaagttgagaaatcctcaatattattttactaattaaggtcatttgaaattatctaatcttgcggagaacattggacctctcctcacgctacttctccctcttatgggtttcgagcttcttctttgctactttaagtgcacgattgtcttatccaactttcagaagctcattaatccttttatcatacggtgctaataaacaaactatgaaataacacaatagactcacccctttgcggtcagaaagtctcagagctacttcttttttagtcataacatatcatttgttcataccctcagagctacttcattatcttagattatcatagaatacttacgattttacttttaaaacttgaaactaatcccatagaatagtcaacttcatcacataaatacaaagaaatattttctccaaggataaaagacagtgaaaaactattaccacaacaacaataataatccacatgaactgaattttacagcaaaaaccgtcataggatccatcaagttctatcttatcataatcactttaatgtagtgaaacagtaggaggttgttgaattaatggtacatgtattgtatttgtggtatatgattctttatcgatttataatttacaaatgacaaatacagaacatgtcatcctcaacaaatgaaagttagtcaagtaaacgtttgtgatctaagtgccttgttttaaaatggtttaaggttactaacttgcgaggatcgtagatagtcacagtacggtcagctccacctattacaattttaccaattgtagaactgcagacagcataatatatatcaccaacagaaccacaaatccattggaagcaactaccatttgttttcattctcaagtcccataatgtcagctacaataaattagcaaaaggaagcaaataaataaaaatctaataaacaaataaagagaacaaagctcataccagcatttagaaacaatgtaatgtagcattttacctggcaaccttcagcaacaactaaaatattacttccactcgcattacaagaattatgcataaagctcatggctgatggatacaatagcctgaaaagtagcaaaaattgattaaaagatccaaaaatttgatggaactctatcactgtctctatcactctaaccacaaaaaataggaaaaacactactcattcaacagtcacatatagcattgttaagaaaaacactcacatatagcataatatcagtcacatctagcattgttaagaaaaacacacatatagcataatatctctctgcttctcttccacacacacacacacatatatatacatatatatattggtaaaattgatgagcttgtttccatgaatcaatgctctcatcataatcttctttgttacttcttctcctctttcaaacttcttatcattcatgtcttcttcttcattatgtcaatccaccgaacgttctgctttgctccacggtcaaaactccttcactattaaagattattataatcattcaaattatataatataatatgtagattaatatagtttcacgagaaatcaatagtgtataacatatatatttataggcatatagtatactcaaccaaagtggccgatctaaagtagttgaaccatcaacccgatttctatttcgattttgggtgtatcattccgataagaacccaaaaagaaaaataaataa

SEQ ID NO: 229194 - DNA, 1087 bp, Cannabis indica
aaataatttttatgttaattatttcattttcttaactgaaagttttcaataaataatgagtagaccaagcggccaagtgagagactctacgtcgtaattactttttttttttcatataaataataataagttgattaaaataaaaaataatcaaaataatatactgcaaaactttaaaaagttgatgtgtaataatgttcttctagtctgttttatctttctttttaatttttttattcattttttataggtgatgtgtgaattaccaattcatttctcttgctttgaaaaaaaatatataataaaaaatataaatttaaaattttcattattggcaaaactatttttgaacattgataacacaattttttttatacattaggttttagtaatctatatgtggttagtgcataatgattaataatttttatattcttataaaatattattataattaaatatacaaacatgtatatttcgattgtagtgagttacataatatatataaattaaattaaaatacataataattaagtaatattaataagagatactcttgaagacaaagaagatattttaattgttggattggaatatttctccttgagtgaaaagaaaaataacatataattaattaaaatatgaaataaaattaatatatataaatgaatatttatataaaattcttaaagaatggcaaaataaattatgtatacttaattttttttgattgacgtacgacccttctaatttcattgacattgtcgaattactatggccgatttttgttcatactctatgggttagttttgaagtgaataactcactttcattttgcactcgaaggctaaattttatctaattagaggaaaactttgtacatcgatcaaaaattatgtaaaattatatgaaattagcatattttagtgtcgaggaaatttaaatcatgagctatttggaattttaaaattattaatagtttccaaaaaaattgaggaatcatataagaatgtaaaagaagaaaaagaataagaataagaagaaggagaagaagaaagcttacaatagtctttggatctaattgcaa

SEQ ID NO: 229195 - DNA, 1244 bp, Cannabis indica
gttatccatatgaacttagaagagaaaaaaacaaagggcacacttaggcatgtttagtaactttttagtttttttttagttttatttaacaaaagtttttagtttcatttagcaagttaattacatacaactttttttaattagtattaaagaatgttattctttataatataatgatttggttatgataattgaattaaagcaatatcaattagtttagtttggttggaagttttatatttttttcgaaccaaatcagtaatgacttttaaaatttaatttcaaagtagactaattaaatgttcaaatcaaaccaaatcaatcaactcaaaaaatgattggttcggtttgaaactttggtttataattcgtaaatgttctaattattttttattgaattagttttactttaaaacttataatacgtcaataacaataaaaataaatattcttaatacaatgttaaagtaattatcaatattatgactaacattgttcttaaatattaatatttaataaaaaatcatattaagtatatataaagaattaggtattttggtttagtttgtagtacggacgaaaattttaaaatcgtgactgaaccaaaaaattataaacgatctgaattgaccaaactattgacaccaaattcatttgatctgatctcaaataatttagtacaaatttattggagtttggaaccacatattgcaaattatatgaacaaccttatttaattatatatttcaatttttattttgagtagtagtatgaatggttgaaatctttgtccaaggctagccgtgcgactttgatcaaatcagttggacttgccttactagtttacgctatgcagactacgaagtttgttaagaagcttgcctctaaaattgatggtatgattagagatttttggtaggattgtgagcagggcaatcattgcatatatttaaaggctttgaatcacttatgtcttcccaaatcccgggtagccttggcttcctaaagactttaaaaatgaatcaagccttgctggccaagtggggatgggccctcatttatggggatcagtcattgtgttattagatgttaagagccaagtatctgagatgtaagccatttttggattgttcctttaacaacttagattcttagttctagaaaattgttgtgagaactaaagcaatccttaagaaatgtaacgtccccgcttcaagcctccattgggtccttgcacccacgga

SEQ ID NO: 229196 - DNA, 1732 bp, Cannabis indica
atatatatacacctataatctctattgagaaaagagataacaaagtagatcacaaaaaaatactactatgaattacaataaatacgatctttttgaagtgtaggattattggcatccccaccatacaagtcccctctatatattatcacttgtaaaagttaagaaaatgattgattgtattgtatcctaatatggttatatttatttgttgtgatttaacacttcagctgccttgcattatgtggcttgcaatttacaaacccaagaagttcagcccgtcttggttgataaactgggtaagtaaaaaaacttaaaaagccacaaggctctctaatcattcttagggaacatattattggattgaaaatatcctatcttcaaaggtaaagcaagtatacaataacagtagcccaactagaaaagagatattgagtctgtagaaatttcaggaccaccaatgaacaaactataggagtctcccacatacttgagctcataacccaaaaatctggccttattctattcgattcattagtgcggatattgagactcgagcctcgaactggggtgctgaaagaaagaagggtaaactgaagtgctcaagttgctacaagttagtacaatgaatcacaacacaacatctttgttatctatttttttatcataaagttaattaataaaagctagtgattagtggaggccaggaacaaataattaatctccgtgaatctacagagaactatgcacatgtaatacaaagattactatggacttgaaatcaagctgcagtaacagcataataaatttgctttgatttgaaatcaaccattttctttaatttaactctaatcatcactacatgtctataattagtattcagctttagctattgtttttttattatattccttcttacaatctagatcaagctaaatattctaaactactttctaggataatgctagttttggctgatgtttgtttttgacccttacagagcaatgaatttggatacaatcctatggtggtggatgactttctattctatcccttcttcacattaaatttcaaaacaaagcaacaaaatccaagttttcaacaagattgacaatctgtcaaatgtgtggacctgcacttcaagacacaaaagccaagcttttttccaagtacgaattgaatctttgtgttgattttttaatcatctttcttccaatcttcgtcgtttactaatctatatattgcttaaagaatgattataagacaatacgacaatccaatcaatcttttttgtttgggaagtaatggcagtatccgactctaacaaatttcaattttggggagacagagcaactaaacaaattgaaagagagagatgaaggagattagaaataaaatcaaccacatctgatacagatttatgaaaataacacatacattcagaacagattcacacattcatacacaaaacaacaagagcagattcagaatcatcaaaccagaaagagagagagaaaaaaatacctctgacaatgctaccaccaatcaaggaacccagcacttgcagagatgatcgaagaagacagtcctcacaacaatggcggcagattaatcttcaccttgctagggttagggtttgttgggttgggccatggctgtagtaggagagagataatttgttgatatgccaaagtagtggaatggaattataattccaccgaatgaaaaatggaaa

SEQ ID NO: 229197 - DNA, 2081 bp, Cannabis indica
aaaagtacaattgccgtgtcggtttttaagtgtcatttaaagaatttacgtcggtttaaaaaaccgacgtatataccgtagtcgcaaatagttttttattagcgtcattttcaaaacgacgcaaaaaacaatttttgacatttataaaccgacgcaaaagatttacttttctattttatcttatgcgtcggtttagaaatgacgctaaattttttatcacattttaaaactgtcacaaaaaacttattatgtctgttcaaaaatgtcatatctattatgaaattaaaatactttttttttaacctattgcgtcacttataaaatgaagcacaaatataagtaagagaaaattgcaaatttttcatgcaattttccccacctgcataatacaacaccaagacaagaacactcataaatatagaacctaactatgaaagtatgaaaagaataaagactaagaagaaagtgagtgttagatgcttaactatttcctctcttagtgagtctgacatcattttacaagattataacccctaagtgcctatatcattgagtgaaattagaactttgaatgctcaaaattacagaaaagtctctttttttttttcaagcaacaatatttgtcataattgtaatgaccgcaatggtgaaaatcaaccatgtagattactacatgtgagagtgtgtcctttttataattttggacaacttctatgtgatgcagtcttgctgtctcagtctggtatgctatgccaactaattttaaacaaaaatgagtggaaaaatacaagcatatgacacaaaaaaaaaaaaagagatgcagtccaatcaagccacttgttctttgccccaaaattaaactactttgtcaattcgcatttccaattcagtgattggcattaaaacacacctcttctgtgcacactcttttttatggtttgactgtcattgccttacaagagtgtaaaattggtaaacatatgatcatcttgttatttattttagacatgccatacattcaactttaaagtagatataaattacgaatgccaacaaacccaaaatatatatatatacaaaaaaaacctactaagtgtgaagagactaaccaatcaataataaaaaaaataaaaaaaaaactataataatttattgtttgtgaacctcatgttaatattgaaagaaatttctttagtacctcttctactgccttatccttaagagcttcagttgcgctcttagtgactttatttcaccatgagcaatccccaactcccttccctttttctgcaaaatatagtatcactataaatgcctctccttttatttacaacgttctaggaacacatatacagatggaagctagtcctaataattaacttgttaaaacaatgaaatacatgtatatatagtattctcattgaaaaatactaatatagaaagataattatatacatatattgtaaaatagagcataactaagtattcaatttattaaaacagagttcttgaaaatagtttttcatcataaaaacatatacttaatatagatacaagattattaaatcttataaaaaattattcatgatattaaccacagaatgtaaacatcataatctttaaatatagatacaaggaaggagacagagagtcaaagtgagaacctatgagaagatttttcaaacgattgagttttgagacaacagggtccgagtgaagagactcctcagaactgtagtgttcttcatgacccaccatggttacggtcttgtagttttattggtaatgaaatgaaatgcttagaccaattaataaacaaaatttcttagaataaaatattaatttcaccaacagataaggattatggtatgatatacataatttcaccaattgagagaggttatggtatgatttacatgatattatatatatattgcttttattaatttgagttatatcatgaaaaaactattgaattctcaagaatcgatagaatcaaagattctcattaccttcgggggtggagcacaatggttggtgactcgatgtggagcacaacggttggggactcggggtggagc

SEQ ID NO: 229198 - DNA, 1115 bp, Cannabis indica
actctcatcaacaacgtcaaaccgatctccggcgccttcccttcaccggtggcagctctaacggtggagacattacaataaatcctagccttacacctcatcagatcataaacctccattctcttcatcctatgcatcccaccctcattatgtctcatcaccacagcttgctcaaagcaaaacggtgccgtttcatcttcaacaccatcatcaaacccttcaatcattggctgcccatcaaacgtagcctccatcaaagtgctcaaccaatgagccattgacaatctcagctcaccccaatggtacagcacccacctgcaggtaatattatttattatgtacacatacccaaatgtgaggagaagtgctagatgtaaaaagttatataccaaaaatataagaaattctaaaatacatcccctttaaaattgtaccaatatacctctaccaatatacctctatctttttcggcatatcatattggaaaattttttagtctttttttttcatggttgtctatgttgaagtcatttaagacattctttaaaattttacgaaatttagaaatatttaacacgtcgaaaatagagattcaaacagtctatttcacacacttataaaataaaagagtcaagcgaacaacatgctatttgaaccttattttcggcaattttggcttcataatttaaaatcagttttcattttttaaaaacaaaaaacaacttttcaaaactaatagggggtgtttgccaaattattttaaaaacaattttctaaaacccgagttttaaaaaactataaaacagacaatattgaaatgttttctattttcaaaaaaaaaatatttttgtctaacatgttctttttatatttttctcacatacccaggcctggactcgggccccagaccctgacttcgaccggatcctgacccaaactttgaactctggctccgaactcaaacccctgatccgaaccctgaaccctaaacctcaatctgaaccagaacccgaaccccaaactcagactcagaccccaacctagaccccgacccagacccagaccctaaaccccaaccccgaccccgacctggacttgaacctcgaacccctgac

SEQ ID NO: 229199 - DNA, 915 bp, Cannabis indica
ggccttaagttagcatagtcttgtgcagagggaacgaagtgaatattcaaaggagacttataggcactggaggtccttgcaccaggggctccagagttttgaaccgggaatggaaaattgggccagaccggcgtcttctccttctctgtctcctcccaggaggccctcccagaggcatcctgcaggcgagcatactcgagctcctgctccctcttatacctatacttgttgtatttatcttttgcggattaaataatgtctgctctgagcgccttctcgcttctgggattctagacattgggacagaggaccttggataagtcgaagtcttcgacagactgactctccagaatcaacttagccctcctgcagttgaacgttgtaaccagatctctcacattcaagtcctccttcctgtaactagtaaacacttgcgcgtggttcaggagagttgagtgggggcggtgcgatgcagtggggggaatcctgacccagtccattagcaaatctagacgctcgaaggccttgaacccagaagaagaaaaaaatatgtggtaatactcctttacattcttttgaaaattaaagggtatcggggtctcattagccgaatgggcctaaagtttgtaaaaaccatctttaaacttgtccccctttttggggaccgagagtagttcgtaaaatataaaattttggcagggctaggcagagcccagttcttggctacataataagtctgataacaggaggtaggcttgtggaatcagttggtagggtgagagcccaacgaaaacaagaaagtcaataaagtagtccttgaggaggagcatggccccagacatcagatgagtctggctttaggccccaacaccattataattgtggtttaacatctcctcatccctgggaagacga

SEQ ID NO: 229200 - DNA, 991 bp, Cannabis indica
tgagattgtaataattggatccattgagaaagaggaaacacctagggcaaaaaggttaatattgagatggttgagaatagttcatcagcaaagtacagaggaggttgatcatgcacccccccccccccctttcgacaaactttatacctgaccaacaacctgatacacaaccagagccaccagttaaaacctaagcagaaccaccacctgaaaacctaaccttcttcccaagcagaaccaccagttgaaacccaacctgaattccaacatgtttcccaactagaactactagctcaaacccaacttgatacacatcctgctcaagcccaaacctaaacaacaccaatgtaacaccctaacccgtagggcgccatgtgtgtgcttttataaattaatttataataataaattaacgatttaaaagaaaattataatttaattaaaactttgctaattattttgaaatataaaaatttctggcattataatttttgaagttagggatcctcttttaaaatattacaaaagatgtcattacagtattatatcaaaatacacatataagtcaaaagaaccgtaaaacaaaatcccgacaacttggcactgctagtcggatgggctaatatgtacatttaccaaagaagacttctcgctcatggttgtcctaactttttatttcccttacctgcaccacaaaacacccttgagtcacaaagactcagcaaaaaaagtaaaaacacaacatcatatttcatcaaacaaacatcgtcaattaaacacatgtaatcgatatcaataattcacatactttaagcaatcaatgatgtttgttggattaaacctccacttacactgatattagattcaatacacttaatacaaaaggatagaaaagtaattacaagcaaatccctaatttggccttcggcctctagaatacctaacagaaattagttggaatggatttggttaatccacacctaactaattt

SEQ ID NO: 229201 - DNA, 2884 bp, Cannabis indica
tctctctctctctctctctccgccctaaccccaaaccccatgaatggcgatcaatgctcgccccaaaccccgctgctcgccccgatccctcttctctaagttctggtcaacgacgcaacactccaccccaatcccagctctcctcccgctcccgttctcttctctgttcgggccaagcttggcccctaacattgtcgtttctgctcaggccatgctcgcacaaaataaccctatatattcaggtatatttatttatttttaaaaattaaaaattctggttgaaaatattagtttaaattgagaaattgtactatggttctccaaaaaccagagcttagagcattatccggctcccaaaattcataggtgattggggaccatcactttcaactaatttaattttctctgcatttttctagggtttgtcaattcgggccccaaccgaatgcgagcagagggctgaagaggggaatcactgaagaggggaatctcacagtggtaaattgggacttgatgatatattgaagcctgatttgataatgccattgatatagtacactgttaaaaagattgattattgagtcttagaactagtttatgttaatttggaaaagaaaaaacaaagcaaatagtatccgtttcatttgtttcttgcattgcctgctccatttatcatatactatattgtggtgattatatagtccttggcgtttctaattgcaatgtgatgcttaaagtagggatcaaataactggtatttgaatacaatggttaaggattgatatattcgtagcagtttggtgttctttataactcaaatactcttctcctaaaattactttatatttgtaagctcataccataagtattggtggtcatacatagttcttataagagtgatatgtgtggaaatgtgcatttagttttggattaaattaagatatgatgctgataattacatatttttgttcattattgttctttcattattatgtttcttatggtacaaaactcagtattgctgttatacataattatttctcctgggcacatacaaattgttatagttttattggtcctgggttaggcgtggtgggtagtttaaaaactattatatgtattcatatatatatactagattaaagttacgtgcaattgcacgtatatttaattgtatttttaattttatttttagaaagtgtattatgatttcaaaactatgtcatttttagtgtaatttaataaataattattttaaaaataatttaaaaaatacataataatatattaatcaagagagaaaaaagagaacaatgtgtaatgttttaaaaataaattcttaattcttgtttataatataataacaaatattagagagacaaagagagaataaaagagttaacagacactaactctaaaataactatactaatattttcctcagcctagtcattgttccttaacaaacgtttcaaggcaattttcattttccaagattaacacaatgtcacttccaaaaacaactctccaatatagcataataactcaatcccagagcctttccaaatttgctgcactcaactgaattgacttcaaaccatcaactataaaatcacaaaacataattcattagaatttcaatatttaattttttatataaacacattacatatatctatttcttgtacttcaaccaggtgaaaattggcacttacaagctaatgaaaatacacttaattattctctagtaaaatgtcaataacttagaatagatactatgtatgatctaccgaattccaaatctaacttggagtttagaggaagaacatcacaatgagtctacccgtaatatgtatcatcaaacatgaactacctataattaagtgtattctcattagcttgtaagtgccaattttcacctggttgaagttgaaaatttaaaaaattatctcacccaaaaaataacaaaaacaacaacaaagaatcgctagtaaacaatctcacttattaaaattaatagagattccaacagaaataacttaaaatattttcataacaccttaaggcacctacatctttccaatgtattgaagaacgaaaaaatatctcttttacaatatatcaaagctctctaaacaattctttaacaaactcagatttaaaattaacatagtgaaactcaaatcgaatgaaaatatctctttccaatgtattttttgttagttttttacccgaacaaaaaataccaaaaatttaagaataaattaatagttaaaaaatttcaaagaaaaggtcaacaaagacctactgtaatgtatttgaatttttgcctaggaggcttggccggtgccgcctttgtctcttctttatcaaaaacctgcaagtgtttaacggggatgataaaatataattattctttatcaaaaacttgcaagtgtttccaatatatactagcagaaaactacgtgcgaggcacgtatactaaattttatgttaggttttttatacgttatttaaaagtggtacaattaaaaattaaagaaaaaatgttattagttattaggtaagattattattatgtgtatctaaataatataatttataatttttgacaattaaaagtaaataccggatacaatatattagtgtttaagaaagcttgataatttaaatatatttttaagtaaatccaaaaataaaccaaaaattgatcttccaatacataaggaaatataacttaaagggttaatttcacaaatgcacaaaaacaataaaaatacggtttcacaaaattttaaatatttttacgatttttttgattttatttactataaaatacggtcttttatgttgaaattttgttcatttgttgttaattttttgt

SEQ ID NO: 229202 - DNA, 1157 bp, Cannabis indica
ttaagttacaaaaataactaattaatattcctaaaagacaggcagatagtttgggtttgaatccctactttcgtgggttgttagagctgtcctataactgaaatcgagttgtgacccatctagaaagatggttgcggacccaccattcaatcgagcttcctttgatgctctttacctgagctggtcggtctaccttttgcttggggttggtcggcacatagacttccttggctggccagggtgtggtccggccaaaccctcctggttggccattttctcgtgacttggtcttgctcgagtatttgaatcccttgtcaattgatgtgttgtgcatggtgactttgctcacctattgacatgatgtattccacgtggcctcggtcttgcctacatggacatgccacgttatgtgggcaaacattgggataacaaaatcccaagcaaaatcatcgataacccatatataaaatgtcgatatcctatcgacaaacttcaaacttttaaaaaaataacacctaactaaaagtatcgataaactatagataaaatatcgatatcctatcgacaaactcatgacttttaaaaaattaattaataaccaaaatcccaaacaaatccatcgaacaaaccatagataacatgtcgatatcttatcgataaactcaatacttttagaaaattaattaacaaatacaatcccaaacaaaaccatcgacaaaccatagataacatgtcgatatcctaaaattatcaatacccatttgatttttaatcgatatcctatcaataattcatcgataacactgtaaaaaataacagaccacataaatagatcaaaaaatttaactaatcttaagaacatacataaatgcacatctaaatatatgaaaatctaatatttttctttaaataactaaccttttatttgagtatggtgttggtggtggcgactgtttgaatctgtggtggagagaagtgggtctctgttatttgagctaatatcgttgtgatttcatggttggtgggggagagaagtggctctctacgtttgagcaggtcgattttggatttgggtggtctttgcatcggaagaggtcggttttgggttttggtttgggaggtcgagagagagagagagagagagagagagagagaga

SEQ ID NO: 229203 - DNA, 1068 bp, Cannabis indica
tagcatcaaaataataataataataaattaaagaaatataatataaaaaatcgtattttaataaataaaattataaaaatatttaaaattctgtacaactatatttttataattttttttgttattttttatatatttgtgaaataatttctaaaattattaagtgaatttctaaagaatatgtggtattttcgaaacaatagataagagagagatgaggatatatgagctgtgaaaagggaaggaggaaggttgtaagaatcatatgtgtgtgtgtatatatatatatatatatatatatatgtggtgtatatatatgtgtgtgtgttgcaccatgtgaagaagtggtatattaagaggagcacttttgttttgtttgtccccaaaatgagagtctcacatgcaaacccttaccttatgtctctctccaccactttcttcatatcttccttcttttccattccatacataatcttataattgtgtctctttctttcttttctttatctatatagttatacttggggaaatggggataatgattagtgaaaaaagttttactatattatttattaagttacacttgttttatttgtttaataatgtttaaactccctctctctccatttatacgcatatatatagtattggacttatgtatgagtagtgtctagtactttttagaggtaactttgggtgattagtttttataaaagttattatattaaattatatgaaattttatatttaattgtactaataataatattatattttggagggtattagacgttactagtatattttagtatttctcatatataaataataaacataaagtattgttattggatgggtactagtagtgtgtagtaccttctagaagtattgtcttataattatttagtaatatctcttaaaaattattatattaaattatataaaatttgataattgtaccaataacaatattaaacattataaattagaatgccaggcatttctcataaaaataattaagtgaaagagtgatggaggtttcacattctttgcaaattactaataagc

SEQ ID NO: 229204 - DNA, 2100 bp, Cannabis indica
ttttttttattttttaataaaatatatatctattaaataaaataatatatttaatatataacaaaaataaataaaaaatgagataaatttttttaaaaaaaataaattaaaaaaatatatatagataattttaaaaaatatatatataaaataaaatcaaaataaatactaaaattaacataaaataatataaaaagttattttaaaaattatttaaatttattattttttttaataatatgatatacttatgaggtataaataaaactcttatttattaattaaaaagacacattacgctttttcaaaaatttataaataaaaatatttatactttttaacaataacaattagttaaattttttacattttctaattatgtaaataaataaaataattttaatttttttcgaatagtttagtgaatataataaaatattatttttaattattttatatttttaacctattcattattctaattctatgtacagtttagtaatcgtgagtattgcccaaacaattattgtaaagtaattttggtatctcaaggaaaaaaaatacttacggtcattctagttcttccaatgcccttttattcagtcattaattaaaactcgattgaaatcagcaacatttattatgtatggccaagaagattattattaattattgatctatgcaacttcaataatctctatatttttttttcctaatttgatatttgagttagaaataaccccacatgcaatataagaaatacaataccttattggtttgaattggaatcccaaatcccaatcctcttcctaatgaaatttcccctcaattgtaatagcttgtaaattcttgtctctacacttaggtaggggcaaaataattcaataacatagcaaagaaaacaaacagcagattcaattaatacaattatatgtcataagatacattatgccaatccaaattcaagccctcctacttacataataactataatccaaaatagtgtaaatcgattatgcactcgaccaggcaaagataacatacttgcattctaatacccataagatgttctcttcatcatcctgataaactcgtcgaggttaactgctccatcatctgtatatttcaacaacaattcttccattattagcaataaaaaataggatcaactaagcacaccaaaggaaaagaaataaagaaaatggcgagtaagaaataagcatccagattcagcacgtcatttatgaaataatcacaataaagaagtaggtattagtttcctatgtatatcaagttccgaaaatggagatctgattacacaggagacatatttcaataattgcatgtcaatggcgaaatataagctgcaaaagatatacaaaaggtttgaacataagctgactcacgatctcgatctgcttcctcaatcatatcatctatctcatcttcagtgaagttctcacccagatccttcgcaatgagcttaatgtccatggcagatattttcccctaaattattatgaaagaaaattaggtacagacaacaggggcaagctcatattagtgggaaatagaaccttacatccttatcttggtcaatgatttggaaggctttcttgagctcctcttttgtgtccctctctccaattttggctgtcatcatgtgcacgaattcatcaaaatcaattgcaccacttccatccttgtcaacatccgcaatcatttgatttatttgctgcaatgaaccaccatagatacatttagcacttcaataatgaccatgatgacggaaagttaaatataatacatctatcaaaacagcaatatttgaatgactcagattacacttgtacatatatatcttaaaaaaataaaaagactataagtgaacacattactgaaaaggcgaagttagagaaatacaataaaaacaaaatataaattgcccaaattcacaaaacacaatacgatcagagacaaacaaaggggaagctctttccaggatataagttcaacacaacaaaaattcaatatttccatttccagggcatgtgaccccagaatcacagacatcaataactaagtgtaccgtcaaagaaa

SEQ ID NO: 229205 - DNA, 1362 bp, Cannabis indica
ggttggatttatgatatgttgctcgatactgccactaagctgttggggatacacactttaggcaactacttttgaatgtagtatccttaaaaaacataaacaaaactctaatagaattatagaatgggaaaaaactcagtttcaaatatttctacatttgggattttcctgctcatgttcttaaacccatgactgggaagcttgctcccagaacaaaagtgtgtatgtttgtaggatattaagagaaaaatcaaggtgcctacttatatagtcatcaagacaataaagtatttgtatcagcaaatgctacttttcttgaacatgactatatgaaagatcacaaaccacatagtcgttatcaagcaaataaaaaaatgattagttttcttaaccatcaactcagtaccattagttgaatgaccaacattggtcaccactattcttgaaaatgaaaccccggtacatcatcgtagtgggagggttgtaagaaaacctatccgctatgaacacgaaacacatgttcttatctctgactcagacaaggacgatcctttgacatacaaagaagaaatggaagaccctgactctgacaaatggaacaatttcatggatcaagaaatagattccttgcacaccaacaaagtctcagtacatgaaactccacttgaagttgttacacccattgggtataattggatttttaaaaagaaaagaaatgttgaatggaaggtagagacctttaaagctaagcttgtagccaaaggctacacacagctagaaggcatcgactatgatgaaacattttctcatgtggaaatgctcaaagccattcacattcttctttccatagctacctcttatgattatgagatatggaaaatggacatcaaaactgcttttcgaaatggcatatcttgacgaaatcatttatgtggaacaactagaagggtaggtgttactaggggaagatcgaaaggtaaacaagtttcttaagtctatttatggattaaagcatgcctctagatcttagaatatcacttttaataagactattaaagtgtgtggcttcaaacaaaacaaagacaaatcctatgtatacaaatacattaaaggtaatgtactagtatttctagttctttatgttgatgaaattctacttattgaaaattgaaaaaccgagtttttgtaaatgtcaataattaatacaaaaatataatgtatataaaactgtatatgtctgcaacaacagaaagtaattttgatactgcagaaatcaattttgcagagacaaaacagaactgtcagaatataaaaataattgcagaaaattaaatcacttgacacaagagatttgtacgtggt

SEQ ID NO: 229206 - DNA, 1296 bp, Cannabis indica
aagcttccttgaacgcttttgtgctagccataaattacgcttcagtggtagaaaaaacaatcacggactgtaactgggttttctaggatatatagtttcggtttgtcatgaacatgtaagctgtagcttatcttctagtatctctgttaagaagtataatgaacatccacgaaccctttcaatttaagttttccttttgctttctcataggtcagacaaaaatcccaagtgccctttaagtaccttaataaccatttgagggccgtccaatgttcaatcttatagtcttgtactttaccacaagtgagaggattcaagtgtagtcaactcctttcacccgagtaaagcccttggccactaacttggctttgaaccgtttttcaccttaagaatccatttgcactacataatatttttcttctctaattttgatacaaccacccaggtcttattctttcagagtgaatccacctcctcatccatgggctggagccatttagacttgtttccacctgaaattacctcttcgtagctttcaggctcttcaatttcagtctattgtaccattgccagtgcaaatactatcaagtctgcttctacaaaccttgaggaaggattaatccctctccttgctctgtcacgggctaactgataaccttccagacctgcctgtctaaatccttccatgccagaacatttgtttggtctatgttatcttccaatttaacaccatctttcgtctgtgaaatatcttccagtttcaccatagcttctaattgcaaaccctcttttggttgttttgtttcgttccccatttccatgcgtgtaacgtccttatttctagataatcctgcatcacatggagacacactaactttctcggctgttaagtggagaaattccaattcattgaaaaccacattcctagcaattactaccttttatctatccttcttagaaatgcatattttataacccttggtacctaaggcataacctaggaaagtttccttaactgatctaggttctattttgtcaacaaattggtgtgtatatagcgtatgtacacccaaatgtcctcaaatgcgttaggtttagggttctgttgtaccacatttcataagaggttttcaagcctacaactttatgtgggcttctatttataaggtaggttgcaatagctaaagcttccccacaaaatagcttctctaatccagaattcaactgcaagcacctaactttgtttaacagggttcagttcattctttcagtaataccattttgctctggagtctt

SEQ ID NO: 229207 - DNA, 1460 bp, Cannabis indica
gtgctttcctttatattatatattgatgatattgattgattgatgattgattaagctcacaatttttgtatagaaaatgctaaacttcatcaataataatatatatttttgtgctgaatcgacaataatacagaattttatgttaaaaaaagacaataataattaattagataaaatatagataccaataattaattgatttgaacaaattagttactctatgtattatgtatgtgtactacaaattacaaaatagttcaaaaccttggtcaaagaaatgtttaatgatattttaagtgttttttcaaataaaacgtttatatataaataaaacaaagttagacattactgttattataatagataaagtctgatatagttgagatctcaaccgtaccaattatattttttgcgaaagctcttctagcaacattatgagccgcaaggtgtggatactgataggcggtttctctatgcttcgattgtagtggatattatttggaaggctcacaacgataaaataagtatgacaaggtacgtaataattctagatagcattaagcactttattaactctatctatattaaaagtgttaagcactttaaaaaatatatatataaactgacatattattattaatacactccaataataaaatttacatagtttaagttaataaaaataaatattataaagtaacagtggtacttatattctcctatgcgctatatcttacaattaaatattagatcacatgtaatttaatttaataagttttaaggaaatcactaaccaatacctcatgcaataataatactcttcaataaataatattagaaactactgactaattattaaagggattatttcacaaatacataaaaataacaaaaaagttacacaaatacagtttcacgaaattttaaatatttttgcgattttttttttattttatttacagaaaatacgatctttttatgttgtactcttgttaatttgttgttgattttttgttatctgtgttattttttgttgttgctttgatgttatttaaatgttattttcctgttacttttatgtaattttcttgttgttttcgtattattttcatagaaaaccgtaaaaatatataaaaaaaaaaatcttaagtaaaaattatattttatgtaattatctcattattaaactaaacatatattgttggacactttaaattgctaagtgatgctttttcaaaaaaagaaaagaaaaaaattgctagatagaaatgctatttgtcgaaacaagaccagaattggcaataccagaaagcctttgaaaatatttagaatggaattccctaaatacccctctcacctgcaacaaaacccgccataagactaagaaacatcccagttcctcctgttcgatactctaaattgttcttcaagaatcttctaaaatataatatatatatata

SEQ ID NO: 229208 - DNA, 892 bp, Cannabis indica
tacaacagaagaacaagaagcaatagatagtgcatctgaccctgatgaagatagcaacatggattatgaattggtgagagatcgtaagaggagagccataaaaccaccattgagatatgccattgcagatgtagtacactatgcgctgaacattgcagaagttggtgattttgaacctaagacctatgaaggggccacaagatgcagtgatggcccaaggtctagaattctgctatggatgatgagatcgattcccttaaaagaaacaaggcctggatcttggctaaagctcttgttggcagaaaggttgtgagttgtaaatggattcttaaataaaaaaaggtataccagggataaaaatggcaaggtacaaagccagactagttgctagaggtttcacagaaagagagggtattgattacaatgaaatatcctctcttgtggtgaaacacacttcaataagaatattgactcttgttgcagtggaggatctagaactagaacaacttgatgtaaagacaacatttctacatggttatcttgaggaacaaatcttgatgaaacaaccactaggttatgaagaaaaagggaaagaagatcatgtctgtctactaagaaggtccctttatggtttataacagtctccctgataatggtacaaacgatttgatgactatgtgatcaaagctggcttcaaaatgagtgcttttgacagctgtgtgtatgtaaaaaatgagaagtgccctgtatttctacttctctatgtagatgacatgcttatagctagcaaaagcatgaatgaaatagacaaagtaaagaggttgatgcacaaggaatttgagatgaaagacattgaaattgaaagagagaggaagaaaagaactctgaaact

SEQ ID NO: 229209 - DNA, 814 bp, Cannabis indica
aatagggcgttggactacactggaatttcttacgttgaaagttaatgttgatggggcaattttcaaaagtatggggcggtttagttttggctgtgtggctagggattcaattggtttggttgtggaggctaagtgtggtagccgtttttgggtagcatgactcgcatatcattgagacgcttggaattaaggaggctctaaattagattaaagctcgtggttgggtggatgttattgccgaatcaaattgccttatttatggctatataatttcaaattgtaaggctattgttactagtattggtactatttcttttcgttttattaagcaatctgctaataagtttgcacatactttggtgcaatcttgtctatatgaggctgattttatttacacgagggatactcttttgattgtgttttcatctatagttttggatcacttaaagttaatgaagttgatgattattattaaaaaaaaatctgttggaacttggaactagaataagatattatctattagtaaattagcattttaaatttgcttatttagcaataaaagttgtaattttttaaattttatttcaaacttttgtattataatatatattttgataaaattacaccaacaaaatataattcttattctaatataatcttcataagttactcagacacatgactaatataggataaaatattaaaaaagattctttttcttttgatgtaacacattacatcatatatttctttttctaaaaaatatttaaataatttaaaatattttatttttgaaaatatgaaaaaaaaaaaa

SEQ ID NO: 229210 - DNA, 4303 bp, Cannabis indica
taatgggttttatttagggcacaaaacccaacagccacacctttagccaactagtattggcgaaagctggttgcaatcaaagaatgagcaaaaagagcatttgatacgaaccaatttaccaatgataggtttaaaatagcccttggctaccaagttctacgacctccaatcaacaaagttacttagagttcaacagtatggagccgtcttaatctacctaagcataacttcattctttggattgctatgctcgatataattaagatgaaagactggctacggcagtacagaattgtttaaaaaagctaactggcttttctacagcaatgaagttgaactgtagaccacctgttctttgaatgcaccttttccttggatagtttaaggaaaattaatgaatggctgaagatggctgccacttctctccatcgaattgtaaagtggatagggaaggccaaaattagcaaactcaaaataatggtgttttttgttgtcattgcatccttagtttactagtttgccatactagaaatgccattttctggcagggttctagtgaaagtatagataatctagttgttaaagtcaaagatgtaacaaaaaaaagaagaatttcatgtatatggccaaataaagctaccaatggtgaaaaatagtggttcaacactttgtaaagattatatagatatttaaattctctatcattgggagaatgctattagattgtacaaataatttttgtgtaatgataaacctctgattcatcaaaaaattcaaatcaccactcatagtcaaaactgctccgtggcagacataactatgacaaccttcatagtaatcgaaaccaagtgtccttggaaggacacacccaacgacctctgagccatctaacctatgtataacctgtctattaagttctcgaaagcagctggtactgaccgtctccttggccaccaaataattgattgcaaatattacaacacattattgaatttcaccaagaagacctcctttgttgtcataatattcgggggttgatgaagacctcgtttggtattctacagcagaggtgaaatagaagacctcctttgttgtcaacacaaccaaagggacaaagaaggcctcttcctttatgaatatatcagaagggatgggaaagacctgtaaggttaagaccaacgataaaatggtgactacaccaacaataattttagggtgcgcccaagatagggaagacatcacccccatcttgggtatattaattcaggagttggtcacatcctcaattgatcaaagaacaactgacaactgctaaaacacatcgtggaaaatagtcaagaagacctcctccgctgtaaagctaaggtgacggtgaagacctcctctactgtaaagccgaggatatggtgaatacctccttcactgagaagtgaaggagattacgaagacctcctctgctgtaaagctgagggtatgattaaggactcctctgctgcaaagctgagggatgttgaatgcctcctacactgtaaacctaaggagttgacgaaagcctcctttgctataaaatcaaggagatgaataagagcacattagctgaaacacaatcaagggaatgctaaagaaattcaaggctacaacctaagagaagacgaagactacctttatattcacataaacccacattgggatgagagagtcaatgctaagacaatagccgaagattagagtaaatgttgacatttcaatatcacaatgatttcaaagaatctcaaatcgaaggaaatcactctagtagtaggcaaaattttaagttgaaaaggaaaaaataaatgatagaaaagatggtcgtcgttcttcttctccttttgtacataaaattacgaattccactattcaaaagggattggagatcgcaaatcctactctcattgggaatgcttgaagaacaaaagaaattacccatgattgtcaaaattgatgcccacctagaagttaagagtgatatgagcttagttcacgtcattaagtcaatctcacacaagtgtgaaattggcttaggggaaatatttacacaaattagctttgatgatgtggacatcaatatttgacacgtagcaagaaagacgaaatctctgagtttagtagtcctgagtcatagcaagtccacctgggaagagtccctagcccgacgcccaagttgactttaggaactccgttgaggaagttagaacttcaataatttgttttcaactcactatcattcattattttgtaccacaaggacatgagcaatcaaatgtaggcctcaagcgttgaaattacacgaacctaaaccccaaaactcaacttgagcacctcaaatttcacccaatgcccaagttgacatccttaactaggattttagtttctcggaccgcgctagtgaaaatgtgtcaaatttttcaatgggacatacataacacataaacatttgaggcatcaaaattagattcaaagaaagttcatgtttgagtagtcagtggtcgggcacctagtgcccaggttcacaatttgtcaatctaggtgccttccaagtataagattgacgatcaaacttttgcatcttcttcttcttcatcataaattgggaaataggtacttttggggaataaacaacacttcatgagtgctagaagcaaggcccagcacccaggttgacatctagggctagcctatcggccaggttgacaaatggggctggcccaacacccaggttgacattttttcaacttagcccaatttcgatcatgcttttcaaaaacacttttaagcatcttttccattttcatcaaagattaagattcaactatttacgcggaccaaacagaacttttgaagggcaataaaggggacctagcaccaaagttgtcatatagccctaggcccatggcccaagttgacatatcgtcaaccttggatgtttccaatcaagctctgaaaagtattctggacattttttatgtcattaaaaataatgaagattccagaaaactcaggaaaaatccacaaagacgaggctctagaagtaaagcccaccgcccaagttggcctagtgttgggccgagtgcgtaggtttacaatcaactttgtgtgttggttttaatcattcgaatgccaaatctgattcaaccactcaatctagaatggtcaagaatggggtaggggacctcatcctcaagttctagaaccatggaagtataaaaacaacatcgcaaaatttttgaaataagcacccaacacccatgttgataaatggcctagtgagatggttttttcttatcagattctgattttgtttcactcgtccgtctagtttattaaaataactaagatccatgtagtcaaaaaagtcaaattcacaacttttcatttctcatttctaacatggtaagaatgctcaaacatgaagagtttcgagtctctcattttcacagaagaacaacatctttgagaattggggagcagctttcccactaagcgatgtcaaaatatcacttagacatccaaaattacatccttaggatgttttcccactcatccaccatctaggttgacgtcatatgtcaacttgagcgttaggatgccaacctagatgctggatgtcaacctggatgttggatgtcaaccttggcactgggtatcagccaaggcattaggtgtcaacttgggcactgggtcatgactcactcactcaatattgatctgtttcacgcgaataaactttaattttgaagctaattcaatgctctatcaagtcttttctcacacttcaattaaaattctgaagttatcggccccaaaattctcatctaagctagttatgaaaacaagctccagcttacccagagcgggtcctgccattgagacctatgctccaaaaaattgaggatcaacatcacaaggcaacttcaccgtaagatcatcttttacaatcaaaaagagctaacctgattttttttatattttattcctattttcaagggcctctttcagctataaaagaagagctccctgagtttgttattcatttttagaaaactatccacaatgttagattttattttgtacttatttatcattcttttatgctaataaatttgtatttttgtgtcatgcctttgcaattttcgtgttgtgtcgtgtttatgcacatatttttcgtagcctctttgacatctctttatctataaagaattctcgatgtaaaaatacaaagttaaaagggatgatgtttgaataaaaaaaatgtaagattcaataa

SEQ ID NO: 229211 - DNA, 2064 bp, Cannabis indica
tagatggattggacaaacgcatatgaccgtacttgaaaaaagtcagttatgaaaaatggtcaagaattcacagcaacaacaagaggtattcagccatgatctcaaacgtagcaaaatcactgaacgccacaaatttatcaggggagctaccaattacaacattgctagaatgcttgagagcattggtgcaacaatagacacataataataagacaaaagcacaaaacacatttactaagctggcgtcacctggagaagacatactgctaaaaaaactacacgtactcattgaatctggaggtgagatctacatttcaaatttaaaatttcttaaacataaacatctaggaattttgttaggtttttctggtattgttgtaatgttgttccaatgttgttctgtaaatacaataaatgcttattttttaaacaaaaaaaataaacaggttaaatcaacaatagattatttgtttgaggtaacaagaatgaaagaattgtggacagtagacctcaaagaaagaacatgcacatgcaatatgttccaaatagatgaaatgccctacggacatgtcatggctgtgctgaaggagatgaacatggactcatacaactactgttcagattactacacaaagaaaatttggctagtaacttatgcaggaacagtgtaccccaataggacaccaaagtgagtaggatgtaccggaagatgtgaaagacattatagtcttgcctccacatgaaatggttaaatctggaagaccaaaaaaattgaggaggcaagatggatgggaaaagaatcaacataacaagtgcaacaaatgtggggagttgtggcataacaagagaacatgtagcagaaggcatagaaaggaggagtgaatacaaataaccatagaacaacaatggaaaaacatgagaaaactgaacatacattttagcatgggatattgaagaatataaattttatacagaactaaagtttctatttttattaaaaaaaatcgatgttaatggtaatttttcatattttacaaaaggtttaaaagtaattgaatactacattgaatatatacatatatatgataattttattgatatagtttgcttttgattaaataatgcagatattttttttaagattataacaaaacaataatgttatgaaaccctgataaataaagtaaaacaactgtgaaaaaataataaaacaatagtaaaataacaacaacaaaaattcaaaataacataaatatataaattaaatactaaacagttcaacataaaacatgttttacataacaaagtttaaaaaacaggaaaataaaaattgcatattatccaaagaaagcttaaaacataaaagaacaccaatgcttgttccaacaaactacacaaacacttagggctgaacatttagacctgcaaacctggaaaacctgatcacccgccccgacctgctgaccaaaaaattgaaaacccatgtggtcgggttaggttcaacccaaaataccccacgcgggcttcgagttcgggtatagtgaattgttttttttatttgggttgtaatccgtaactcgagaagtattaaaaattaaaaaattaactttttattttattaaaaacttaataatatttactttcagttttcagactttattatttaaaaaaaatacctattcaaactctttagcttgccttacaaatagacacagtagtcagtacaccaagagtcaccctcaagcttcttcttctccaagggcgtcgacgaacggacggcaactggttctcttctctggcagggtcacatccaagcggtgggctcagtccggcgtccctaacatcgtcatccaagtctaaactcgtcagaaaacttagagatgaaaacagggaaagatgatttctgggtagcagagacttggacaggtaggcttctattgtatttttacagtttttagcaaatgagattttgattttttgaagatgagtaatttgattctgaaagttttaacttctattttgataggccaagatcgagggatagatggtgaagaaatctctctg

SEQ ID NO: 229212 - DNA, 1672 bp, Cannabis indica
aatagattaatttgtttttttgcagttttgcattttccttttttcattttggatgatgcgtcaatatgatattgagtctctctctctaaagtggattccatctagcatgctttcggttacttttaaattggcaaaaagaatgttgttagtactatatatgtaaaaaatcttaactagtattttggacttcaaaacaaaagtactaaagaaaatgatatttactcttcagtgaatacaataccgagagaaaatatatatataatatttagttgatttaatttaattaaaagtagaaggaaccataaatatatgagttttcatgagtattatttttaaaaaataaaatatgataattatattattatatgctaggaaatcaagctgaccataaatgttttaaaaagattcaaactttgtatattatagataatatatttatttgaaaactgaccttgatgatgtggacattaatttttgacatgtagccaaaaaaaaagtacttcggagttaaatagctttgagtcatagcagttgacctaaaaggagtccctattcctatgcccaagttgactccgagaaccctaaaatgggtgtttggatcccgccaagttgtttccaactcactgtctaatcaagaagacaagaagaatcaagtccaaggcttgaaaacttaaaagagaccgaacagcaccccgaatgtcaacccgggcgcctagggttttcacccaacgctaggttgacatcccaactagggttttagttttcgagtccttcttagtacaaatggtttaaactttgtactttgatatgaataagacatgtcacgaacatatttgaggcaccgaaatcagaatcgaaatacttttatttttgagcacttgaggcaccaggcgcaccgaacgcctagagcaaccaatgcctaggttgacatattgtcaacttagggcacttgcaatcacaacattgaagaattatcacgagcattttattcatctccatccaaaacgaagaataaagtgctttcaataaagaaacagatcgacttagagctgggcccagcgcccaggttgacactttcaacttgggccatttccaacattagttcagaagaattcttcaaggatctccattttcgtcaataattagatttgggtgcgttcggggaacaaacggagtcatttgagagcaagatctgggacccagtgcccaggtgacctcgctgctgggactaacaaccaggttgacattttttcaaactaggctatttctaattagttttttcgagaagtcttctggacatattctccattttcacaaataattgagatgagagtatttccaggaatcaaacggaaccatttgatgtcaaaaagctagaccaagcacccaagttgacactagtgttgggccaagcgcctaggttgaaattttgtcaaccagggttatttttagtcatttttttctaaaaaagtgttccagacatcttttttgttttcaaaaataataaagatacaagtaatttcggggagaaaacgagatcatatgggggttgatataggaatctagcaccaaggtggcaccgttgtcagggttatgtctatttaatattaaaataattgaattttattctaatatggtatttcgtttcactttttgctaattttatatgtct

SEQ ID NO: 229213 - DNA, 874 bp, Cannabis indica
ttttaatataatagagatatttctagaaactatatcagtatagacaaaagtaaaattgagtattaatatatgatctaaactttgtccgtcaaaggaaagaaaaaggcaaagggcattaatagtcatcaactagaagaaagctatcaattctcaatttatcatcatgcctagctagagtactatataatggtgttcttatcacaagctaaggaggagaggtcttatcctttaatattattcaaaattactattcatagagttttatttgaattcttatcctttaatattatccaaaactactattcatagttttatttgagattaaacattatattgtactaataataatataatacataaattggatattaataggacccaatacccattaacagctgttatatacatcttcataaagattatggacatccacttttacacatttttttatttatttacatatataacaccctggcttctaatcatttatttattcatgcaaatatcatagttttgtgattgtattctaaatcactcacacagttatcaaacatttaagtcaaaaattgataattaaaatatatatttttttttaagagtactaattacaacttcctattataattttttagtcaatttctacatctgaaatcacatgctaaaataattctttttttaattttttttcatagtagtattcgttatagttacaatatcattcttgtaaatttttgaaaaattctgaataatttacagtaccaaaaacagaattcctggtattccagtttatcgtgcccgttcaaaaaacttcaaacgtatttttgactataaatatttgaaaatttttaaaaatttacaggaatgatgttgcaag

SEQ ID NO: 229214 - DNA, 2099 bp, Cannabis indica
gtgttatgtctgcaacaagccatcacatttgaaaagagattgtccaattctcaagaattacaacttaaaaaaagatggagatgcttgtgtagtctcaaatggtgatagtagcgatggttatgacagtgcaagtgttcttatgattaccaagaaacaacaaggataatgtacggatactgctcattccacaactatccagataaaagtcaattttcgagttaccagtggcacagtcaagctaggggataatcattcatgttccattcaaggcattggaataattaagttgcagctcgatgatagaaacactgtagaactaagacatgttagacatgttacagatcttaagagaaccttgattccaatgccaatgcttaaccatgaaggattcaaggtcaacattgagaagggattgttaaaggtgattaaatgaccaatgattgtgatgaaagctactattgacaatggtatctatgtgttgtaaggatgtacaacaaaggttcaattcaattcaatcatgacaactacagatagtacgactctcaagtggcacagaagatttggacatattagtcattgtggtgtcaaagttcttagcaagaaaggggtgtttggtaaagatcagatcaaagacttcggtttatgtgagcaatgcatcatgggaaaggctacaaaggttaaatttggaactggaaagcacaaaaccaaaagcattgtggactaccttcacttagatctttagggacccatcaaggactatatccagaggaggagcaaggtatttcttaaaattcattgatgatttttccagacatgtttggatttttatcttgaaaaataaatatgaatcacttaacaagtttaaagaactaaaagtgatgattgaaactcaaactgagagaaagttataaagaactagataatgggttagagttttgtatagaacaattcaaccaattttgtaaggaaaatgttatatggaggcatctaactgttccaagaaaccttcatccactacaagaaaaaaatgttttaccggcgactaaactcgccgacaaaagtaattaatgtaactcgccagcatagttttgacgggcacattttgtgacttcagaagatgcgccggcaaaagtatttacactggcgaactaagttgtcggcataagttcatcgagagttctataaatagagatataatcccattattttatacaagtcacaaatcacataaattgagataaaatatgtatcatcttccatttaaatattctctccaaaattcttataatccaacacattatggcaccctctaggggatcaacatgtccaatccccttagtaagccagtaactactttccacatttttgaaatattatatacacgttatggtgccaaattagcttgtcatgaacaagcatatatatttaacaaatttaggtatcattacgatatatcgatctaaaaaataaatatggctattaattaatttactgcaaagtattatataattattgagaaaaattttggagtattgttattgtacaccagtggtactctaatacctttgtatcatcttataattgcactacatattacttttatagtaacaactttttagtcacaacaaaaagtcattgtaggaaattttaagtcttttccaactttgccctacaccaacatcaaataatcagttttaaaaccaaggtcaatttcgacctttccctgttcctgacttttcaaagtcagcagagtcaaaacgactccgttttgtctttgaacaaaaccaaatgaatcgagactcttctcgatcactctttctcagccttaggtttagtttgaaaccctagcagagagtttctctctgagaaactcgaacccaagccctcaataacccagaatctcaacacaactacaaacacaagatcagatctaaccagatctgatctaaactctaacacacacacaaaaccagaaagattagggttagaaaacaccagattctcccgaagttcaccaataaattggctacgtctttgtttgagctgctcctcaaattcgagagctcgattccacttttaaagatgttcagaagtacaag

SEQ ID NO: 229215 - DNA, 800 bp, Cannabis indica
acatataaaattacaataaagctaataaatttaaaaataattaataacttactaaattaattaaaaaacttaagaactaagcaaattttagttaaaaaaaatgtgaaaataactctaattcctagagttatcaaaaactaataattctattttatttttcttaaaattattcttcaagcgttatatcctaagttaaattcaaaacatagttgtgccaagtggagcttttataattaatttttatgaatgatagaatttaatacacatattttaatataatattctgtagaagaacaaaccagtagagcaacaagaaagattagaaagcaaagaaagaaagaaaaagctaaatagcagtagagagaattttagacatagtccaataaaaaattatctcattaattacaagaatgagttagctcatcctttatatacacaaagaaaacacgaaaaaagatcaacagcaaacaataaaaaagaaccaactgctaactaactaaccacctaaactaacttaacaaacttaagagacatcactcaaaagttggttaacatcccccctcaaacgaaaaggtgtatcagacatcttgactttgtggcatgtttggtttgttataatgggaatgataatggaatcaaattatccattacaatgtttgttttgcttttaaaggtgatgtcatgggattacattgtaaacataattacattaaacaaggaaatccccattacattagaaaagctatgtaatgaggattacattacaaaaaactaaagaaagtaaagctaaaatgactcta

SEQ ID NO: 229216 - DNA, 2109 bp, Cannabis indica
agtaaagcaccaaccttgaaataaactactatagagctttcgcataatcttattctgaactttagtttctaggagactaacaaacccaaccttcttagaaaaaaaaatcaattgcttgatttcttgatgcttttgttggctgttaatccctctcacattccaacataataatctatccatttgaataagagggttctcccccctcatccctattatccatttcctccagcacaacttcaagagattcaaatctgttattcactggtgtctcccctgcctctcgttcagtagaaactttttttcctttgctaactctctggaatccttcctcatccacctgcacctcctgctttccttttttctctttaggaatccaaatttgtttcactggctcctccttattttctttcttcctccatgattgagtatcatgcccaatacccgagcaattatagaaaactagtgggatccattcatatttcacttccaattcaacctcgtgattaaattcatcaaaaaaggaaatcagattaagaaaatcttgagagagactcacctaaatcaaaattctggggtattggagacgatccctgttcttagttatgttgtccacttgtagaggttctcccaattgcccaacaatctcgagcaaagacgtttccccccagtatttgatgtccaaacccttcagttgaatccacgttggcacgctcgtgactgcctcctttgtaaagtcatccacagaattccatggtttcattaccctatgctttctatcaaagaagacatacccatgttccattatttgtctctcatttccatgttctgaaacctgataatgaagacgccctttgctaacagacctactttcaccaccacatccttccatattctacgaacaaatccataaagtatgttaattggaggattcgctccaatcacataacaaaccaaggaagggtcccaatagctcacctcttctgcaatgtcctcaaaattaatcttaacactcttctttcgtgcagatctagtatctaccgtttccttttctgcttgtgcaaagctagcttccaggttcttggtcatactagatctgagaattggaggagagatcttcttccccaaactcacatcctgagcaaccctattagaaatcgtgagccactcagataggtcctaaacctcactaacaggtgatttcagaccttcgttgcactattccattggctctgagtactgttccattgcttccaaagtttcaggaatcttgagttcctgaataccaatcaccgcatccatggatctggttttgataaccttatccgatgaagacagccctgttttcttccctttagctttcacttttccagccattttcgccctttttgccatagccccggtgaaacaccgaaagagagagaagagcaggaaaagtcaccaccaaaatgttaaacattatcatcacattgtcattgcctaatcagacaatcaacaatttgtaaaacctatcatgtcatgtggtacattatacttttcttacctcaagtttcggttcaggtatgttggccgaccttcttagagaatgatcaatgatctcgggccctatgtcataacaatagtaaaccaataagtgtctatcccatagcacaacttaatagttgcaaaggacagcctaggggttcctaccaaaccctgtggtataaatacactaaaataaaacttatattttggctgtaatacatacaccatagtgtagagctcattgcaagcttcgatacagtatatagaatgtccaaaacaaacacccgagtgaaaaattatgataaaaatatgatttctaatctcccaggaatttctaaaaatggacagactacttactaactcgaaaaatccaattttgtacgctccgaaacctatccaaatcactccaaacttcaaagtacttatatataccatatatattacagtcccaatgtaaccgaaattaaaagcgagcccctaaatagaaaacaccattaaagctcaaacttaagcttgaagaagttccaaacataatttttaactcaaaatcacctcaaattcaacaagtaaacatcaaaactagtccca

SEQ ID NO: 229217 - DNA, 1629 bp, Cannabis indica
gacatcatcatcatcatcatgtagtactactactgacaatattattggtgaagaaatggataggatggaatccacttctactacacaaagtctgttcaaacacaataataaggtatattattattctaattttaatttcatcaaaataattcaactgcatatccaacataaaaacagaatacatactagcatgtagtctttaagttttttttctttaattgtgttaattgttttgcaaaattaaatatataataataaattagctagatgtttaatataggctacttgcaatcttcttaattttgtaggtaattgtccccatgctaaagacattaaatacagattggagtgaagttattaaggagatatttgagatgagtagttatagtgattcaataatattgtttcctaaccttcataaacttacgttgatctgcaaatctcgtgatgaactaattggtgtaccaaatttgacattcttccttcacaaatatcacacaattcgtaggcttgaattgagtggctcctttgtgaattcaagtagtaatgatgatgatgatgatgatgaattgaccaacaacactactactactcaccttacatctacaccttcttctttggaggaactactcattaaagatgttgatatggttgatgatgtgtttggggtggaaccatcatcatcacataataatactattgttctcttatttccaaatttaaaatatgtgagatttctagcatgtaggagactacagagctttgcaccctcctttatgtctttcccaacttagaaactctgatagtagggagatgcgatgggctgaggtatttattgtcttcatcaacagcagccactcttgtacaattgcaacgaatggaaataacagattgtgatgaaatgaaggaaattattattgatcataatggtaatgaagaagaagaagacaacaagagtagtactcatgatcatcacttcctaattgttttccagaatttgaaccacctaaattttgacagtttgcccagtctccaaagcttttattcaggaaataaagttacaatgagtttcccaaatttggcagcattctatatcaacaagtgtcctgagatgaggagattttcagatgggatcgtaactaccttgttgaagacaatttgggttgatcatggtaagcaagaaatactagagacagatgttaatacaaccttggcaaaacttgttgagaaagttgataatgtaccctgatttgagatcataaaaggtaattaactaactcatactaattatatatttattctatataaaatgtgactatgtaacagaattcttggtttatgagaaattattaggtaacttttttttttaatttttttattcaaaataacaatttttttccttgaggttaacggggttaaatcccccaaaacccaaaaaccccaatgttgctatttaatacgcagagcacattctttttcgaaccctaaaatcgacactctcgtctctctatttgtttccactatactcaaatatcatgatcgacttctctgtatgtgagtatctagcataaaatttactatacgtgcctcgctacgtagctttttactagtatatatatatatacatgc

SEQ ID NO: 229218 - DNA, 579 bp, Cannabis indica
taaacatatatacaacaaaagtaattaagttatatgtgttgaaagaagttagttatggatgttacaagtgtaacttagcttttcgtattagttagttagtttctattatacttattgtaactagctaaacactatacatagatttgtattctcttttttattcaatacaaataatatattttttagttcttgaagtttgatatggtatagagtttatttaattttgaaaaatattttgtcttcctttgttcaatatctgtatttcatatttttttttctattttgctggcaacttcagttccaaaagactaatttcattcaaaacactcattgtcttccaagttccaagcttgatgaaaataattttctatcatggaaaaaccaaatccttgctgttgtttgagctcattgtctccattgattctttgaactacattctactacaccaaatcttgatacaaaaggaaatcacatcaacaacattgtttctaatgtttacttagattgaaaatcaattacttctttcatagatgatgtccttcatgaatgatgaaatgaacatttgcatgataggtcatg

SEQ ID NO: 229219 - DNA, 2002 bp, Cannabis indica
atcaaaaattataatctttagaattacctacataagttctaaaattataatttaggtattattatcgcaaaaaattaaacttaagtatttatttgcaacgagaaattaaacttaaatatttataccacaaattattttattttttattgattaatattttagtcataaatttcttttcaattttttttttcttccatcacttctattaattttattttttttcatatttaattgacaaaatattttatggtatatatacatgtgcttatatttctctttccatatatatttatttgattaattcatttatgatataattgatgtctagctcttttaatttaaaagtaggacataaatagtaagtttttaatgaataaatcaaatcttttcaatgttatctaatttcctatttcatatgttggtctgatcctatattgattttaattaatttaatctgatattatttgaagaaaattgaaataaaaatttcatttttaaaaagaaacttgtacttactattcacgattatgtaagtacaagattgaaaatttttaggataagggaagatattgtttaggaaaatttcctatgagttgtggtcgtgtttaaactgtgtattggttgtctaatatgagtttaatacttataaatactcatgttaacagttagggttttttttagggacaatttacaaaaaaaaaaaaaaaaaaattgcaagaacaatataaaaaattacaaaaatacaagctggatagagtttctaaaactttttacgattttttagagtttaattacataaaatacggttttttttgtatatttttatgtcgtatttttgttattttgttgttaattttttgttatttgtatattattttttatgttgttctgatgttattttgattttattttcttgttactttcatgtggtttcttatatttttatataccataaaaatatataaaaaaaagcctttgaaagtaaaaatataatttttcttacaaaaatttgtgttttatgtaattatctatttttttttatctcttttacaccctttgaatttcattcatactttgaggaaagagtgcatttaatttgtagatgatagtgtgttagactctacctcaatttatatgtctttgtaattgttttgagtctgtaaaaaagtctacaaaaaagaacaaaagtggcaaccttcgagagaaggttcttcaagctttcgggagaaagtgtttcaagtcttatcttaggaggaagcaaacactcttcaaactgatcgaagggagttcaaacacttggagtttcaacaagattcatttatgaatgtggaatacatcaaatttgcggcatataataaaaggagatctatttatatataagttaattactatgtattttgagatatttctaataaatcttatctctgaatgtgatctcataaactagtaacaatctataaggattgttgatatcacttctaaaaatcctgtgtgtttttatttttgctgattgtctattattatgcaattatagaatcgtgttctgtaattacaatataactgtattaaagagttgatttctaaatcatgttcaacaattacaagataacaacggtatttggcagaattggaatactgggcttgagtctcttataaagcaatattttgaggagttgtatcagtccacagatttattttctcctttgattattgataatgtgaaagttgttgttacggctatgcacaatgaagctctattgcagccaatacaagatgaagaggttaagatggctgtattttctatgcaccctgataaggcacctgggccggatggtatgggacctggcttcttccaacatcattgggacattattggtaccgatgttatcaaaactgtcaaggagtattttgatactgagattatgcccgagggtcttaatgccaccaatctagttttgatcccaaagaagaaaaatttcactgttatgagtgatctcagacc

SEQ ID NO: 229220 - DNA, 2225 bp, Cannabis indica
acgagagattcttgtcatttaaacatgaaatataatttcctcatgctgaaatggaagttgaagcaagttgcaattccttagctcttgtggcccttgatagttatgactatcaatacctgctgtccaaaaaatcacctttgatatcaaggtgagattgagaaatttgctcttgatttgttggtagtacataagcaaagttgcccagccaagccctctcccagaacatgtaatatttttttgaaactccaatagagagcccccaaagaaatgttcatataggcatgtaagccttactctagagggcaaatcttgtggtcacacaaaccatcaagtcctttaaactcatgttgtgtaatcatggcacctgagattgaacttaattgtttaatttgtttgatttctacagccattctcaataaaaaatagtcccacatatcaccaattagccatataaaaagtagaaaactatcaatagttgccctattccattcaaaatacccgacaatatcaattgatacttctcaactttgctcttggtgatatttcctccactgttaagaagccaagcaataagcagtaacgagtcacctttagtattaattaacaaccttcaaagaaataaactccaaaagtcttttaagagtaattataaactcatgttcgtaagtttggaaaaaaaaaaaaaaaatctgatcctgaaccatctcttgaatttagagcattaggtgattcccacaaaaattgtagtagctcttttataaaaaaaatcgcaagtatgaaagaggaagagtaccatgttcttctagtttccctatatcaaaaatccaccgtaaaaataggcttttccagttccaccttgtcgttccttttttggccatgtcagccttcctttgaccactttcacgaagttttccaccctgcgtatcgttgctagtggccatgagccatttcttgggaattgcactcccacagttgactctgtgtgatatgaagaagattccaatatggaaatacctagatcccacgtgaccaatgtgtgacttaaaataaaccttgggctttgttttttttctttgcttaatgggcaatcaagggttaggtcaaagtactatttggtaaataatatgtctgcctattggtatgtttgaaaagtctctcgtttgagtgctctgtgtggatttgaaatagtattgctgttctggtgttctggccgattgaaacatggatttacaaggattggaagatcaatgggcatcattggaattagaggaagaggatgaggttggcttagttgcctcacgtgtcgaacaagaagaactggtcattgatactcgatggtgtctagttgggaaactcctctctggcagagttagtgattttgatgcgtttcaaaatatgatggcgtttctatggcaaccaggcaaaggaatgtacgtaaaggaactaaactctaatctatttttatttcaattttaccatgagatagacattgatagggtgatcacaggaagtccttggactttcaataagaaacaacttattctccatagattgaaggaaggggagaaccccaggagtgtgaatcttcattttctagacttgtgggttcatatatatgatcttgaacatgggtttcagtctttgaaggtggtcacggatataggaaatttaatgggcaagtttgtggaatcggatatcaacaatttttcaggcgtatggagggaatatatgagagttcgagtgacaattgatgtcgataaaccgctgcggagaagaatgaaaatattccgggaggatcggagttggttttgggcgaattttaagtatgagaacctctctactttttgttttatttgtggtatattgggccattcggaacgtttttgtccgaaattatttcatacacctgctcacttgattcaaaagccttacgggatgttcttgaaggccaacagtaggcgtacatctgagaagattggagcaaaatggctccggtcaggggctgtaggagggatttccgagagaggggaggggagctcgagacctgtaactccagtgatggcagggggaggaccgacggaggtgattggggagttgaatggggagttgattgggggatatggggatcgtgggttggcaacaggattagtggaggggggagttattattcgtgatatgagggagaaattggtggaaggaaatttaaatgatgatgataaggatat

SEQ ID NO: 229221 - DNA, 887 bp, Cannabis indica
tttgaaaatatccctttcttttatcactattttttgtttctatttttctttaaactttttaaaaatagcttaaataaataaatggagtatacgttgggctagagttttatattatttttttagcaactcctttacgtttacttatttcaaataaaattttgacaagggttttaataaattgtattttttgtgtattattttggactattgagttgttactttcttttgtctaatcgtgaattggtaatatttatgtggtttgcttatattcatcaactatcttttcttctattttagtaatgtacctttatccttccttattattattttttttatctaaatatattttttattattgaatttattttttttaaaataattcttattattgaattggttgctgtaataaaaaaaaaaggactggggtcgttgtcgctgtcgttgaggtatcctttaggaatcaaactaaaaaaaaattaaacagaagagtactaccgtcaacttccgcacccaaaaatacatgttagaatattttctttttcaatttttttatgacgatgttcgttataattataatatcaagcctataaatttttaaattttttaacaagtttacagtattgactacctaatatttcaatttaccactcgtgttcaaaaaacttaacacctattttcggcattgtaaactattaaaaaatttacagagatgatattgtagtataattacgaaaaaaatattatgacatatattttcaggtgtggaggttgactaagaaattgtaataggagattgtaattagcactcaagtaaattttaaaaatttatttactttgttgattgttggacccaaaagtggtgcattttacatttatcaactcccaag

SEQ ID NO: 229222 - DNA, 1267 bp, Cannabis indica
cgggacttatgcttagggtgttttcttgtggcatacaaagacttaacaaatattcataagttatctgatccacgtgtccctgttcggttggtccacgtatattgggtgaaatcagtggcaacagtcataatttgcccattagttcttgcttcaaaagtattctttttctaagattataaaaaactaacgaaaaaattatttttaaagttcaattaaagttagataaagtaatagtaaaaaaacttataagatgaaaatttgatttttttttcctaaacactataatagtaagaaaaatataatcaatatagaaatgataactaaaaagttgaatataaaaccatccaaaataataccataatagttttgctcgatgacaactagaaactctattaaattgaaaaagaagcaactaaaattcaatcaggtagtacctattcatatattaataaaaaattcaaaaagattaaaaattcttaagagtttgtttttcaacaacctccaacaagacagaacttatacagaaaaatcataaactttccaaaagataacaaactttaaagagtatgcttatcaaaaaactccaagccagatagtacctttacgtatccataatcttctaaaacattacaaactctaacgagtttgcctatcacaaaagatgtaacaaaaaaatgtttgttacttaatcaattacatgtaaaaggtttggaaccattacatacaaaacgttcctaaaagagcactactatcaagatctactcatctgcatcatcatcccagaatgtttagtggaagatatgtatccatttacttattttgtcatgccatgcacaaacaactccacacaaactttattccgtacaaacttcacatccaaaggatttggaatatattcaatcaatccatgggcaaagtattcagagtacttgataataaatataccacaatcaccgcaataaacaaaaaacaaggaatcaataaaagacaaaaaaaagtatatataaaaagattaagcaattaataaaaagcataagaactataataaaaaataaaactaatgaacaataacctaagagtttgttgtggcagaccttgaactataaagatatcaaggggatcatactcacgcttccccttgaacaatcccttagacatgtcaatattattcctgaaaccataaaaaccaacttgtgccaacagaattgggatcatcacagcaaaagccttcacaaaagttgttcaatattgacatcgcttttagcca

SEQ ID NO: 229223 - DNA, 3084 bp, Cannabis indica
ccaaatatttgaaaaataacaagtaaaatttattgaaatatatataaatagttatagagagagaggttacattttcatggcaacacgtgcagaggctgtcaaattggtaaagaggggcgtctccgacatcagaggaaacaacttcgacggcggacccaacatgatattcgtagaaaatagaaaagaaagaagagaagagaaagggagaaagacgtgagacctaccgagttgaggttttcttcgaattttgatgggctttcctcaaatcttgttgggtttccgtcgaatgaggttagggttgggcgaagatgaggttgggacagaagacaaggaggatggaggacaaaggaggaggctgggacgacgaggacagagtacaggaggaggcttagtatcaaggttgaagacaaagtgaaaagtgtgtgaattgagttggggtttagcgtaaattggtaagattagcataaatgtacaattgaagctatattttgtagtgtaggtaataaaatgaagggaaaaaggttagcgagccttttgaacagacgctaaagacaattatttttttaaaaaaattcactattactgttgggtgttgtattagcgtctaataagtaaccgaagctaattaataattttttgcgtcggtttagaagtgacgccctaatattcccctatattattcacgtcggtcaatgcaataaacagtagcgttaaccgacataaataatactttttgtagtagtgtgagttggttcagggagagactaagtcagtgacagaatataccacaaagtttgatccacttaccaagttggcttcgagtgtagtacctactgattttagtaagaaggaaaaatatttggcaagtttaaatgcccagaccagacatgatttggtcattactacaaacaacacaacaacttatgccgagatgattgagaaggctcttcgagctgaaggtgtagtataatttctataggaggccccagggactccatgttttggttggaccaccatttttcctactcttggttatggtagaatggtggtgattcccatatttatcagaaaaggaagacttttccagcattaggtggctcgggtcaaaataaaaggtttcgagggaaccaaggtaaatatggtcatcaaacatatacatatcttgagtgttctttatgtaataagcacagtctcagggagtgtaactgaaggtcatgcttgtagtgtggtgtggttgagcatttctagaaatatttctcacaatcgaagagggaagaatctaaacaagaggtgaaacccactctacctcgggtgtttgccattatgtaagcagatgctccagccagtccttctgtagtaacaggttagcttctagttaatgagttctattatactgtacttttgaatttggagctacacattcatatgtggagcaagggtaattaataaatttggtaggccttgtgattttattgagactgggtttgaaactttattacctagagtagaactggttatctccaaaaagattgttaggtctatgccaattagaatttagaagagggaattaagtgttgatttggtgtaattagatttttctgagtttcatattatacttgggatggcttttctgtccaagtactcggccaacatttattgcaagcgaagaatgataattttgtcaattagagggtgagaagccatttgtttttgtaggatccatttatggttctcgtattccaatcatttcagtattaaaagctagggatttgttgcacaatagatgtgtagggtttctagcagttgtaattgactctagcagaccagaaatattttggcctaatgatgtcaatgctgtaagggaatggctggaggtgtgtcctgaggagttacccggattgccactgcagggagatattaattttatcattgacgtggcacttggagcagagcctatttcaaaggcaccttatcagattgctccggcagaactcaaggagctaaaaatacagctttaggagattcttgatttatggtttacccaagacaatgtgttgtcgtgcagagctttgattttatttgtgaaaaacatagattgatcctttcgaatgtttattgactattgagagttcaacaagataagaattaagaatatatacccattgcccaaaactgatgaattattcaatcaacttgagagtaagactatcttcaccaagattgatttgcgctcaggttatcgtcagttgagaattcaagaggaagatattccaaaaaatgctttttagaaaagactatggtcactatgagttcttggtaatgtcatttggtttgacaaatgctcaataacttttatggatctcatgattagagtgttcaagaatttccttgataactgtgttatagtatttattgataatatccttgtatactctcaaattgaagcagagcatgagaaatgtctttgaatagttctgcaaggactcagagatcacaagttgtatgcaagtttaaaatgtgcaagttctggttatcacaagtgtccttcctagggcatattgtcagaaaggatagaattatggttgatctagggaaagttgaataaattaggaactagacaagaccaaggataattattgattttttaagttttatagagaaaagtgtgagatttataccaatcaccaaagtctcaagtacttctgcactcaaaaagactagaacatgagacaaaggttgtggttggaactgatcaaggactatgactgtgagaatttgtatcacctagggaaagacaatatagtacagatgctttgagtagaaaaggtctcagtcaggtttttagtaccacaacgatctctccttagttagcttcatgtacggtaaggatgttggaatatatgttaccaggatctagatttactaacaagtatgtttttaacatcataatatgaatttctaaaacgatgaaaataaacacataaaaggtatgagaaaccttactgctgttgcagagaattaaatgactccttccgcgcagatctctaaccctgtatcctttctatagcagagtatcaccaagat

SEQ ID NO: 229224 - DNA, 1515 bp, Cannabis indica
tttaagtatttcaaaaattgtataattttagttgggcttaaatttcgtgcttaaaaaaatgccaatttttatggcaattggccatagttttgccatttttttttatttcttttcttttattttcacaactgctatttttttcttcaaacacaaacaaaattaaatccaaacaaaatattttcaacataaaatatgtcacaataattttaataaaaatatttatttaaaatctaatgaatttgtatttctttaaataaaaacaatgtattttcttaacttattatttctttttctctgctatgtcataaatactaatttttatttacaaagaaagataaaattaatcttaaataaaatatttttaatataaaaatatataactttaatttcatgaaaatattatacaaaattaattttattttgtatttttacactataaaatatgtaatatttttgcacttaacaacatcttccagtactttccactcactttggtgtcctattgggtacactgttcttgcataagttgctagccaatatttctttgtgtagtaatctaaacagtagttgtatgggtccatgtgcatctccttcaacatagccacaacacgtctgcaaggcattttatctatttggaactcgttgcacgtgcatgttctttctttgaggtctaatgtccacgattctttcattcttgttacctcaaataaataatttgttgtttatttaacctgttttttttttttggttttaaaaaaacaagtatttattgtatttatagagcaacattataacaacattaaaacaacaccagaaaaacctaacctattcctggatgtttacgtgtaagaaattttaaatttgaaatgtacatctcacctccagattcaatgagtatgtgtagttttctggcagtatgtcttctccaggtggtgccagcttagtatgtgttttgtgcttttatcgtattattatgtgtccattgttgcaccaatgctctcaagcattctaacagtattctaattggtagctcccttgcttctaaatttgcggcgttcaatgattctaatatgtttgaggtgatggtgggatacctcttatttttgctgtgaattcttgaccatttttcataaccgacttttttcaagtacagtcgtatgcgtttttccaatccatctagttaaaccatgtggaattcgaattgcttttctgtatagactttcactgctccaaagaatggaaggttgtacttggcagcatattgtttgaagattgttttgaggttgctcaacaggtgatacccgcaatatccgtgtgtaatttctggatatatttctcttgttgctttgatgaggctctcattcctgtctgaaattagacactgattttctcacactccatacgcttcttttaagtttttgaaaacctatttttaagattggtcattctcagaatcaacgacacagaacgcaagtggaaaaatatgacccggtgcatcttgtgtgcatgcgcaca

SEQ ID NO: 229225 - DNA, 1466 bp, Cannabis indica
ggcataaaacccaacaatgtccttcttgatattgaatctcagcagatttacacttctcgtgattgaatttttcacgaaatttttttttccatatcttaccaccactcccacacatgagattgacaaatggctctctcaacctataattccttgccaacacaagttgcaccagttcttgtaactactaaaactgcaacatctttcccaacaacccttttgcatgtgtttcctgcaactcatacaacagcaacacattgccaccaatctgctgcacctgctgcaactcctaaaccagcaacaaattaccaacaaaatgttgcaccagctgcacctaatgaaccagcaataaattgacaaaacattgttgcatcagttcctacaattcacaaaccagcaataaattgcccacaacctgctccaccttcatctattagccctgttatcaccactaaaacaggtagacaaatatctaaacctattcacctacaagactatgtttgtcacacagcctcaactaatcatccaatagaaccttttctatcatatatcaaactccatccagagtttcgtgctgctgtccttgcagcatatactcaacttgaacctcaaaattatgctgaagcttctcagtttaaacactggcttcaagcaatggatgatgaaactcaagctttagaaacgaacaaaacttggatcatcaccaagctaccacctggtcacaagccaataggttgtaaatgggtatataaggttaaatacaatcaagctggtgcggttgagagattcaaagcacgtcttgttgctaaagttttcaatcaaaaactcggtattgactattcccaaacatatgcacctgttgcgaaattcaataccttgaaagtttttttggccttagctgccattcacaactggaccatacaccagattgatgttaactatgcattcctccatggggaacttcttgaagaagtctacatgaaaattccccctggttataatgctcctctaaacacagtttgtaagcttaacaaaagtatctatggtctcaaataagcctcgaggcaatggtacgccaaattgagttccacactactacaagatggcttcacttagtactcaagaagtcaacagattaaagaacaactatgtttaaagaaaagtctgaactcaagaagttagaaaattttcttgagttagggaaaaaaagttcatgaagcttagaataagcgagatgaaagacgcacgctatgcatttcagaaacaataattatggctgtaaaactgcatgaagacatgataaagaagaatcccagaagtttctaaccctagggtttcctaagcaattttctacaacacagtggaagttgcattcgaagtgtaaacatgcgaagatgagcataaaggaaaccagaaacttactcaggattcgagtgtccgggttcgagcaactgttgggttttgtgccc

SEQ ID NO: 229226 - DNA, 3219 bp, Cannabis indica
ctggaacttcccatgtctttttgaggttgattatgtaagcctcgtcattcatgcacttgaagacataatgctccatctaaaaattgtagttcttcacgaacaggtggacctcagcagccaacatcatttgtatgtcagcttttatctgagagagcttactcgacggagctgtgaaccccatcgaaaggtgtttggagctgattaatgaaggtagcatgatcgcaccttcctatagcgagatgggtgcctcactattagctgtttggatttacctaattgttgtacttagtctgtataaggtgtattatacactaagtgtcttaccagtcacaatgtctcgtctcctaatacgtagtgaggttaatgtctcgccttgtagatctaaagtcgtatggtttctcgttaatgtacaaggcaacaattaatgtatctttatcttacgtaggaccttttagtcggcaagttgtaaatatactctgtcaattctgcgttaatgagttattcaattttcaaatataattaccgttacattcattgattcgtattcttcctaatttgacacgtgtcctcctttcaaatgatagccaaattttgggtatcacaattgccgcttaaaaagtgttttttaaatgatcatagaaggtatatttgtcataatctctttttgaaattttgcatgcctttgattttggtggcttcatggtttcaagggtcattattagcattaatgactcgccctttcaacgtctagccgtgagatcttccatcttttgaccatactgttactgggctcaaaatataaaatggtaagaatctattctcctccatttccatctttaatactcttactggaaacttgttcagacccgctcttcgactcccgatttttgaaaaaacttattttgctggctgttatgtcttcatttggagaattgcttagcatccagcctttcaacttcacaaagtgagtatctcattctttctttaattttactcaagtgatgatccaccttacgcctcattactttgtttggtttaatatccagggttcatatatatatatatttattaagcatagtttatgttagctatattccatagacccctggtttggtaaattttatcgagaaattgggattgtcattctcccgtggagatgtcccatcctggttcagaaatttatcctccaaaatttgcaccaccagaatataccaaacatctatcctccccatatacacccaaaaattttgaatctcagtccaaattagaaatgaatgattccaggattgaacatcatccgattaaaccaaaccaagaagaaatggccaatcgttataggcgattcttataagagatttctgaaggtaagcatcgttctttgttaattgtggcctggtttgaactgatccttttttttttcatttacaaaaccaatgtttttaccaagcgtcactctttgtctttgcaggaatggatatagattttgagagcatgttcaaaagttctacccaagccgacaagagattcagaaagaaggtagtctaagccgatgaggtctcaaattctgccaaagaacctaaaaggaccaagattaaggctttcacgaggacatccttgagcaagcttattattgatgctgacaagtctctcgaggcagggaatgaggtccttactgcggggattgaggtctctgttgtaggggttgttcaggagcaacctacccggtcggcacaccaagtcaagttctctagttctcgtcggtagatggttctcctcgagccctcctgcccctaccccttgagtttgggactgaggggtctcaactgagctcacaacacggcaccaacaattggcgcaacctcttgacacttaggtctcacgaatgggatcttgctattcgcgacaataccgaagatttgaccaaaataagtcatgaacttctacatcaggtcaatctttgtactgctttgttctcactcatccctactctatctttcttactaacttcagtttgtcctttttcctcaggcttcttttctcgcttacgctacacatcaccggtcgtctcaaaggatcgagatgctagagacgcagcttcaccaaattaaggaaaatagcgatgtcgtagcgaagaagtggagcaatgctaaagctgaggtttctcgcactaaggatgaagcagaaaagcaacaccaagctgaacaacaaaaaatcaaagaactcaagaattcggttaaatttctccaagctagtctcgttaaaaaacaagttgatcatgatcaaaagctcaaagagttggaggctggaaccaaagaaagggtcaacaatatcggtaggaggaccatctgtcagtttggtcagccaaccccgagttagattttaattttttgggtgataaggctgaaatcatgctttcttactgcgagaagactcggaaaaaagaattttgtgaggaagaagaggttcatgcagaacaagaaaataccaccaagtcccctatgataatgtagacttggtattgtatttatatttatttattttttgtttaagaaaattgcctaatggtttgccccttttggcaatttcataaagacaattttgcgaagtttgttcgccaacttaacttttatttatcttaaatgcctcgttcctttacattcaaacttaatatatttatgtttgtttgcgtttttattcacaatataaacaattatattttgatcaaatgcagaatactcttagtctttccatcgctcgtatttttcctatttaagtagttagtaatctactacgtgcacgagcagtttattatctgtcgggcttttgatttgtgagcagttatcaactctgcctcgcgataacagttataatctgtcttaagcaaacttgaatatactatttgaggattgatcaccttgaaagatttgccactttgtatattcttgattgcttatatgaatagttagatcatctattcatataagtacttttgtaaggacacattgatatctcatttaatactttcctatattgtgcaagccgttaatattcagcttcacacatgttatgagttatttctcatttataacttttcattttcctttcttgtcaaacaggttctaaatcaaaaagttacgatgatttgatccctttctcgttagaaaggtttgatcaaaaactttaaaaaaatttaaagttgtgggtttgcactatatcatg

SEQ ID NO: 229227 - DNA, 2139 bp, Cannabis indica
ttaaaaatagtgttaataaaagatacatttaatataattttattcggtgcaaataaaaatactctttaataatttgttagacattttgtatctcctctatttccttacattggtaatttatcccctttatttatttatttttttttatttcactatttcccctccactaacactcaattttagaggtgttatttatttatttatttctatttttttttgttattttttattagaggtgttcatataattcaatctgcactattttgttcaaggtgtatctgatctacactaagtacggatttcttattttaaaatctaatctgcatagtaactcaaattcaatcaaattcgtaaaagtgttgattagatcgattattttggattagaaactttttaatattgaattatttaatatttattaaaaaaatatttttcacttgactaacaacaaaataaaataatttagtgttgttttatatctccaacaataaattaaaataaaaaaaacaaaaaataaaaaaaaaatacaaaggaagaagacgaaaaaaaattgtatgtataaaaaaataattaattttgttttaaattatattttcatatttcattgtaaaaaaatagaatatatatttgattttaaaatatatttgtatcatacatttgatttttagattactattttttacattaaaacgctaattgtatatataacttttattaggtcgattactaatcaacatataatctgcacaagtgcgaattttatattttttaatctaatttaatccgtacaagtattgatattcgtactttgtaaattaattgaattacatcgtataaattaaattgaattggatactttatgaacacttcacttttctttttaaattttctttcattctctcatttattatacacatatttagggtgcttttaaaaagttagtcctaatagaatttcacaataattaatagagggaattaaggtgttttaattacacacttcaattctcatgatcccaatctcgtaagaaatttgtatgtagttacacgataattaagaaatataaatatttttaaataattaattattaatcaatctttttttgttaagcaaaaaaaatcctatgaaataattacttctaatatctaaacattgtattttacaataaataaaggtaattactacatttgttattgctgtatttattttgagaaattttacaaaaatactagaaattttaattaatttttacaaaaatactgtgcggattttttttaaaaaaaaaaaaaaaaaaaaacagtaggagcacaaaacagaacaactaaaaacaacagtggaacaactaaaaaacaaaccgtaagaacaatagaaaaaacttaacacagtacacagtatttttaaaagaaaacacagtaattttgaaaaaaaattccaccccacagttaaaaagtaaaaaaataaaaattatagtatgtggtgtaataatcctttatttttcatttgtgcattggacctttcatgtcttcttttgtgcagaagcttcttttgtaactagttgctagttactttgacataatttcaaaaaattagtaaccatatactttctaattgaaaaaaaaaacagtaactagttactcttaccacttacttagatttaaaatttcaccaagtaaccaattatgccttgtttaggattttaccaataaaaatttgtgggggaatagaatattttaaagaaattagaaagcaaaaatattttatttttttaataatttacaattgtttaataatttataaaattatgatactttttataaatttgaatctaaacaatgaaaaaaaaaaaaaaataaaaacaaatataatgtgtttataaatgttagttgcaagcatgcaaaagatgctcacaaatttgtgaaagttatttataaatttgtaatagttgttcacacatttgtaaatattgtttttttttcttattttttttgaaacctttgtaaatattgtttacagaaaaaaaattatacctatctacgaaattacatgtcagaactttatacttcagattgctttaattggaatttgatcatcggtaattaccttaatgattcccatcacaaatttttattggtaaaatcc

SEQ ID NO: 229228 - DNA, 1895 bp, Cannabis indica
tgttgtgttgtcatatatatagtaattaagttaataacatgatcattaatgttattgttaatcatacaatataacaattaaaataatgattagtgatatgttcacacaaatttgttatatttctcatattgttattattaatataaaaaaatatatctaataattatgtaaataatgtgttctcccaaactatgacaatattttctaagtaattaaaataaaattctaaataaattatattttaattaaaagattataactataaatagagtttaactaaaaaaatttaaaacacaataaaatattaatgacaataaataattcttagtatcataataaaattattttttagtagatttatacgtattttataatttaaaatgaaattattaattttacataaataaacataaaaattatataaatttattttattaagatataattattcttatatagagatatattttcttaatacaatacttaaaaaatgcataactaattattatttagaggttatttttatttataattagtctaaattaattctacttgaattttttaataataaattaaaagttatttttaaatagattttatatatttaattagggtgtagttataattatatgtgcaataattaatactagataataatttttttttgcaaactatataaagagaaatatataatgaaattgtgttatttagtgtttagagtgtaattacttgtgtaacaagggcgtagagagggagggtgacgtagctgcacagaatctggatgagcaccctgatcacgatccaacggtgttagaaatttttaacaaaaaataaaaattaaatattaatgacacttaatgattgaacataaataaataattaaatgaaatttataatatatatatttatatctgtatacagaccccatggtgattctgataaccacatcctcaacatgttcatgaaagcaagatttgcgtccaaattcatactgaaaaattaattaaaaaaatatttagatgaaattcacaaaattagaataatactaattattaagatatgtgtataattatatagataattacccaagtccatgcaaagaacgcaagctggaatgcattctagcaatagaaaaaaaataaatagaaaatatattagaaaatttattaatttattgtttgacacatagaaaaaatatacattgatgttatatatagaaattataataatagtagtctatctataaattttataatatagaacattaaagtatttatgaaaataaatagtcaagccatgatacatcaactcaattgaccggtgttagttgtttgttttgtttagtaacatggatattaattatttttacttaaaaaattaaaataattaagcccattgatcaagtcataataattaaattggaaattataagttttatgaatttttatagtatttatagaaaaaaaattaagaaattgttgaaaaatgatgagaaaccaaataagggtaactaagtacttgtatgataaccagagagataattagttatcttatattgtttgtctcatattttttttttaattttcatataaaatatttttgtcaagaaaaaactatattttacacattataccttaaaatcataaaagtaaaaaatctccaaataactattagagaaaattacattatatatccactttactttatttattttgatctttacctctattttcattttctttaagagatacccactattatagatgatgtccctattatacccgttaagttaatgtaaaatatatgttaaacttaagtagaaggtaagggtatattatatttgagaactcactcacaaaagtgggtatattttaataaaatataatataagggta

SEQ ID NO: 229229 - DNA, 1613 bp, Cannabis indica
ctgacgtatctttctaacattcttttagtctcagttaaagagttattgttattagtcttagccatgtgattggcaatcctggttaaagggtggtcttgggtggtggtcgacctttttagtgttggttattaggttgtgttgttttgaggatttgattcggttgtttcagggattgtttgtgttttgttatagtctttacgattgcaattgatgttttgcatcgaactagacgagtattttggtcactctttattttttgaaagaatgtgtttatgctattttgattgttaggttgtctgcgtcttgctcaaagaaacttggtttctcctcattgttgtgagatttttagcaaagtttttatctagactttagcaagagaaccagttgagaatttttggttgaactttgggcctatgttcaatttctctgtagattgtatttgtacttatcatttctattataaatggacaatgcatttttctaaaaaaaaaaatgtttaaatttaaattaatatacttgaaatagaattaatgtttgatgttcttttctattaatttttggaaacctagtatacttttaatgtttaattgttggtggcttattgaacttttagagtgtatttgtgtttttcatgattcagatttctaagtttgaatgcacatctgaataataagatattatttttttaaatcttaatattaaaatatgtggattgcttattttttcacatttcaatgtatgttctaatgtttttaattatatatactaacaaatttaataaaaaaaaaaatcaaaaaaaaagtaattacaaatatttaaatacagacataattaatctattaattttaataaattttatgtttcaaatattatgtacaaaatctaaaccccatatactgtttaccgtatgccctgaatactcaactcctaaactctactacaaatcaaatcaaactaattcttatcttctatcttaactcttttaggcataacacaaaaaactctatatttaatatcccaaagaattctcataaaattattagcaattttgacacactttttaagattaaaaaacatcatttctcacactctataaatgataaactaaagtcgccaaagtagacagtaaaaaattgactttttgaaattgacttattattcttttagttttacgaatctaacgaataagatcatccaacctatgagtgcgagcaatccatccaagtcaaatttcaatttactaaggcaatttacactataaacaactctacaaaaaaataaatgttgcacatactcttctttatccctataaagcaaacacgtcttatcaatactattattaaacatggataacaaggtaaacatggataacaaggttctagtacgaatcttttacaagaactatcaaccaaagcataaatctatgttttggcatactcaagtgactccacacttcattactctaagaaactctatttggtaaaaaataacgagtatgataatcctctttaatactatatttacatgtagcaacgaggtaatatccatcctatctttaaaatgatttttgacatctacaatcttcttccaataccaactactatcttgtggag

SEQ ID NO: 229230 - DNA, 1748 bp, Cannabis indica
agaaactcaacttattttacttcaattacaattctattatgttatatgaatatgaaaatctacccaatagccaatcccaggtttgatgactcaaaagtgagttgaaaaataaaagaacagtagcattcaaatgtatcaattcaaagttgaaaatggtaggaatgaattagaaatgaagcgaagcagtagttgaaatggaagtgtgaaagtagatgagtgctgcgtaagcgtgacttgtaaactcaacaatacttttcacaaaccaaccttatatatgtagttataagagaaacatcctaccagccaactagaaaaccaatgttttgttttgggtttgctcagttttagtaaaccatttccagttaaatttctgtataattgggtacgaagtctgcgtttctgtaattttataatatagttgatgttggtgggtgatataaactaactaacggaagcttgataaagaaacagttcgacttaaaaaaatactaatactaaatttctctaagcttgatagagaaagagtaattaattatggtccgtggctctaccattacggtatagacaaagcagtgctaccggccaagccaagttccttgcctacaacaatacgcaacataatactttttttttccttttgaccatggttcacaacaattcacaacgtgggaatattttattaggtcttcttatatgcacccctaaaagagatgtaccaatgccacctttttctatttcagcatttaaaaattcagtctaattttttttttggtaaatactattttagactctgtgttttgcaaaagttatcatttggaccctatgttttgttaaatgataaaatagaccttatatttttcaaaatagtaaaaataggaccctgagctcaattttaaaataatttattttttaatataaccaattttaagacaatttttaacatgaacagatacagaaaatgtaactagttttgtcataacatctctagattatattattattaagttttattttaataaaaaatcagttcagggtctcatttctacaattttaaaaaatacagggtctattttgtcatttaacaaaacaaagggtacaattgataacttttggaaaacacagggtccaaaatagtatttgcccttttttcatatagtttatagttatttaagacatcgaacaaaatttagagaaatttagaataatttacagtatagaaaacaatgttgaaacagtctattttacacgtgtataaaataaaagagtcatgcgtgctacaaaccctgttaaatatttttaaatttctcaaatgtcttaaataattataacatacttgacaaattgaactaaaaaattctcccagatgccaaaattaatagaggtgcattggccatacctctcttagggggtcattatagaattttcctattttattttagagaatttaaataattttcttaaaaaattaaatagtataaaatttggtaacaaatcttaagtttttgtaggttgttaaagttctattatagtgttcttggttatctcttttgagcttatacattaacaaatattttattattttaattaagttactcaaatataaagatttaacgttttctctttgatagagttttctccctttccccttcaagaagtctcttctagggtttcttatcctcccttaggccccccagccagatctggacggtagcgctctgagtattgtttctggcgtgtttcgtgttgtg

SEQ ID NO: 229231 - DNA, 676 bp, Cannabis indica
tctcaaactcaacaaccacaatcggcaactaccaatcaaccgtagagcagccggaaaacaatcataatttaagatttcatattgaaaaaaataatatgaaaataaactaaaaaacaaaactctctcattgtctaaatttactcagagtcaaataaacctagtgtctcctcatggagacaaccttccattagaaatagaaagcagttcttcattggttaaagtgatcaaaccagctggtagaattgttgaggtttgacctgttgaacacttggaccaaacttttagttaaaagaaattatgaaccaccttaaccaacttaactaactgacaagttagttaactaagtatcctctctcttgcttgcccgagtggatttatatagtttacacttgtgtgtgttgagatgagattgaatgagagacttttgagagaaaatcagagtgattatgagggctgtaaaatgatctctcatgtttttaattgagagtatcacaagtgaggttctttgtaaggagcaagtctccattgagtgaagggtttagccttagtttttgtaactctgttctaactataataaagacgatctttacatctattaaaggttgctttctctcaaggattaagctcatgatcattctgattgtgtagctcacccacgtaagttctttatgttcat

SEQ ID NO: 229232 - DNA, 1279 bp, Cannabis indica
ctctctcaacagccaaaagaaatggatataagtacttttcttttctgcatatgctgtgagtaaatatataaaacaaaaaattgaacacaacacaagtttttgtacatgaaaagagagaataatagtttttgtagtttgtgcaaaagaaaaaagaaagggaaaacttcatatcttcatgatatcaataggtggatcaacacatcaacatggcttttgtcacatatgtttctatctacacaaaacctatgaagctatgcttctaagtctctcattctttgcacattcctcctgtacattattaaatgggaaattaggacacaatattaatcttcatcactaaatcaatttctctatataattttacttccttatgcttacttagtactatgtttggtaggagaaaaatatagatggataaagaggaggaagaaagagacattctccctcccattttgagaatatccaagaaaaagaccaaataaaatattttaaatacaaaaagggataaatatttaagtttaaaaggataatattatagtttttaaattttttctcaataactttacactaccaaacaacataaatgagagcaactatcttcactaccaaacatagacatagagtgtaaaacattactacatgctcagtagagaaagtagtcaatcaactgaaaataaatggaatcaaattcacattatgctgctgaacatccaaaattttggacagcacacacatacaaatggaatcatttgggtataactcactctcaaaagcgagcctaaaggaggagagtacctaagtagttatctactggtaactaattccatacttgatcaatgtgggatcttgttacaccgccttttggagccgacgttcaaggtagcccactctatggtgacctattctggatctaatccacaggtcgctcgttctgtatattggcccttccgcaacatcggccccagtttaggttgcatggccctagtttaggatgttaggccttaggataataaataaaaagggtaattgagtaattgtaatggaagggattgatgctatatatatgagtgagtagtgagggtaagaggggagagaattaatttgttaaagtgagcattagctctttgggagagagctgggtctctcgaatacccagcaacttgttctctttgtcactctaatatcaatatactagctattttttattgttgctactgtttggttctatttttttctatcttgctactgattatactcaaaatgataggaaattcctatc

SEQ ID NO: 229233 - DNA, 772 bp, Cannabis indica
tttttgcatgcatggtattactggaatttattttgttgttgcttgcttgattctagggtttcttcaaatttattttgtgaaaagaaaagaaaaaataaacccaaatgtaagtgtgtgatgccctaacacctaaagttgccatgtgtatgcttttgaaatgtaaatttgtaatagtagattaacaatttaatgaaattcgcgattataataaaaaatttattaaattaaaaccatagcaatgaataagattacatcgctaaaaatctatttcgaggatcccatgttacaaaagtttttacaaaagagctatatacaaaattagatcaaaatacacatcaagtgtaaaactaaacatctcttgacagctcgaccatacaagcagataagttgatatgtatatttgccaaagaagactgttatctcatggctagcttagttttcctttgcccttacctgtaccacaaagtacttatgagtcacaaagacttagaaagaaaagtaaatataaatacatattaatcagataactaaatcaaaatagtaataaaattaaatagtaatacacaagtacttgtctaataagacaagccatagcggttactttataaagtaactatttctattgttgtctaaaaagacaaccctaatgccctaaccccgatatctgtacacctctcttgttgcctaataagacaaccatgatgccttatcccaacatccacatacctttgtcattgtctaataagataatcgacaagtatgaaacctaaca

SEQ ID NO: 229234 - DNA, 2094 bp, Cannabis indica
aacactaactaaatatgacttgtgttttaaaaacttcaaaaattattttttgttctcattttttaaaataattttttgaaaacaaaaaacaagaaaataataccaaacatgctctaagtttcttgttacatttgggcccgtctacgaattggtgatgggttacatgcctctattttggaggctccttttggttacttcatgaggtggtgtcgtatgttgtttctcgccatccaagattggtcgtaaggtggtgcaaagtttacttcaagttgatgttaagcagtgggatgaggatgtgattggtgataagtttgatgagcaatataggcagcttattttactattcctttaattggggaggacatggatgattgcttttattggagtagggaggcttcgggtttctacaaagtgaagagtgtgtatcaattgctacaatgcttaaaggggtgggaatgatgatccaaattctgggttttgatgtaatttgtggcaactaaaaattcctctaaaggtaaaggattttatatgtcgtgtttgtacttggtgtcttccaacgatgtatcaacttagtttgaagcatgtgccagtacaaaggaattgtcctctttgcttgcggtccgatgagactattattcatagtctagtgctctgtccatttggtgctaaatgttttgtctatggtactgtcagtgttggtttgaatgatgctattggggatgacttttctagttggttctaacagttgggcgctagggtgggtaaggagaagcaaggtggagtagtagtgatttgttggggtatttggcagctcaaaataaatttgtttggaataagaaaatttctagcgtgaatgatatagttacgttaataaaattgtatgttaaacaatagaagaatgttcgaacaaatgatgattttacatcattactgagtagtatgacaccaaatggtgccaaggtttgggtaaagcctcatgagaatcaaataaaaataaatgtttgatgttgcattgtttcactcatcagtttggatatgaattggtagctcgtgatcatcttcaagctcgtatgaactccccttttgatttagttattaatgactagacattggattaattgtatgagtgtagtctatttgtgtatcgttttactggactaaaaatgaacttcttgttaatttccaaaacgattgttgttcctactatattcatgtctaagttgatagcgatttgccttcttaaagttctatttccattcaaagaaaaataataaaagagttaaaaacaacctaaattgatccaaaaaaaaacgtaattaacaatagaaagaaaaaaaaaattggttaagagacattgaggaaaattaagaaaagaagtatcctttgaaaaatcagccatataaagtgctaatgattaatagctacatatataataacctcacatcactatataaaaaataaatatcaactcttccacgtaacaaatccgacataaatgtactgtcaaatgaaagatttcaaagagaaactattttcatttcatttctcaaaatccacaaactctgtttcgagcattctttccaaagttataaaagaacctctaaaaatcatcataaatcagtacatctctccttatactccataataccaaaaagctttcaacccaacaacacatccttcttagtcatcatcttctggatcaaagtccttgatcttcacatctgcgtcttctccaaattgtatgcatgtgtcaatttgagccaacacatactttatactgtaaacaaaaataaacttgtgttagaaacaatgtggcctttattgtgttcctgggaaaatagacaaatattttctaaaccatttactctttgagttaatagtacaaagccccggagaggtgcattggtcaactcatggtttagttgttcgattacttaaaggcaacctaaaagttcctatgtcacataagctgcacggtttagttataaggcaagcattccaaaaagtatgcagttcgaaaggagacactcgataacttctaactacaaaacttaattcccttaacagaagcacacgtatcagcacaaaccgctc

SEQ ID NO: 229235 - DNA, 1287 bp, Cannabis indica
actctaatcactctgccaaaatgattctttacaacaacaacaatgcacatactatccaatcacaattcagcttaatccaattcgaaggaggaggagaccaagatttttttaaaactggagttggactagtgagcaaggaagcgtgcatatctgcataagaaatacaaatattatcaaagcatttgttgttttatgttttggtgaggttattgtgttttgtgctttgttttctttcttttactttaatttcaaacttttcttaaaaataattatgtttttgggtgcttatacatttgtacttttttccttcaacagccctatctaaataaatgcataataaattcccaaattttcctttcatatcttttaaaatatattttggagaaaactacctatgagcaaataatattttaaatttaataaaatatttttcttcctctattatttattatttaaatatttagtactctcaattataaatattaattcctcaaatttaaacattttaatcacaatttttaattaaatcaacagtaaatataaccacaaatacattaattttttttatttaattttcatgcttgtaaagataaaagtatttttttacatacatatatatttaaaatccttacaaaaaaaaattcttaaaaataataaattaattacaatataaagatatgtattactgttttgaaagtgtgtaaaaaactaattatactagttaatattttcttaagagagattaatttgtatgggtagctcccaagctcacgtgatttgtaactccttcgtctccgtaagttaatgctccactcctataagcaaacactcgactacgtactatgtataattttaggagcttgcattacttcatgtaaagccaaatttatatgtttaaattcatatttagagaatgtaaaacttgcactagtagtacgtataagagattgattattagtataagcataagtacacacaagtttcatggcactacaaacccgctgctgttgtgcctcatgcgacaaaaggcctaatcaatttctgttgaagatttaacaatagacatctcatacgcaaacaacaccatatgaagttactattatatagcctcttcattcactccaaacctattctcattaatttccatatctatttgttcataaatgatattattcaaacacaaaggccacttgtatgcatagctattagctactgatcaaccaacctattatgcatcaatggcaataatagatcataatgaggtgaggcaaatagaagcagagatta

SEQ ID NO: 229236 - DNA, 891 bp, Cannabis indica
gggaaaatttaaactaaaagaaagaaaacatagcaaacataaatttgaggttatttcatatttcggttttttttttaatccaatttgtctcattatttttcttcatgtagagaaaaaaggttgggagagtggtatatttgttcacaaggttctgtaagaggtcggttttttattttttatttcttttcttgtcgcaatatgatgaatcatttaccagtaatgagttttgttttggcgcatgcaaaacaggaaaaaaagaaagagaaaagaaagagtactgaatacttttgtttgggattttgagctttcctaatacaatatatcttttttttagaaaagcgttttataaatgctaaaattagacttgactgggaatgttgatagatcaagcattccaattagtattttgggcaaataccatttagacacattgagtcacaaaattacaacatcttgaaacaagaaaaattacagtccgaaaataaattagagtctattacaataatgaacatagttgtcaatgaattaattcctataagagcattgataacaatttcaaagtcgctcttaatcaaccacttgaggctagctcaagtggccataggtgggtaggtgtgtcttggaggtcctcggttcgtgtcccaggtaaaacatgattgtaatatataaacgctcaaatcaaaaaaaaaaaagtcgctcttaatcatcacaaaaaggtgctttcaaagggattgtagtcagtaagcaagcatttgcctttccaattagggaataagagaaagggtggttggtggtcacccacaaaacctctccttggtgattccttgccaaacatacacattgcctctccctacctttacattgaggtggcaaaacctcaaagtctcaaca

SEQ ID NO: 229237 - DNA, 2224 bp, Cannabis indica
tgttgttgatgatgaagtagttggactagatgatgaaaatgatgaaatgattcccattctccagacttttttctccgacacagagaatgtacagaggggccaaccacaaaccaacatgctgatagggagagtttgaagcctatttgcgaattgtccattagcgaaaaaaatttaaatcgctcaactaaatacaaagtaaatagacagctgatgaaatatcatttaaaatataatttatcttaaaacacattataaactcttttatttgtttatttttatacagaatggtccatcaaaagagcatatggtcgatacatggagagtgtctcatacgaaaaatttgtctagtggtttcgtcgaagaaaccgctacagaaaattttgtaagtaaataaatattgcattgttaaatttcaaatattatattaactatatgttttaatgatgtttatttaatagggggaattacgtaaggagcttgataagaaacgactcgaaagacaatctcagagtgatacatctggaaaagttcttggaaaaagacctaactatcaaagatgcatgggttataggaccaaaggcaaagggaaaaaattgcacagtcaaagtcagtcagttgcgcaacttctaccccctaataaaatttgcaatattgtggctgatatgtttacaactttacgtgacacatttgggagtaggctgacacctgaacaacgtgccaagttatataacccacggtttgataagtttatccaaatgtacggtcaatcacaaactcctggtggttcgtcttctcagagttacgccgctccttcacatcagcaacaccaaccttctctacagcagcaacaacaacagtttggtctgcaacagggaaattagttcgtatatagaacccctttgcagtctcctttgctcggttcaaatttgatgatttcaagatatttgggagtttcctgcaggagcaacaattttttttcaacccttatactaaaccaagctcaattagaggaaatgatacttggtttatcttcaaatcaaacatatgttccttctccaccacaaccatcagaacctcccaacaataataatgtgaattaagattttttctttcgaaaccttaatgataattttatgaaataattagtttaagtttgttaataattcaaacactataaatattaaatatattttatttagtgttaaatcataatatttagaattggtttaattatatttaatttttattaactttattatttatattattatgtaatttattaatttcatttcatttttttatatttttaaatccttactattatcggcccccgttgctaatgttcgctgttattgacaattatttgtggcggactcaaaattcaccactaataactaccaatagcgtacaatttatagcgatgagttattagcggcaattttcgtattattagtggcggatctctttgctgctaatactaaaatattatagtgccaatctgtttcacaatcagagatatttttcagcctaattttttttatggtcgtgtacattataattagttaagacatcctgcaaaaatttgaaaaaattctaaaaaatttaacaagctgaaaataaggttgaagttgttttttgcacacgtgactcttttattttatacgcgtgtgaaataaactgtttgaatattgcttttcatattgtaaatgattctgaatttctcaaaattttacaagatatcttaaacaactataaggtacacgactatagatgttaaatttgtacattaatttgtaatgataaaaagacaggtcgtgatctataagactaatttattccacaatcaaatgtttaaatttttctttaaaaaaattataaatatatcaacttttgttttgtgggatgataagagaatattttggatcttaaataaatggaattgggatgtggatgaaatataatgaaatagagccactttgagatttcctataaaatgaggcatggaacagaaccacgagaaaaagttctgagagttacaaaagaaatttcgagctcatatgagttatgtgttgagaacgagaattgaactttatgagatctaaccttctgttgttcctcagtagcttagtggtagagtggtcggttgttattggtcgtaggttcaaatcctacttggggagattttttatttctcatcaaacgaatggcatcttcttctggaaat

SEQ ID NO: 229238 - DNA, 1597 bp, Cannabis indica
tggtaaaatatatccaacacgaacaacttaaaatttttccaagcgttagaattatttagacaaacaaaatcaaatatacctaaaataataaaataatgcaaataaggaaacatcaatcaaggaaaagaaattacaaatatagagaagaaaaattaataaatggagaaagtatattactcactgtcttgacttagattactgaagaaattagaacttcgcggttgaaatcttgaagattgaaaggctgggtcctgatggtttttggaacaatagacatgatttgatgtaacacgcaggaagaaagtgaaggacgacgaggcatgcaaattttaaaaaggaagcaattgcaagttttgcagaaaaaaaaatggcaaaataagctttcagtttcaattttatacccaaaaagtggtcaccattcgatcaaaagagatgtgatccaacggatggaaacattgcaaaataagagcggttagagcattaaatgctcaacgatgtgcctcgacgttctgaaccgccaaaactcaatcggctcatgttttacacaacaaagtagtcatctcacagcatcaatacaaataaaggggtgtggcaagatgaattacttctacactaagtgtttttttcctatgaagatggataaaaaagagatctcatatttggcgagacggaatcttcctagtctgcataatcgtctaaaggattaaaacaaggagcgattgggcaattattaaatattatcccatgtttaaataaatgaaacatggagaatgtccatgtttcatccgaagttataaatgaatcaatcccaataaaattaactgtcaacctatattcctataaataggggcagaatctatgaaaaaagggatgacaaaaaataaagagaaattctattatttcaaatatggaaatttgtattcagaactccaaaaaatacccctaataataaggattcgtggagtatgtagattttaactacaaaatcacataaaatatctagtgttctttattttcattaaattatgtagtgtatttatagcaaaaaagactatttatttagttaacgaaaatctacgttaacaaaaattaattatggataaattgcggtaaaataatcaacgtttaaagaatgtaagacttaaataccaaacttattttctttctttttgcataaataacacgagttgggcaatcataacaattgaatacctatttttttagtggaaaaaatactttcaaaccctcaaattaaaatgtttcttattcaatacccaaataattttgaaaaagttaataaaaatatattttaacatatttgtcattaaaagtaaaaaaaaaacataaaatagcctagattaatcctaaaattaaacaataatgttttaaaataaaaatagtacgcaaatatattttattatatgaaaaaaattaataattattattttctcttcgaatagttttttgttatttagttttattttaacctttttttaaatctaaaatattatttttattacataaaatatttctttaatttgtgtattagtgcagatgatttattttacattattccataattttaaatttttttata

SEQ ID NO: 229239 - DNA, 951 bp, Cannabis indica
aaaaaaaaaaatatatatgttctaccaataagtgtactcattttgatggcatgttatcatgaaatctttcttttcactttcttttctcctatttttattacttaaaaataaatggttagctatcccacacaatgttctttgttcccctttctcttatcttgctgtattctctcctaccaaccaaccatatattttccattggattttgatattaaaggctatgattaatttaagtataaatatttatatatggactcttatttagcatgtatactataaactagagatgtcatggattatgttgtaattgtatgtattagtatcttaacagatttacaatttacaaaccgtgaaataaggaaagatcatgactaaatacaattgtactaatattcacatgaggttatatagttgtggttaactatatttctattaactaagagaccacattttacaaaaatggaatacgatcttgtatctacctccaacaaatgaaacaatgattgaagaaagaaagtagaagaaggggatacgagagaatatatcttttttctttttaaatgtattaaacattaattgaatacaactggtaatatagaattagaattgaattaaatttaaatatgaattagaattataatggtatagaaagtatttgattgaaaatgaaaacacttttaaccaaatatacccaaagggaagttccccattctaatgtctttttggctaaaatgtgaaagtagtacagaaactcttaatcctgggaaacttataaaaatactgaaatttgagttaatttttacaaaaatattgtcacacggaaaagttttcaaaaatactatgtttttataaaataccagtagaacacaaaatagaacaactcaaaacaacagttgaacaactaaaaaacaccagtgaaaacttaacacaatatactgcagtatgaaactt
